(19) United States
(12) Patent Application Publication
(10) Pub. No.: US 2014/0004565 A1
(43) Pub. Date: Jan. 2, 2014

(54) CELL-BASED BIOPROCESSING

(71) Applicants: Anthony Rossomando, Cambridge, MA (US); Muthiah Manoharan, Cambridge, MA (US); Gregory Hinkle, Cambridge, MA (US); Brian Bettencourt, Cambridge, MA (US); John M. Maraganora, Cambridge, MA (US); Stuart Pollard, Cambridge, MA (US); David Kocisko, Newton, MA (US); Shannon Hogan, Cambridge, MA (US)

(72) Inventors: Anthony Rossomando, Cambridge, MA (US); Muthiah Manoharan, Cambridge, MA (US); Gregory Hinkle, Cambridge, MA (US); Brian Bettencourt, Cambridge, MA (US); John M. Maraganora, Cambridge, MA (US); Stuart Pollard, Cambridge, MA (US); David Kocisko, Newton, MA (US); Shannon Hogan, Cambridge, MA (US)

(73) Assignee: Alnylam Pharmaceuticals, Inc., Cambridge, MA (US)

(21) Appl. No.: 13/380,182

(22) PCT Filed: Jul. 6, 2010
(86) PCT No.: PCT/US10/41106

§ 371 Date: Mar. 8, 2012

Related U.S. Application Data
(60) Provisional application No. 61/354,932, filed on Jun. 15, 2010.
(60) Provisional application No. 61/334,398, filed on May 13, 2010.
(60) Provisional application No. 61/319,578, filed on Mar. 31, 2010.
(60) Provisional application No. 61/319,589, filed on Mar. 31, 2010.
(60) Provisional application No. 61/293,980, filed on Jan. 11, 2010.
(60) Provisional application No. 61/267,419, filed on Dec. 7, 2009.
(60) Provisional application No. 61/244,868, filed on Sep. 22, 2009.
(60) Provisional application No. 61/223,370, filed on Jul. 6, 2009.

(51) Int. Cl. C07K 16/28

(52) U.S. Cl. CPC C07K 16/2887
USPC 435/70.3

(57) ABSTRACT

The invention provides compositions and methods for producing an immunogenic agent from a host cell. In various embodiments, the immunogenic agent is a polypeptide, an antigen, a virus particle, or a vaccine In one aspect, the invention provides for a method for producing an immunogenic agent from a host cell. The method generally comprises contacting the cell with a RNA effector molecule, a portion of which is complementary to a target gene, maintaining the cell in a large-scale bioreactor for a time sufficient to modulate expression of the target gene, wherein the modulation enhances production of the immunogenic agent from the cell, and isolating the immunogenic agent from the cell.

### RELATED APPLICATIONS

[0001] This application claims the benefit of U.S. Provisional Patent Application No. 61/319,578, filed Mar. 31, 2010, entitled CELL-BASED BIOPROCESSING, by Rossomando et al.; U.S. Provisional Patent Application No. 61/223,370, filed Jul. 6, 2009, entitled COMPOSITIONS AND METHODS FOR ENHANCING PRODUCTION OF A BIOLOGICAL PRODUCT, by Maraganore et al.; U.S. Provisional Patent Application No. 61/244,868, filed Sep. 22, 2009, entitled COMPOSITIONS AND METHODS FOR ENHANCING PRODUCTION OF A BIOLOGICAL PRODUCT, by Maraganore et al.; U.S. Provisional Patent Application No. 61/267,419, filed Dec. 7, 2009, entitled NOVEL LIPIDS AND COMPOSITIONS FOR THE DELIVERY OF THERAPEUTICS, by Manoharan et al., filed; U.S. Provisional Patent Application No. 61/334,398, filed May 13, 2010, entitled CHARGED LIPIDS AND COMPOSITIONS FOR NUCLEIC ACID DELIVERY, by Manoharan et al.; U.S. Provisional Patent Application No. 61/293,980, filed Jan. 11, 2010, entitled COMPOSITIONS AND METHODS FOR ENHANCING PRODUCTION OF A BIOLOGICAL PRODUCT, by Rossomando et al.; U.S. Provisional Patent Application No. 61/319,589, filed Mar. 31, 2010, entitled CELL-BASED BIOPROCESSING, by Rossomando et al.; and U.S. Provisional Patent Application No. 61/354,932, filed Jun. 15, 2010, entitled CHINESE HAMSTER OVARY (CHO) CELL TRANSCRIPTOME, CORRESPONDING SIRNAS AND USES THEREOF, by Rossomando et al.; each of which is incorporated fully herein by reference.

### REFERENCES TO TABLES AND SEQUENCES

[0002] The specification includes a Sequence Listing as part of the originally filed subject matter. The sequence listing for SEQ ID NOs 1 to 3,290,939 is provided herein in an electronic format on 4 compact discs (CD-R), labeled “CRF,” “COPY 1,” “COPY 2,” and “COPY 3,” as file name “51058077.TXT,” and is incorporated herein by reference in their entirety in to the present specification.

[0003] The instant application contains a “lengthy” Sequence Listing which has been submitted via CD-R in lieu of a printed paper copy, and is hereby incorporated by reference in its entirety. Said CD-R, recorded on Jul. 1, 2010, are labeled CRF, “Copy 1,” “Copy 2” and “Copy 3”, respectively, and each contains only one identical 774,635 KB file (51058077.TXT).

### FIELD OF THE INVENTION

[0004] The invention relates generally to the field of bioprocessing and more particularly to methods for producing an immunogenic agent in a host cell by contacting the cell with a RNA effector molecule capable of modulating expression of a target gene, wherein the modulation enhances production of the immunogenic agent. The invention also relates generally to transcriptomes, organized transcriptomes, and systems and methods using the transcriptomes for designing targeted modulation of immunogenic agent production in cells. The invention further relates to engineering cells and cell lines for more effective and efficient production of immunogenic agents. The invention also relates to molecules, compositions, cells, and kits useful for carrying out the methods and immunogenic agent produced by the methods.

### BACKGROUND

[0005] Cell culture techniques are used to manufacture a wide range of biological products, including biopharmaceuticals, biofuels, metabolites, vitamins, nutraceuticals, immunogenic agents and vaccines. A number of strategies have been developed to enhance productivity, yield, efficiency, and other aspects of cell culture bioprocesses in order to facilitate industrial scale production and meet applicable standards for product quality and consistency. Traditional strategies for optimizing cell culture bioprocesses involve adjusting physical and biochemical parameters, such as culture media (e.g., pH, nutrients) and conditions (e.g., temperature, duration), and selecting host cells having desirable phenotypes. Genetic approaches have also been developed for optimizing cell culture bioprocesses by introducing recombinant DNA into host cells, where the DNA encodes an exogenous protein that influences the production of an immunogenic agent, or regulates expression of an endogenous protein that influences production of the immunological agent. Such methods require costly and time-consuming laboratory manipulations, however, and can be incompatible with certain genes, proteins, host cells, and biological products including immunogenic agents. Accordingly, there is a need in the art for new genetic approaches for optimizing cell culture bioprocesses involving a wide range of host cells and biological products, such as immunogenic agents.

[0006] More recently, host cells for biological production have been modified to incorporate into their genome genes that express shRNAs for the silencing of genes that influence production of the biological product. In these cases, product yield has proven difficult to regulate, however, because of uncontrolled, unintended, expression of the shRNAs which compromises host cell viability. The process of incorporating shRNAs also requires cell engineering, which is time-consuming. Furthermore, uncontrolled expression ultimately leads to phenotypic changes and overtime the host cells carrying the genes for expressed shRNA lose their ability to produce biological product at any significant yield.

[0007] For example, Chinese hamster (Cricetulus griseus) ovary cells (CHO cells) have been used widely in various bioprocesses, yet relatively little is known about gene expression s in these cells; thus, targeted and intelligent modulation of bioprocesses in these cells cannot be done or designed readily. Accordingly, there is a need in the art for new genetic approaches for optimizing cell culture bioprocesses involving a wide range of host cells, including CHO cells, and immunogenic agents produced in these cells.

### SUMMARY

[0008] The invention is based at least in part on the surprising discovery that RNA effector molecules can be applied at low concentrations to cells in culture to effect potent, durable modulation of gene expression, such that the quality and quantity of an immunogenic agent produced by a host cell can be improved without the need for extensive cell line engineering. As such, in a first aspect, the invention provides compositions and methods for producing an immunogenic agent from a host cell. In various embodiments, the immunogenic agent is a polypeptide, a viral product, a virus particle, or a vaccine.

[0009] In one aspect, the invention provides for a method for producing an immunogenic agent from a host cell. The method generally comprises contacting the cell with a RNA effector molecule, a portion of which is complementary to a target gene, maintaining the cell in a large-scale bioreactor for a time sufficient to modulate expression of the target gene, wherein the modulation enhances production of the immunogenic agent from the cell, and isolating the immunogenic agent from the cell.

[0010] In one embodiment, the RNA effector molecule transiently modulates expression of the target gene. In another embodiment, the RNA effector molecule transiently inhibits expression of the target gene. In one embodiment, the RNA effector molecule can activate the target gene. In another embodiment, the RNA effector can inhibit the target gene.

[0011] In further embodiments, the host cell is an animal cell, a plant cell, an insect cell, or a fungal cell. In one embodiment, the animal cell is a mammalian cell. In a further embodiment, the mammalian cell is a human cell, a rodent cell, a canine cell, or a non-human primate cell. In a particular embodiment, the host cell is a cell derived from a CHO cell. In another embodiment, a host cell contains a transgene that encodes an immunogenic agent.

[0012] In one embodiment, the cell is contacted with a plurality of different RNA effector molecules. The plurality of RNA effector molecules can be used to modulate expression of a single target gene or multiple target genes.

[0013] In another embodiment, the composition is formulated for administration to cells according to a dosage regimen described herein, e.g., at a frequency of 6 hr, 12 hr, 24 hr, 36 hr, 48 hr, 72 hr, 84 hr, 96 hr, 108 hr, or more. In another embodiment, the administration of the composition can be maintained during one or more cell growth phases, e.g., lag phase, early log phase, mid-log phase, late-log phase, stationary phase, or death phase. In some of the embodiments, contacting a host cell with a RNA effector molecule (e.g., a dsRNA) occurs prior to, during or after the viral infection or vector inoculation to inhibit cellular and/or anti-viral processes that compromise the yield and quality of the immunogenic agent harvest.

[0014] In another embodiment, a composition containing two or more RNA effector molecules directed against separate target genes is used to enhance production of a immunogenic agent in cell culture by modulating expression of a first target gene and at least a second target gene in the cultured cells. In another embodiment, a composition containing two or more RNA effector molecules directed against the same target gene is used to enhance production of an immunogenic agent in cell culture by modulating expression of the target gene in cultured cells.

[0015] In another embodiment, a first RNA effector molecule is administered to a cultured cell, and then a second RNA effector molecule is administered to the cell (or vice versa). In a further embodiment, the first and second RNA effector molecules are administered to a cultured cell substantially simultaneously.

[0016] In one embodiment, the RNA effector molecule is added to the cell culture medium used to maintain the cells under conditions that permit production of an immunogenic agent. The RNA effector molecule can be added at different times or simultaneously. In one embodiment, one or more of the different RNA effector molecules are added by continuous infusion into the cell culture medium, for example, to maintain a continuous average percent inhibition or RNA effector molecule concentration. In another embodiment, one or more of the different RNA effector molecules are added by continuous infusion into the cell culture medium, for example, to maintain a minimum average percent inhibition or RNA effector molecule concentration. In one embodiment, the continuous infusion is administered at a rate to achieve a desired average percent inhibition for at least one target gene. In one embodiment, the continuous infusion is performed for a distinct period of time (which can be repeated), e.g., for 1 hr, 2 hr, 3 hr, 4 hr, 8 hr, 16 hr, 18 hr, 24 hr, 48 hr, 72 hr, or longer. When applying a plurality of different RNA effector molecules, each of the different RNA effector molecules can be added at the same frequency or different frequencies. Each of the different RNA effector molecules is added at the same concentration or at different concentrations. In some embodiments, the last contact of cells with a RNA effector molecule is at least 24 hr, 48 hr, 72 hr, 120 hr, or later, before isolation of the immunogenic agent or harvesting the supernatant.

[0017] Generally, the RNA effector molecule is added at a given concentration of less than or equal to 200 nM (e.g., 100 nM, 80 nM, 50 nM, 20 nM, 10 nM, 1 nM, or less). As described herein, low concentrations of RNA effector molecules can be used in large scale bioprocessing to efficiently modulate target genes. There are significant economic and commercial advantages (e.g., lower costs and easier removal) of using low concentrations of RNA effector molecules. Thus, in one embodiment, cells are contacted with a RNA effector molecule at a concentration of 100 nM or less, 50 nM or less, 20 nM or less, 10 nM or less, 5 nM or less, or 1 nM or less. In a particular embodiment, the one or more RNA effector molecules is administered into the cell culture medium at a final concentration of 1 nM at least once (e.g., at least two times, at least three times, at least four times, or more) during the growth phase and/or production phase.

[0018] In still another embodiment, the RNA effector molecule is added at a given starting concentration of each of the different RNA effector molecules (e.g., at 1 nM each), and further supplemented with continuous infusion of the RNA effector molecule.

[0019] In one embodiment, the RNA effector composition comprises a reagent that facilitates RNA effector molecule uptake, for example, an emulsion, a cationic lipid, a non-cationic lipid, a charged lipid, a liposome, an anionic lipid, a penetration enhancer, a transfection reagent or a modification to the RNA effector molecule for attachment, e.g., a ligand, a targeting moiety, a peptide, a lipophilic group, etc.

[0020] The RNA effector molecule to be contacted with the cell can be incorporated into a formulation that facilitates uptake and delivery into the cell. The one or more of the different RNA effector molecules can be added by contacting the cells with the RNA effector molecule and a reagent that facilitates RNA effector molecule uptake, for example, an emulsion, a cationic lipid, a non-cationic lipid, a charged lipid, a liposome, an anionic lipid, a penetration enhancer, a transfection reagent or a modification to the RNA effector molecule for attachment, e.g., a ligand, a targeting moiety, a peptide, a lipophilic group, etc.

[0021] In certain embodiments, a lipid formulation is used in a RNA effector molecule composition as a reagent that facilitates RNA effector molecule uptake. In certain embodiments, the lipid formulation can be a LNP formulation, a LNP01 formulation, a XTC-SNALP formulation, or a SNALP formulation as described herein. In related embodiments, the XTC-SNALP formulation is as follows: using 2,2-Dilinoleyl-4-dimethylaminoethyl-[1,3]-dioxolane (XTC) with XTC/DPPC/Cholesterol/PEG-cDMA in a ratio of 57.1/7.1/34.4/1.4 and a lipid:siRNA ratio of about 7. In still other related embodiments, the RNA effector molecule is a dsRNA and is formulated in a XTC-SNALP formulation as follows: using 2,2-Dilinoleyl-4-dimethylaminoethyl-[1,3]-dioxolane (XTC) with a XTC/DPPC/Cholesterol/PEG-cDMA in a ratio of 57.1/7.1/34.4/1.4 and a lipid:siRNA ratio of about 7. Alternatively, a RNA effector molecule such as those described herein can be formulated in a LNP09 formulation as follows: using XTC/DSPC/Chol/PEG2000-C14 in a ratio of 50/10/38.5/1.5 mol % and a lipid:siRNA ratio of about 11:1. In some embodiments, the RNA effector molecule is formulated in a LNP11 formulation as follows: using MC3/DSPC/Chol/PEG2000-C14 in a ratio of 50/10/38.5/1.5 mol % and a lipid:siRNA ratio of about 11:1. In still another embodiment, the RNA effector molecule is formulated in a LNP09 formulation or a LNP 11 formulation and reduces the target gene mRNA levels by about 85 to 90% at a dose of 0.3 mg/kg, relative to a PBS control group. In yet another embodiment, the RNA effector molecule is formulated in a LNP09 formulation or a LNP11 formulation and reduces the target gene mRNA levels by about 50% at a dose of 0.1 mg/kg, relative to a PBS control group. In yet another embodiment, the RNA effector molecule is formulated in a LNP09 formulation or a LNP11 formulation and reduces the target gene protein levels in a dose-dependent manner relative to a PBS control group as measured by a western blot. In yet another embodiment, the RNA effector molecule is formulated in a SNALP formulation as follows: using DlinDMA with a DLinDMA/DPPC/Cholesterol/PEG2000-cDMA in a ratio of 57.1/7.1/34.4/1.4 and a lipid:siRNA ratio of about 7.

[0022] In some embodiments, the lipid formulation comprises a lipid having the following formula:

[chemical structure]

where R₁ and R₂ are each independently for each occurrence optionally substituted C₁₀-C₃₀ alkyl, optionally substituted C₁₀-C₃₀ alkoxy, optionally substituted C₁₀-C₃₀ alkenyl, optionally substituted C₁₀-C₃₀ alkenyloxy, optionally substituted C₁₀-C₃₀ alkynyl, optionally substituted C₁₀-C₃₀ alkynyloxy, or optionally substituted C₁₀-C₃₀ acyl;

[chemical structure]

represents a connection between L₂ and L₁ which is:

[0023] (1) a single bond between one atom of L₂ and one atom of L₁, wherein
[0024] L₁ is C(Rₓ), O, S or N(Q);
[0025] L₂ is —CR₅R₆—, —O—, —S—, —N(Q)-, ═C(R₅)—, —C(O)N(Q)-, —C(O)O—, —N(Q)C(O)—, —OC(O)—, or —C(O)—;

[0026] (2) a double bond between one atom of L₂ and one atom of L₁; wherein

[0027] L₁ is C;
[0028] L₂ is —CR₅═, —N(Q)═, —N—, —O—N═, —N(Q)-N═, or —C(O)N(Q)-N═;

[0029] (3) a single bond between a first atom of L₂ and a first atom of L₁, and a single bond between a second atom of L₂ and the first atom of L₁, wherein
[0030] L₁ is C;
[0031] L₂ has the formula

[chemical structure]

wherein
[0032] X is the first atom of L₂, Y is the second atom of L₂, - - - - - represents a single bond to the first atom of L₁, and X and Y are each, independently, selected from the group consisting of —O—, —S—, alkylene, —N(Q)-, —C(O)—, —O(CO)—, —OC(O)N(Q)-, —N(Q)C(O)O—, —C(O)O, —OC(O)O—, —OS(O)(Q₂)O—, and —OP(O)(Q₂)O—;
[0033] Z₁ and Z₄ are each, independently, —O—, —S—, —CH₂—, —CHR⁵—, or —CR⁵R⁵—;
[0034] Z₂ is CH or N;
[0035] Z₃ is CH or N;
[0036] or Z₂ and Z₃, taken together, are a single C atom;

[0037] A₁ and A₂ are each, independently, —O—, —S—, —CH₂—, —CHR⁵—, or —CR⁵R⁵—;
[0038] each Z is N, C(R₅), or C(R₃);
[0039] k is 0, 1, or 2;
[0040] each m, independently, is 0 to 5;
[0041] each n, independently, is 0 to 5;

[0042] where m and n taken together result in a 3, 4, 5, 6, 7 or 8 member ring;

[0043] (4) a single bond between a first atom of L₂ and a first atom of L₁, and a single bond between the first atom of L₂ and a second atom of L₁, wherein

[0044] (A) L₁ has the formula:

[chemical structure]

wherein
[0045] X is the first atom of L₁, Y is the second atom of L₁, - - - - - -represents a single bond to the first atom of L₂, and X and Y are each, independently, selected from the group consisting of —O—, —S—, alkylene, —N(Q)-, —C(O)—, —O(CO)—, —OC(O)N(Q)-, —N(Q)C(O)O—, —C(O)O, —OC(O)O—, —OS(O)(Q₂)O—, and —OP(O)(Q₂)O—;
[0046] T₁ is CH or N;
[0047] T₂ is CH or N;
[0048] or T₁ and T₂ taken together are C═C;
[0049] L₂ is CR₅; or

[0050] (B) L₁ has the formula:

[chemical structure]

wherein

[0051] X is the first atom of L₁, Y is the second atom of L₁, - - - - -represents a single bond to the first atom of L₂, and X and Y are each, independently, selected from the group consisting of —O—, —S—, alkylene, —N(Q)-, —C(O)—, —O(CO)—, —OC(O)N(Q)-, —N(Q)C(O)O—, —C(O)O, —OC(O)O—, —OS(O)(Q₂)O—, and —OP(O)(Q₂)O—;
[0052] T₁ is —CR₅R₅—, —N(Q)-, —O—, or —S—;
[0053] T₂ is —CR₅R₅—, —N(Q)-, —O—, or —S—;
[0054] L₂ is CR₅ or N;

[0055] R₃ has the formula:

[chemical structure]

[0056] wherein

[0057] each of Y₁, Y₂, Y₃, and Y₄, independently, is alkyl, cycloalkyl, aryl, aralkyl, or alkynyl; or

[0058] any two of Y₁, Y₂, and Y₃ are taken together with the N atom to which they are attached to form a 3- to 8-member heterocycle; or

[0059] Y₁, Y₂, and Y₃ are all be taken together with the N atom to which they are attached to form a bicyclic 5- to 12-member heterocycle;

[0060] each Rₙ, independently, is H, halo, cyano, hydroxy, amino, alkyl, alkoxy, cycloalkyl, aryl, heteroaryl, or heterocyclyl;

[0061] L₃ is a bond, —N(Q)-, —O—, —S—, —(CR₅R₆)ₐ—, —C(O)—, or a combination of any two of these;

[0062] L₄ is a bond, —N(Q)-, —O—, —S—, —(CR₅R₆)ₐ—, —C(O)—, or a combination of any two of these;

[0063] L₅ is a bond, —N(Q)-, —O—, —S—, —(CR₅R₆)ₐ—, —C(O)—, or a combination of any two of these;

[0064] each occurrence of R₅ and R₆ is, independently, H, halo, cyano, hydroxy, amino, alkyl, alkoxy, cycloalkyl, aryl, heteroaryl, or heterocyclyl; or two R₅ groups on adjacent carbon atoms are taken together to form a double bond between their respective carbon atoms; or two R₅ groups on adjacent carbon atoms and two R₆ groups on the same adjacent carbon atoms are taken together to form a triple bond between their respective carbon atoms;

[0065] each a, independently, is 0, 1, 2, or 3;

[0066] wherein

[0067] an R₅ or R₆ substituent from any of L₃, L₄, or L₅ is optionally taken with an R₅ or R₆ substituent from any of L₃, L₄, or L₅ to form a 3- to 8-member cycloalkyl, heterocyclyl, aryl, or heteroaryl group; and

[0068] any one of Y₁, Y₂, or Y₃, is optionally taken together with an R₅ or R₆ group from any of L₃, L₄, and L₅, and atoms to which they are attached, to form a 3- to 8-member heterocyclyl group;

[0069] each Q, independently, is H, alkyl, acyl, cycloalkyl, alkenyl, alkynyl, aryl, heteroaryl or heterocyclyl; and

[0070] each Q₂, independently, is O, S, N(Q)(Q), alkyl or alkoxy.

[0071] In a particular embodiment, the formulation comprises a lipid containing a quaternary amine, such as those described herein (for example, Lipid H, Lipid K, Lipid L, Lipid M, Lipid P, and Lipid R). Thus, in some embodiments, the RNA effector molecule composition comprises a reagent that facilitates RNA effector molecule uptake which comprises “Lipid H”, “Lipid K”, “Lipid L”, “Lipid M”, “Lipid P”, or “Lipid R”, whose formulae are indicated as follows:

[chemical structure]

[0072] In embodiments in which the RNA effector molecule composition is formulated with a delivery facilitating agent, the composition can be in solution (e.g., a sterile solution, for example, packaged in a unit dosage form), or as a sterile lyophilized composition (pre-dosed, for example, in units for use in 1 L of cell culture media).

[0073] In another embodiment, the RNA effector molecule composition further comprises a growth medium (e.g., chemically defined media such as Biowhittaker® POWERCHO® medium (Lonza), HYCLONE PF CHO™ medium (Thermo Scientific), GIBCO® CD DG44 MEDIUM (Invitrogen, Carlsbad, Calif.), Medium M199 (Sigma-Aldrich), OPTIPRO™ SFM medium (Gibco), etc.). The RNA effector can be present in a concentration such that, when reconstituted in a medium, provides the desired concentration.

[0074] In still another embodiment, the RNA effector molecule composition further comprises an agent selected from the group consisting of essential amino acids (e.g., glutamine), 2-mercapto-ethanol, bovine serum albumin (BSA), lipid concentrate, cholesterol, catalase, insulin, human transferrin, superoxide dismutase, biotin, DL α-tocopherol acetate, DL α-tocopherol, vitamins (e.g., Vitamin A), choline chloride, D-calcium pantothenate, folic acid, Nicotinamide, pyridoxal hydrochloride, riboflavin, thiamine hydrochloride, i-Inositol, corticosterone, D-galactose, ethanolamine HCl, glutathione (reduced), L-carnitine HCl, linoleic acid, linolenic acid, progesterone, putrescine 2HCl, sodium selenite, T3 (triodo-I-thyronine), growth factors (e.g., EGF), iron, L-glutamine, L-alanyl-L-glutamine, sodium hypoxanthine, aminopterin and thymidine, arachidonic acid, ethyl alcohol 100%, myristic acid, oleic acid, palmitic acid, palmitoleic acid, PLURONIC F68® (Invitrogen), stearic acid 10, TWEEN 80® nonionic surfactant (Invitrogen), sodium pyruvate, and glucose.

[0075] In various embodiments, the RNA effector molecule can comprise siRNA, miRNA, dsRNA, saRNA, shRNA, piRNA, tkRNAi, eiRNA, pdRNA, a gapmer, an antagomir, or a ribozyme. In one embodiment the RNA effector molecule is not shRNA. In one embodiment the RNA effector molecule is a dsRNA.

[0076] In some embodiments, the RNA effector molecule is selected from a group of siRNAs, wherein the RNA effector molecule comprises sense strand and an antisense strand comprising at least 16 contiguous nucleotides (e.g., at least 17, at least 18, at least 19 nucleotides, etc.). In one embodiment, the antisense strand comprises at least 16 contiguous nucleotides. In one embodiment, the antisense strand comprises at least 17 contiguous nucleotides. In one embodiment, the antisense strand comprises at least 18 contiguous nucleotides. In one embodiment, the antisense strand comprises at least 19 contiguous nucleotides. In one embodiment, the antisense strand further comprises at least one deoxyribonucleotide. In one embodiment, the antisense strand further comprises at least two deoxyribonucleotides. In one embodiment, the antisense strand further comprises two deoxythymidine residues.

[0077] In some embodiments, the RNA effector molecule comprises an antisense strand of a double-stranded oligonucleotide in which the antisense strand comprises at least 16 contiguous nucleotides (e.g., 17, nucleotides, 18 nucleotides, or 19 nucleotides). In one embodiment, the antisense strand comprises at least 16 contiguous nucleotides. In one embodiment, the antisense strand comprises at least 17 contiguous nucleotides. In one embodiment, the antisense strand comprises at least 18 contiguous nucleotides. In one embodiment, the antisense strand comprises at least 19 contiguous nucleotides. In one embodiment, the antisense strand further comprises at least one deoxyribonucleotide. In one embodiment, the antisense strand further comprises at least two deoxyribonucleotides. In one embodiment, the antisense strand further comprises two deoxythymidine residues.

[0078] In some embodiments, the maintaining step further comprises monitoring at least one measurable parameter selected from the group consisting of cell density, medium pH, oxygen levels, glucose levels, lactic acid levels, temperature, and protein production.

[0079] In some embodiments, at least one measurable parameter can be monitored during production of an immunogenic agent, including any one of cell density, medium pH, oxygen levels, glucose levels, lactic acid levels, temperature, and protein production.

[0080] In further embodiments, the method further comprises administering to the host cell a second agent. The second agent can be a growth factor; an apoptosis inhibitor; a kinase inhibitor; a phosphatase inhibitor; a protease inhibitor; an inhibitor of pathogens (e.g., where a virus is the immunogenic agent, an agent that inhibits growth and/or propagation of other viruses or fungal or bacterial pathogens); or a histone demethylating agent. Where the virus being propagated is influenza, the second agent can be a protease that cleaves influenza hemagglutinin, such as pronase, thermolysin, subtilisin A, or a recombinant protease.

[0081] In another embodiment, a composition containing a RNA effector molecule described herein, e.g., a dsRNA directed against a host cell target gene, is administered to a cultured cell with a non-RNA agent useful for enhancing the production of an immunogenic agent by the cell. The non-RNA agent can be selected from the group consisting of: an antibiotic, an antimycotic, an antimetabolite (e.g., methotrexate), an antibody; a growth factor (e.g., insulin); an apoptosis inhibitor; a kinase inhibitor, such as a MAP kinase inhibitor, a CDK inhibitor, and/or a K252a; a phosphatase inhibitor, such as sodium vanadate and okadaic acid; a protease inhibitor; and a histone demethylating agent, such as 5-azacytidine.

[0082] In some embodiments, the immunogenic agent is a polypeptide and the target gene encodes a protein that affects post-translational modification in the host cell. In various embodiments, the post-translational modification can be protein glycosylation, protein deamidation, protein disulfide bond formation, methionine oxidation, protein pyroglutamation, protein folding, or protein secretion.

[0083] In additional embodiments, the target gene encodes a protein that affects a physiological process of the host cell. In various embodiments, the physiological process is apoptosis, cell cycle progression, cellular immune response, carbon metabolism or transport, lactate formation, RNAi uptake and/or efficacy, or actin dynamics.

[0084] In further embodiments, the target gene encodes a pro-oxidant enzyme, or a protein that affects cellular pH.

[0085] In another aspect, the invention provides a cultured eukaryotic cell containing at least one RNA effector molecule provided herein. The cell is a mammalian cell, such as a rodent cell, a canine cell, a non-human primate cell, or a human cell.

[0086] In another aspect, the invention provides a composition for enhancing production of an immunogenic agent in cell culture by modulating the expression of a target gene in a host cell. The composition typically includes one or more RNA effector molecules described herein and a suitable carrier or delivery vehicle, e.g., an acceptable carrier and/or a reagent that facilitates RNA effector molecule uptake. The RNA effector molecule composition can be formulated as suspension in aqueous, non-aqueous, or mixed media and can be formulated in a lipid or non-lipid formulation. The RNA effector molecule composition can be provided in a sterile solution or lyophilized (e.g., provided in discrete units by concentration and/or volume).

[0087] In another embodiment, a composition containing a RNA effector molecule described herein, e.g., a dsRNA directed against a host cell target gene, is administered to a cultured cell with a non-RNA agent useful for enhancing the production of an immunogenic agent by the cell.

[0088] In one embodiment, a vector is provided for modulating the expression of a target gene in a cultured cell, where the target gene encodes a protein that affects production of an immunogenic agent by the cell. In one embodiment, the vector includes at least one regulatory sequence operably linked to a nucleotide sequence that encodes at least one strand of a RNA effector molecule. In one embodiment, the RNA effector molecule is not encoded by a vector.

[0089] In another embodiment, the invention provides a cell containing a vector for inhibiting the expression of a target gene in a cell. The vector includes a regulatory sequence operably linked to a polynucleotide encoding at least one strand of a RNA effector molecule.

[0090] Still another aspect of the invention encompasses kits comprising RNA effector molecules described herein. In one embodiment, the kits comprise a RNA effector molecule that modulates expression of a target gene encoding a protein that affects production of the immunogenic agent. In another embodiment, the kits further comprise a modified cell line which expresses a RNA effector molecule which modulates expression of a protein that affects production of the immunogenic agent. The kits can also comprise instructions for carrying out methods provided herein.

[0091] In one embodiment, the kit further comprises suitable culture media for growing host cells and/or constructs (e.g., plasmid, viral, etc.) for introducing a nucleic acid sequence encoding a RNA effector molecule into host cells. In still another embodiment, the kits can further comprise reagents for detecting and/or purifying the immunogenic agent. Non-limiting examples of suitable reagents include PCR primers, polyclonal antibodies, monoclonal antibodies, affinity chromatography media, and the like.

[0092] In one embodiment, a kit comprises a RNA effector molecule that modulates expression of a target gene to inhibit expression of a latent, adventitious, or endogenous virus and thus affect production of the desired immunogenic agent. In another embodiment, a kit comprises a host cell that expresses a RNA effector molecule that modulates expression of latent, adventitious, or endogenous virus that affects production of the desired immunogenic agent. Such kits can also comprise instructions for carrying out methods provided herein. The kits can also include at least one reagent that facilitates RNA effector molecule-uptake, comprising a charged lipid, an emulsion, a liposome, a cationic or non-cationic lipid, an anionic lipid, a transfection reagent or a penetration enhancer. In a particular embodiment, the reagent that facilitates RNA effector molecule-uptake comprises a charged lipid.

[0093] Some embodiments of the present invention relate to initiating RNA interference in a host cell, during or after microbial inoculation or vector transduction, to inhibit expression of endogenous, latent or adventitious virus that can compromise the yield and/or quality of the harvested immunogenic agent. For example, an embodiment administers a siRNA, or, e.g., a shRNA in naked, conjugated or formulated form (e.g., lipid nanoparticle), that targets an endogenous, latent or adventitious virus pathway (e.g., ev loci of endogenous avian leukosis virus (ALV-E) in avian cells; endogenous type C retrovirus-like particle genomes in CHO cells; or the rep gene of porcine circovirus type 1 (PCV-1) in Vero cells), and thereby increases quality and/or yield of the desired immunogenic agent.

[0094] In some embodiments of the invention, simple naked (i.e., unconjugated) RNA effector molecules, or conjugated (e.g., directly conjugated to cholesterol or other targeting ligands) RNA effector molecules can be used. In another embodiment, plasmid- or viral vector-encoded RNA effector molecules for shRNA can be used.

[0095] In some embodiments of the invention, LNP or alternate polymer formulations are used. In some embodiments, the formulation includes an agent that facilitates RNA effector molecule-uptake, e.g., a charged lipid, an emulsion, a liposome, a cationic or non-cationic lipid, an anionic lipid, a transfection reagent or a penetration enhancer. In a particular embodiment, the reagent that facilitates RNA effector molecule-uptake comprises a charged lipid. In addition, the formulations can be co-formulated or incorporated into the infective seed or vectors themselves to facilitate delivery or stabilize RNAi materials to the relevant cell where the agent/vector can produce the desired immunogenic agent.

[0096] In particular embodiments, the target gene is associated with endogenous, adventitious or latent herpesviruses, polyomaviruses, hepadnaviruses, papillomaviruses, adenoviruses, poxviruses, bornaviruses, retroviruses, arenaviruses, orthomyxoviruses, paramyxoviruses, reoviruses, picornaviruses, flaviviruses, rabdoviruses, hantaviruses, circoviruses, or vesiviruses.

[0097] Particular endogenous and latent viruses that can be targeted by the methods of the present invention include Minute Virus of Mice (MVM), Murine leukemia/sarcoma (MLV), Circoviruses including porcine circovirus (PCV-1, PCV-2), Human herpesvirus 8 (HHV-8), arenavirus Lymphocytic choriomeningitis virus (LCMV), Lactate dehydrogenase virus (LDH or LDV), human species C adenoviruses, avian adeno-associated virus (AAV), primate endogenous retrovirus family K (ERV-K), and human endogenous retrovirus K (HERV-K).

[0098] Further regarding ERVs, in embodiments of the present invention the target genes of ERVs can be those of primate/human Class I Gamma ERVs pt01-Chr10r-17119458, pt01-Chr5-53871501, BaEV, GaLV, HERV-T, ERV-3, HERV-E, HERV-ADP, HERV-I, MER4like, HERV-FRD, HERV-W, HERVH-RTVLH2, HERVH-RGH2, HERV-Hconsensus, HERV-Fcl; primate/human Epsilon ERV hg15-chr3-152465283; primate/human Intermediate (epsilon-like) HERVL66; primate/human Class III Spuma-like ERVs HSRV, HFV, HERV-S, HERV-L, HERVL40, HERVL74; primate/human Delta ERVs HTLV-1, HTLV-2; primate/human Lenti ERVs HIV-1, HIV-2; primate/human Class II, Beta ERV MPMV, MMTV, HML1, HML2, HML3, HML4, HML7, HML8, HML5, HML10, HML6, or HML9.

[0099] In other embodiments of the present invention, the ERV is selected from rodent Class II, Beta ERV MMTV; rodent Class I Gamma ERV MLV; feline Class I Gamma ERV FLV; ungulate Class I Gamma ERV PERV; ungulate Delta ERV BLV; ungulate lentivirus Visna, EIAV; ungulate Class II, Beta ERV JSRV; avian Class III, Spuma-like ERVs gg01-chr7-7163462; gg01-chrU-52190725, gg01-Chr4-48130894; avian Alpha ERVs ALV, gg01-chr1-15168845; avian Intermediate Beta-like ERVs gg01-chr4-77338201; gg01-ChrU-163504869, gg01-chr7-5733782; Reptilian Intermediate Beta-like ERV Python-molurus; Fish Epsilon ERV WDSV; fish Intermediate (epsilon-like) ERV SnRV; Amphibian Epsilon ERV Xen1; Insect Errantivirus ERV Gypsy.

[0100] Other embodiments of the present invention target adventitious viruses of animal-origin, such as vesivirus, circovirus, hantaan virus, Marburg virus, SV40, SV20, Semliki Forest virus (SFV), simian virus 5 (sv5), lymphocytic choriomeningitis virus, feline sarcoma virus, porcine parvovirus, adenoassociated viruses (AAV), mouse hepatitis virus (MHV), murine leukemia virus (MuLV), pneumonia virus of mice (PVM), Theiler's encephalomyelitis virus (THEMV), murine minute virus (MMV or MVM), mouse adenovirus (MAV), mouse cytomegalovirus (MCMV), mouse rotavirus (EDIM), Kilham rat virus (KRV), Toolan's H-1 virus, Sendai virus (SeV, also know as murine parainfluenza virus type 1 or hemagglutinating virus of Japan (HVJ)), Parker's rat coronavirus (RCV or SDA), pseudorabies virus (PRV), reoviruses, Cache Valley virus, bovine viral diarrhoea virus, bovine parainfluenza virus type 3, bovine respiratory syncytial virus, bovine adenoviruses, bovine parvoviruses, bovine herpesvirus 1 (infectious bovine rhinotracheitis virus), other bovine herpesviruses, bovine reovirus, rabies virus, bluetongue viruses, bovine polyoma virus, bovine circovirus, and orthopoxviruses other than vaccinia, pseudocowpox virus (a widespread parapoxvirus that can infect humans), papillomavirus, herpesviruses, or leporipoxviruses.

[0101] Other embodiments target human-origin adventitious agents including HIV-1 and HIV-2; human T cell lymphotropic virus type I (HTLV-I) and HTLV-II; human hepatitis A, B, and C viruses; human cytomegalovirus; Epstein Barr virus (EBV or HHV-4); human herpesviruses 6, 7, and 8; human parvovirus B19; reoviruses; polyoma (JC/BK) viruses; SV40 virus; human coronaviruses; human papillomaviruses; influenza A, B, and C viruses; human enteroviruses; human parainfluenza viruses; and human respiratory syncytial virus.

[0102] Yet other embodiments of the present invention target host cell surface receptors or intracellular proteins to which endogenous, latent, or adventitious virus bind or which are required for viral replication. For example, in a particular embodiment, the target gene is a CHO cell MVM receptor gene, such as a gene associated with cellular sialic acid production.

[0103] In addition to the target genes associated with sialic acid, as described herein, yield and/or qualities of an immunogenic agent can be optimized by targeting genes associated with glycosylation in the host cell.

[0104] The hamster Gale gene encodes UDP-galactose-4-epimerase, e.g., CHO Gale transcript SEQ ID NO:5564, and can be targeted a RNA effector molecule comprising a sense strand and an antisense strand, one of which comprises at least 16 contiguous nucleotides (e.g., 17 nucleotides, 18 nucleotides, or 19 nucleotides) of the nucleotide sequence selected from the group consisting of SEQ ID NOs:1888656-1889007. In one embodiment, the antisense strand comprises at least 16 contiguous nucleotides of the nucleotide sequence selected from the group consisting of SEQ ID NOs:1888656-1889007. In another embodiment, one strand comprises at least 17 contiguous nucleotides of the nucleotide sequence selected from the group consisting of SEQ ID NOs:1888656-1889007. In another embodiment, one strand comprises at least 18 contiguous nucleotides of the nucleotide sequence selected from the group consisting of SEQ ID NOs:1888656-1889007. In another embodiment, one strand comprises at least 19 contiguous nucleotides of the nucleotide sequence selected from the group consisting of SEQ ID NOs:1888656-1889007. In a particular embodiment, the antisense strand comprises sequence of SEQ ID NOs:1888656-1889007, and further comprises at least one deoxyribonucleotide. In another particular embodiment, the antisense strand comprises sequence of SEQ ID NOs:1888656-1889007, and further comprises at least two deoxyribonucleotides. In another particular embodiment, the antisense strand comprises sequence of SEQ ID NOs:1888656-1889007, and further comprises at least two deoxythymidine residues. This enzyme enables the cell to process galactose by converting it to glucose, and vice versa.

[0105] UDP-galactose is used to build galactose-containing proteins and fats, which play critical roles in chemical signaling, building cellular structures, transporting molecules, and producing energy. Hamster GDP-mannose 4,6-dehydratase (GMDS) and can be targeted a RNA effector molecule comprising a sense strand and an antisense strand, one of which comprises at least 16 contiguous nucleotides (e.g., 17 nucleotides, 18 nucleotides, or 19 nucleotides) of the nucleotide sequence selected from the group consisting of SEQ ID NOs: 3152754-3152793. In one embodiment, the antisense strand comprises at least 16 contiguous nucleotides of the nucleotide sequence selected from the group consisting of SEQ ID NOs: 3152754-3152793. In another embodiment, one strand comprises at least 17 contiguous nucleotides of the nucleotide sequence selected from the group consisting of SEQ ID NOs: 3152754-3152793. In another embodiment, one strand comprises at least 18 contiguous nucleotides of the nucleotide sequence selected from the group consisting of SEQ ID NOs: 3152754-3152793. In another embodiment, one strand comprises at least 19 contiguous nucleotides of the nucleotide sequence selected from the group consisting of SEQ ID NOs: 3152754-3152793. In a particular embodiment, the antisense strand comprises sequence of SEQ ID NOs: 3152754-3152793, and further comprises at least one deoxyribonucleotide. In another particular embodiment, the antisense strand comprises sequence of SEQ ID NOs: 3152754-3152793, and further comprises at least two deoxyribonucleotides. In another particular embodiment, the antisense strand comprises sequence of SEQ ID NOs:3152754-3152793, and further comprises at least two deoxythymidine residues.

[0106] In various embodiments, the immunogenic agent is a polypeptide. The polypeptide can be a recombinant polypeptide or a polypeptide endogenous to the host cell. In some embodiments, the polypeptide is an antigen, a glycoprotein, a receptor, membrane protein, immune effector, binding protein, oncoprotein or proto-oncoprotein, or structural protein. In some embodiments, the polypeptide immunogenic agent is a vaccine or the immunogenic agent can be used in a vaccine.

[0107] The method of the invention also can include the steps of monitoring the growth, production and activation levels of the host cell culture, and as well as for varying the conditions of the host cell culture to maximize the growth, production and activation levels of the host cells and desired product, and for harvesting the immunogenic agent from the cell or culture, preparing a formulation with the harvested immunogenic agent, and for the treatment and/or the prevention of a disease by administering to a subject in need thereof a formulation obtained by the method.

[0108] In one embodiment, the host cell is administered a plurality of different RNA effector molecules to modulate expression of multiple target genes. The RNA effector molecules can be administered at different times or simultaneously, at the same frequency or different frequencies, at the same concentration or at different concentrations.

[0109] In another embodiment, the invention provides a composition for enhancing production of an immunogenic agent in a host cell by modulating the expression of a target gene in the cell. The composition typically includes one or more oligonuceotides, such as RNA effector molecules described herein, and a suitable carrier or delivery vehicle.

[0110] In additional embodiments, the target gene encodes a protein that affects a physiological process of the host cell. In various embodiments, the physiological process is apoptosis, cellular immunity, cell cycle progression, carbon metabolism or transport, lactate formation, or RNAi uptake and/or efficacy.

[0111] More specifically, in some embodiments the second target gene is a gene associated with host cell immune response, and the target gene encodes the host cell target selected from the group consisting of TLR3, TLR7, TLR21, RIG-1, LPGP2, RIG 1-like receptors, TRIM25, IFN-α, IFN-β, IFN-γ, MAVS, IFNAR1, IFNR2, STAT-1, STAT-2, STAT-3, STAT-4, JAK-1, JAK-2, JAK-3, IRF1, IRF2, IRF3, IRF4, IRF5, IRF6 IRF7, IRF8, IRF 9, IRF10, 2′,5′ oligoadenylate synthetase, RNaseL, dsRNA-dPKR, Mx, IFITM1, IFITM2, IFITM3, Proinflammatory cytokines, MYD88, TRIF, PKR, and a regulatory region of any of the foregoing.

[0112] In other specific embodiments, the second target gene is a gene associated with host cell viability, growth or cell cycle, and the target gene encodes the host cell target selected from the group consisting of Bax, Bak, LDHA, LDHB, BIK, BAD, BIM, HRK, BCLG, HR, NOXA, PUMA, BOK, BOO, BCLB, CASP2, CASP3, CASP6, CASP7, CASP8, CASP9, CASP10, BCL2, p53, APAF1, HSP70, TRAIL, BCL2L1, BCL2L13, BCL2L14, FASLG, DPF2, AIFM2, AIFM3, STK17A, APITD1, SIVA1, FAS, TGFβ2, TGFBR1, LOC378902, or BCL2A1, PUSL1, TPST1, WDR33, Nod2, MCT4, ACRC, AMELY, ATCAY, ANP32B, DEFA3, DHRS10, DOCK4, FAM106A, FKBP1B, IRF3, KBTBD8, KIAA0753, LPGAT1, MSMB, NFS1, NPIP, NPM3, SCGB2A1, SERPINB7, SLC16A4, SPTBN4, TMEM146, CDKN1B, CDKN2A, FOXO1, PTEN, FN1, CSKN2B, a miRNA antagonist, host sialidase, NEU2 sialidase 2, NEU3 sialidase 3, Dicer, ISRE, B4GalT1, B4GalT6, Cmas, Gne, SLC35A1, and a regulatory region of any of the foregoing.

[0113] In one aspect, the methods described herein relate to a method for improving the viability of a mammalian cell in culture, comprising: (a) contacting the cell with a plurality of different RNA effector molecules that permit inhibition of expression of Bax, Bak, and LDH; and (b) maintaining the cell for a time sufficient to inhibit expression of Bax, Bak, and LDH; wherein the inhibition of expression improves viability of the mammalian cell. In one embodiment of this aspect, the RNA effector molecule targeting BAX comprises a sense strand, and wherein at least one strand comprises at least 16 contiguous nucleotides (e.g., at least 17, at least 18, at least 19 nucleotides etc) of an oligonucleotide having a sequence selected from the group consisting of SEQ ID NOs:3152412-3152539, NOs:3152794-3152803, NOs:3023234-3023515, NOs:3154393-3154413, NOs:3154414-3154434, NOs:3154923-3154970, and NOs:3154971-3155018. In another embodiment of this aspect, the RNA effector molecule targeting BAK comprises a sense strand, and wherein at least one strand comprises at least 16 contiguous nucleotides (e.g., at least 17, at least 18, at least 19 nucleotides etc) of an oligonucleotide having a sequence selected from the group consisting of SEQ ID NOs:3152412-3152475, NOs:3152804-3152813, NOs:2259855-2260161, NOs:3154393-3154413, NOs:3154414-3154434, NOs:3154827-3154874, NOs:3154875-3154922 and sequences listed in Table 22. In another embodiment of this aspect, the RNA effector molecule targeting LDH comprises a sense strand, and wherein at least one strand comprises at least 16 contiguous nucleotides (e.g., at least 17, at least 18, at least 19 nucleotides etc) of an oligonucleotide having a sequence selected from the group consisting of SEQ ID NOs:3152540-3152603, NOs:3152814-3152823, NOs:1297283-1297604, NOs:3154553-3154578, NOs:3154579-3154604, NOs:3155589-3155635, and NOs:3155636-3155682.

[0114] In one aspect, the methods described herein provide a method for producing an immunogenic agent in a large scale host cell culture, comprising: (a) contacting a host cell in a large scale host cell culture with at least a first RNA effector molecule, a portion of which is complementary to at least one target gene of a host cell, (b) maintaining the host cell culture for a time sufficient to modulate expression of the at least one first target gene, wherein the modulation of expression improves production of an immunogenic agent in the host cell; (c) isolating the immunogenic agent from the host cell; wherein the large scale host cell culture is at least 1 Liter in size, and wherein the host cell is contacted with at least a first RNA effector molecule by addition of the RNA effector molecule to a culture medium of the large scale host cell culture such that the target gene expression is inhibited transiently.

[0115] Also provided herein in another aspect, are methods for producing an immunogenic agent in a large scale host cell culture, comprising: (a) contacting a host cell in a large scale host cell culture with at least a first RNA effector molecule, a portion of which is complementary to at least one target gene of a host cell, (b) maintaining the host cell culture for a time sufficient to modulate expression of the at least one first target gene, wherein the modulation of expression improves production of an immunogenic agent in the host cell; and (c) isolating the immunogenic agent from the host cell; wherein the host cell is contacted with at least a first RNA effector molecule by addition of the RNA effector molecule to a culture medium of the large scale host cell culture multiple times throughout production of the immunogenic agent such that the target gene expression is inhibited transiently.

[0116] In one embodiment of the aspects described herein, the host cell is contacted with the plurality of RNA effector molecules by addition of the RNA effector molecule to a culture medium of the large scale host cell culture such that the target gene expression is inhibited transiently.

[0117] In one embodiment of the aspects described herein, the host cell in the large scale host cell culture is contacted with a plurality of RNA effector molecules, wherein the plurality of RNA effector molecules modulate expression of at least one target gene, at least two target genes, or a plurality of target genes.

[0118] In another embodiment of the aspects described herein, the RNA effector molecule, or plurality of RNA effector molecules, comprises a double-stranded ribonucleic acid (dsRNA), wherein said dsRNA comprises at least two sequences that are complementary to each other and wherein a sense strand comprises a first sequence and an antisense strand comprises a second sequence comprising a region of complementarity which is substantially complementary to at least part of a target gene, and wherein said region of complementarity is 10 to 30 nucleotides in length.

[0119] In another embodiment of the aspects described herein, the contacting step is performed by continuous infusion of the RNA effector molecule, or plurality of RNA effector molecules, into the culture medium used for maintaining the host cell culture to produce the immunogenic agent.

[0120] In another embodiment of the aspects described herein, the modulation of expression is inhibition of expression, and wherein the inhibition is a partial inhibition.

[0121] In another embodiment of the aspects described herein, the partial inhibition is no greater than a percent inhibition selected from the group consisting of 10%, 15%, 20%, 25%, 30%, 35%, 40%, 45%, 50%, 55%, 60%, 65%, 70%, 75%, 80%, and 85%.

[0122] In another embodiment of the aspects described herein, the RNA effector molecule is contacted at a concentration of less than 100 nM.

[0123] In another embodiment of the aspects described herein, the RNA effector molecule is contacted at a concentration of less than 50 nM.

[0124] In some embodiments, at least one RNA effector molecule, a portion of which is complementary to the target gene, is a corresponding siRNA that comprises an antisense strand comprising at least 16 contiguous nucleotides of a nucleotide sequence, wherein the nucleotide sequence (SEQ ID NO) is referred to herein.

[0125] Also provided herein are compositions useful for enhancing production of an immunogenic agent. In one aspect, a composition is provided that comprises at least one RNA effector molecule, a portion of which is complementary to at least one target gene of a host cell, and a cell medium suitable for culturing the host cell, wherein the RNA effector molecule is capable of modulating expression of the target gene and the modulation of expression enhances production of an immunogenic agent, wherein the at least one RNA effector molecule is an siRNA that comprises an antisense strand comprising at least 16 contiguous nucleotides of a nucleotide sequence (SEQ ID NO) referred to herein.

[0126] Another aspect described herein provides a kit for enhancing production of an immunogenic agent by a cultured cell, comprising: (a) a substrate comprising one or more assay surfaces suitable for culturing the cell under conditions in which the immunogenic agent is produced; (b) one or more RNA effector molecules, wherein at least a portion of each RNA effector molecule is complementary to a target gene; and (c) a reagent for detecting the immunogenic agent or production thereof by the cell, wherein the one or more RNA effector molecules is an siRNA comprising an antisense strand that comprises at least 16 contiguous nucleotides of the nucleotide sequence (SEQ ID NO) referred to herein.

[0127] Also provided herein is a kit for optimizing production of an immunogenic agent by cultured cells, comprising: (a) a microarray substrate comprising a plurality of assay surfaces, the assay surfaces being suitable for culturing the cells under conditions in which the immunogenic agent is produced; (b) one or more RNA effector molecules, wherein at least a portion of each RNA effector molecule is complementary to a target gene; and (c) a reagent for detecting the effect of the one or more RNA effector molecules on production of the immunogenic agent, wherein the one or more RNA effector molecules is an siRNA comprising an antisense strand that comprises at least 16 contiguous nucleotides of a nucleotide sequence (SEQ ID NO) referred to herein.

[0128] In one embodiment, the invention provides for a host cell that contains at least one RNA effector molecule provided herein. The host cell can be derived from an insect, amphibian, fish, reptile, bird, mammal, or human, or can be a hybridoma cell. For example, the cell can be a human Namalwa Burkitt lymphoma cell (BLcl-kar-Namalwa), baby hamster kidney fibroblast (BHK), CHO cell, Murine myeloma cell (e.g., NS0, SP2/0), hybridoma cell, human embryonic kidney cell (293 HEK), human retina-derived cell (PER.C6® cells), insect cell line (Sf9, derived from pupal ovarian tissue of Spodoptera frugiperda; or Hi-5, derived from Trichoplusia ni egg cell homogenates), Madin-Darby canine kidney cell (MDCK), primary mouse brain cells or tissue, primary calf lymph cells or tissue, primary monkey kidney cell, embryonated chicken egg, primary chicken embryo fibroblast (CEF), Rhesus fetal lung cell (FRhL-2), Human fetal lung cell (WI-38, MRC-5), African green monkey kidney epithelial cell (e.g., Vero, CV-1), Rhesus monkey kidney cell (LLC-MK2), or yeast cell. In a particular embodiment, the cell is a MDCK cell.

[0129] Embodiments also provide compositions and methods for producing an immunogenic agent from a host cell, particularly from CHO cell, the methods comprising contacting the cell with a RNA effector molecule, such as one or more siRNA molecules targeting the CHO transcriptome transcripts, a portion of which is complementary to a target transcript, maintaining the cell in a bioreactor for a time sufficient to modulate expression of the target gene, wherein the modulation enhances production of the immunogenic agent from the cell, and isolating the immunogenic agent from the cell.

[0130] An advantage of the present invention is the ability to substantially increase the yield and/or purity of the immunogenic agents produced by the host cells, and thereby reduce production costs, or to significantly reduce development times. Improved manufacturing logistics have the follow-on effect of enhancing quality, as well as expanding immunogenic agent product supply.

[0131] The details of one or more embodiments of the invention are set forth in the description below. Other features, objects, and advantages of the invention will be apparent from the description and the drawings, and from the claim.

### DESCRIPTION OF THE DRAWINGS

[0132] FIGS. 1A and 1B: FIG. 1A is am immunoblot labeling the Bax protein in day 2 CHO—S cells. The expression of Bax correlates with the decrease in viability over time in CHO—S cell cultures. The expression of Bax correlates with the decrease in viability over time in CHO—S cell cultures. FIG. 1B is a graph depicting the growth curve for CHO—S cells showing cell viability, total cell number, and proportion of viable cells as a function of days in cell culture. Viability decreases sharply around day 6.

[0133] FIGS. 2A and 2B are graphs depicting concentration-dependent inhibition of expression of Bak (FIG. 2B) and Bax (FIG. 2A) in CHO cells by RNA effector molecules against hamster Bak and Bax genes (Tables 3 and 4, respectively). Each of the tested RNA effector molecules inhibited expression with an 1050 in the sub-nanomolar range, except for RNA effector molecule B2 against Bax, which inhibited expression with an 1050 in the low nanomolar range.

[0134] FIG. 3 is a graph showing concentration-dependent inhibition of expression of LDH (measured as LDH activity) in CHO cells by RNA effector molecules against the hamster lactate dehydrogenase (LDH) gene. Each of the tested RNA effector molecules inhibited expression with an 1050 in the sub-nanomolar range.

[0135] FIGS. 4A to 4D: RNA effector molecules against hamster lactate dehydrogenase (LDH) decrease levels of LDH-A mRNA (FIG. 4A), protein (FIG. 4B), and activity (FIG. 4C) in C2, C16 and C36 CHO cell lines relative to control cells. Inhibition of LDH significantly enhances productivity of the CHO cell lines (FIG. 4D).

[0136] FIG. 5A to 5B: FIG. 5A is a bar graph and FIG. 5B is a line graph, each showing the effect of RNA effector molecules against Bax/Bak and LDH on the viability of cultured CHO cells. siRNA (1 nM) were added to cultured cells at O-hr, 48-hr and 96-hr timepoints (arrows on curve) and cell viability was measured as the integral cell area (ICA) at day 5 (graph) and over time (curve). Control cells were treated with Stealth siRNA (scrambled control). Cells treated with siRNA against Bax/Bak and LDH exhibited enhanced viability relative to control cells at all time points measured.

[0137] FIG. 6 is a graph depicting that the addition of Bax/Bak/LDH siRNAs increases viable CHO cell density by at least 90%. Control cell (▪) and treated cell (▴) densities were measured daily until cell viability reached 50%. Integral cell areas (IGA) were determined (inset; control vs. Bax/Bak/LDH siRNA-treated). Arrows on x-axis indicate siRNA dosing days or nutrient feed days.

[0138] FIG. 7 is a graph depicting that the addition of Bax/Bak/LDH siRNAs increases percent viability of CHO by at least 50%. Percent viability of control cells (▪) and cells treated with Bax/Bak/LDH siRNAs (▴) were determined using Trypan Blue. The rate of apoptotic cell death was determined by measuring the slopes of each sample from day-5 until day-12 (inset; control vs. Bax/Bak/LDH siRNA-treated). Arrows on x-axis indicate siRNA dosing days.

[0139] FIG. 8 is a graph depicting that LDH enzyme activity is decreased in Bax/Bak/LDH siRNA-treated cells. Daily LDH activities were monitored in control-treated (▪) and Bax/Bak/LDH siRNA-treated cells (▴). Arrows on x-axis indicate siRNA dosing days.

[0140] FIG. 9 is a graph showing that lactate levels are lower in Bax/Bak/LDH siRNA-treated cell culture media compared to the control-treated cell media. Lactate levels in culture media were monitored daily in control siRNA-treated (▪) and Bax/Bak/LDH siRNA-treated (▴) cell cultures. Arrows on x-axis indicate siRNA dosing days.

[0141] FIG. 10 is a graph showing that glucose consumption in control siRNA-treated cells decreases following day 7 of the growth curve. Glucose levels from the Bax/Bak/LDH siRNA-treated cell media (▴) is significantly lower than the control siRNA-treated cell media (▪). Arrows along x-axis indicate nutrient feed days.

[0142] FIG. 11 is a graph showing that Bax/Bak/LDH siRNA-treated CHO cells have decreased Caspase 3 activity following log phase growth compared to control. Bax/Bak/LDH siRNA-treated cells demonstrate similar Caspase 3 activity to the control-siRNA-treated cells prior to day 6 but the following time points show higher Caspase activity in the control cells. A ratio (▴) between Caspase 3 activity in the Bax/Bak/LDH siRNA-treated cells and in control-treated cells shows a biphasic activity response.

[0143] FIG. 12 is a graph showing the percent inhibition of mRNA level following Bax, Bak, and LDH siRNA addition.

[0144] FIG. 13 is a graph depicting that Bax/Bak/LDH siRNA decreases CHO cell apoptosis death rate by ˜300%.

[0145] FIG. 14 is a graph depicting the viability and cell density of cell treated with Bax/Bak siRNA (1 nM each) compared to a control FITC-siRNA (1 nM).

[0146] FIGS. 15A and 15B: FIG. 15A is a graph depicting the cell density and viability ratio of cells treated with siRNA targeting Bax/Bak/LDH compared to control treated cells. FIG. 15B shows that Bax/Bak/LDH siRNA improves both CHO cell density and viability in a large scale, 1 L bioreactor.

[0147] FIG. 16 shows a diagrammatic view of a computer system according to one embodiment of the invention.

[0148] FIG. 17 shows a diagrammatic view of a computer system according to an alternative embodiment of the invention.

[0149] FIG. 18 presents a diagram of the data structures according to one embodiment of the invention.

[0150] FIG. 19 shows a flow diagram of a method according to one embodiment of the invention.

[0151] FIG. 20 is a graph showing expression levels (fluorometric units, y-axis) of GFP over time in days (X-axis) in control DG44 CHO cells treated with lipid RNAiMax and no siRNAs, at temperatures of 37° C. and 28° C., i.e. lipid treated control.

[0152] FIG. 21 is a graph showing expression levels (fluorometric units, y-axis) of GFP over time in days (X-axis) in control DG44 CHO cells not treated with lipid RNAiMax or siRNAs, at temperatures of 37° C. and 28° C., i.e untreated controls.

[0153] FIGS. 22A-22C are graphs showing the % inhibition of GFP expression (y-axis) in DG44 CHO cells by transiently transfected siRNAs against GFP at 37° C. and 28° C. over time in days (x-axis). FIG. 22A, 0.1 nM siRNA. FIG. 22B, 1.0 nM siRNA. FIG. 22C, 10 nM siRNA.

[0154] FIG. 23 is a bar graph showing relative % GFP signal knockdown (y-axis) using 9 uptake enhancing formulations compared to Lipofectamine RNAiMax, see Table 19, for the 9 formulations depicted on the x-axis.

[0155] FIG. 24 is a bar graph showing LDH activity (y axis) using K8 (formulation 4) at various concentrations was effective as an uptake enhancer of siRNA against LDH in DG44 cells in a 250 mL shake flask.

[0156] FIG. 25 is a bar graph showing LDH activity (y axis) using K8 (formulation 4), L8, and P8 formulations at various concentrations were effective as uptake enhancers of siRNA against LDH in DG44 in suspension.

[0157] FIGS. 26A-26B are graph showing cell density (FIG. 26A) or % cell viability (FIG. 26B) over time in suspension CHO cell 50 mL shake flasks using P8 formulation or commercial formulation RNAiMax at the recommended concentration. Lipid formulations were dosed onto cells at day 0.

[0158] FIG. 30 is a graph that shows when sing the P8 NDL an siRNA directed against Lactate Dehydrogenase (LDH) achieves 80%-90% knockdown of LDH activity for 6 days with a single 1 nM dose in a 1 L bioreactor.

[0159] FIG. 28 is a graph that shows the results of a single dose of a 1 nM LDH siRNA formulated with P8 lipid on viable cell density and % LDH activity over an elapsed time of 6 days in 3 L and 40 L cultures.

[0160] FIG. 29 is a graph showing viable cell density and % viability (y-axis) over time in days after transfection of 40 L of DG44 cell culture using P8 as the transfection reagent.

[0161] FIG. 30 is a graph showing reduction in % LDH activity over time in 40 L of DG44 cell culture and a single dose of siRNA at day 0.

[0162] FIGS. 31A and 31B are bar graphs of antibodies prepared from control cells of cells contacted with dsRNA targeting the fucosyltransferase (FUT8) and GDP-mannose 4,6-dehydratase (GMDS) genes. FIG. 31A is a graph that shows the concentration of antibody produced by these cells; FIG. 31B is a graph that shows that antibodies produced from the FUT8 and GMDS dsRNA treated cells have >85% reduced binding to fucose-specific lectin.

### DETAILED DESCRIPTION

[0163] The present invention is not limited to the particular methodology, protocols, and compositions, etc., described herein, as such may vary. The terminology used herein is for the purpose of describing particular embodiments only, and is not intended to limit the scope of the present invention, which is defined solely by the claims.

[0164] As used herein and in the claims, the singular forms include the plural reference and vice versa unless the context clearly indicates otherwise. Other than in the operating examples, or where otherwise indicated, all numbers expressing quantities of ingredients or reaction conditions used herein should be understood as modified in all instances by the term “about.”

[0165] All patents, oligonucleotide sequences identified by gene identification numbers, and other publications identified herein are expressly incorporated by reference for the purpose of describing and disclosing, for example, the methodologies described in such publications that might be used in connection with the present invention. These publications are provided solely for their disclosure prior to the filing date of the present application. Nothing in this regard should be construed as an admission that the inventors are not entitled to antedate such disclosure by virtue of prior invention or for any other reason. All statements as to the date or representation as to the contents of these documents is based on the information available to the applicants and does not constitute any admission as to the correctness of the dates or contents of these documents.

[0166] Unless defined otherwise, all technical and scientific terms used herein have the same meaning as those commonly understood to one of ordinary skill in the art to which this invention pertains. Although human gene symbols are typically designated by upper-case letters, in the present specification the use of either upper-case or lower-case gene symbols may be used interchangeably and include both human or non-human species. Thus, for example, a reference in the specification to the gene or gene target “lactate dehydrogenase A” as “LDHA” (“Ldha” or “LdhA”), includes human and/or non-human (e.g., avian, rodent, canine) genes and gene targets. In other words, the upper-case or lower-case letters in a particular gene symbol do not limit the scope of the gene or gene target to human or non-human species. All gene identification numbers provided herein (GeneID) are those of the National Center for Biotechnology Information “Entrez Gene” web site unless identified otherwise.

[0167] The invention provides methods for producing an immunogenic agent in a host cell, the methods including the steps of contacting the cell with at least one RNA effector molecule, a portion of which is complementary to at least a portion of a target gene, maintaining the cell for a time sufficient to modulate expression of the target gene, wherein the modulation enhances production of the immunogenic agent, and recovering the immunogenic agent from the cell. The description provided herein discloses how to make and use RNA effector molecules to produce a immunogenic agent in a host cell according to methods provided herein. Also disclosed are cell culture reagents and compositions comprising the RNA effector molecules and kits for carrying out the disclosed methods.

### I. DEFINITIONS

[0168] As used herein the term “comprising” or “comprises” is used in reference to compositions, methods, and respective component(s) thereof, that are essential to the invention, yet open to the inclusion of unspecified elements, whether essential or not.

[0169] As used herein the term “consisting essentially of” refers to those elements required for a given embodiment. The term permits the presence of elements that do not materially affect the basic and novel or functional characteristic(s) of that embodiment of the invention.

[0170] The term “consisting of” refers to compositions, methods, and respective components thereof as described herein, which are exclusive of any element not recited in that description of the embodiment.

[0171] As used herein, “immunogenic agent” refers to an agent used to stimulate the immune system of a subject, so that one or more functions of the immune system are increased and directed towards the immunogenic agent. An antigen or immunogen is intended to mean a molecule containing one or more epitopes that can stimulate a host immune system to make a secretory, humoral and/or cellular immune response specific to that antigen. Immunogenic agents can be used in the production of antibodies, both isolated polyclonal antibodies and monoclonal antibodies, using techniques known in the art Immunogenic agents include vaccines.

[0172] As used herein, “vaccine” refers to an agent used to stimulate the immune system of a subject so that protection is provided against an antigen not recognized as a self-antigen by the subject's immune system Immunization refers to the process of inducing a high level of antibody and/or cellular immune response in a subject, that is directed against a pathogen or antigen to which the organism has been exposed. Vaccines and immunogenic agents as used herein, refer to a subject's immune system: the anatomical features and mechanisms by which a subject produces antibodies and/or cellular immune responses against an antigenic material that invades the subject's cells or extra-cellular fluids. In the case of antibody production, the antibody so produced can belong to any of the immunological classes, such as immunoglobulins, A, D, E, G, or M. Vaccines that stimulate production of immunoglobulin A (IgA) are of interest, because IgA is the principal immunoglobulin of the secretory system in warm-blooded animals. Vaccines are likely to produce a broad range of other immune responses in addition to IgA formation, for example cellular and humoral immunity. Immune responses to antigens are well-studied and reported widely. See, e.g., Elgert, IMMUNOL. (Wiley Liss, Inc., 1996); Stites et al., BASIC & CLIN. IMMUNOL., (7th Ed., Appleton & Lange, 1991). By contrast, the phrase “immune response of the host cell” refers to the responses of unicellular host organisms to the presence of foreign bodies.

[0173] In the context of this invention, the term “oligonucleotide” or “nucleic acid molecule” encompasses not only nucleic acid molecules as expressed or found in nature, but also analogs and derivatives of nucleic acids comprising one or more ribo- or deoxyribo-nucleotide/nucleoside analogs or derivatives as described herein or as known in the art. Such modified or substituted oligonucleotides are often used over native forms because of properties such as, for example, enhanced cellular uptake, increased stability in the presence of nucleases, and the like, discussed further herein. A “nucleoside” includes a nucleoside base and a ribose sugar, and a “nucleotide” is a nucleoside with one, two or three phosphate moieties. The terms “nucleoside” and “nucleotide” can be considered to be equivalent as used herein. An oligonucleotide can be modified in the nucleobase structure or in the ribose-phosphate backbone structure, e.g., as described herein, including the modification of a RNA nucleotide into a DNA nucleotide. The molecules comprising nucleoside analogs or derivatives must retain the ability to form a duplex.

[0174] As non-limiting examples, an oligonucleotide can also include at least one modified nucleoside including but not limited to a 2′-O-methyl modified nucleoside, a nucleoside comprising a 5′ phosphorothioate group, a terminal nucleoside linked to a cholesterol derivative or dodecanoic acid bisdecylamide group, a locked nucleoside, an abasic nucleoside, a 2′-deoxy-2′-fluoro modified nucleoside, a 2′-amino-modified nucleoside, 2′-alkyl-modified nucleoside, morpholino nucleoside, a phosphoramidate or a non-natural base comprising nucleoside, or any combination thereof. Alternatively, an oligonucleotide can comprise at least two modified nucleosides, at least 3, at least 4, at least 5, at least 6, at least 7, at least 8, at least 9, at least 10, at least 15, at least 20, or more, up to the entire length of the oligonucleotide. The modifications need not be the same for each of such a plurality of modified nucleosides in an oligonucleotide. When RNA effector molecule is double stranded, each strand can be independently modified as to number, type and/or location of the modified nucleosides. In one embodiment, modified oligonucleotides contemplated for use in methods and compositions described herein are peptide nucleic acids (PNAs) that have the ability to form the required duplex structure and that permit or mediate the specific degradation of a target RNA via a RISC pathway.

[0175] The terms “ribonucleoside”, “ribonucleotide”, “nucleotide”, or “deoxyribonucleotide” can also refer to a modified nucleotide, as further detailed herein, or a surrogate replacement moiety. A ribonucleotide comprising a thymine base is also referred to as 5-methyl uridine and a deoxyribonucleotide comprising a uracil base is also referred to as deoxy-Uridine in the art. Guanine, cytosine, adenine, thymine and uracil can be replaced by other moieties without substantially altering the base pairing properties of an oligonucleotide comprising a nucleotide bearing such replacement moiety. For example, without limitation, a nucleotide comprising inosine as its base can base pair with nucleotides containing adenine, cytosine, or uracil. Hence, nucleotides containing uracil, guanine, or adenine can be replaced in the nucleotide sequences of dsRNA featured in the invention by a nucleotide containing, for example, inosine. In another example, adenine and cytosine anywhere in the oligonucleotide can be replaced with guanine and uracil, respectively to form G-U Wobble base pairing with the target mRNA. Sequences containing such replacement moieties are suitable for the compositions and methods featured in the invention.

[0176] Similarly, the skilled artisan will recognize that the term “RNA molecule” or “ribonucleic acid molecule” encompasses not only RNA molecules as expressed or found in nature, but also analogs and derivatives of RNA comprising one or more ribonucleotide or ribonucleoside analogs or derivatives as described herein or as known in the art. The terms “ribonucleoside” and “ribonucleotide” can be considered to be equivalent as used herein. The RNA can be modified in the nucleobase structure or in the ribose-phosphate backbone structure, e.g., as described herein.

[0177] In one aspect, a RNA effector molecule can include a deoxyribonucleoside residue. In such an instance, a RNA effector molecule agent can comprise one or more deoxynucleosides, including, for example, a deoxynucleoside overhang(s), or one or more deoxynucleosides within the double stranded portion of a dsRNA.

[0178] In some embodiments, a plurality of RNA effector molecules is used to modulate expression of one or more target genes. A “plurality” refers to at least 2 or more RNA effector molecules e.g., 3, 4, 5, 6, 7, 8, 9, 10, 11, 12, 13, 14, 15, 16, 17, 18, 19, 20, 30, 40, 50, 60, 80, 100 RNA effector molecules or more. “Plurality” can also refer to at least 2 or more target genes, e.g., 2, 3, 4, 5, 6, 7, 8, 9, 10, 11, 12, 13, 14, 15, 16, 17, 18, 19, 20, 30, 40, 50, 60, 70, 80, 90, 100 target genes or more.

[0179] As used herein the term “contacting a host cell” refers to the treatment of a host cell with an agent such that the agent is introduced into the cell. Typically the host cell is in culture, e.g., using at least one RNA effector molecule (e.g., a siRNA), often prepared in a composition comprising a delivery agent that facilitates RNA effector uptake into the cell e.g., to contact the cell in culture by adding the composition to the culture medium. In one embodiment the host cell is contacted with a vector that encodes a RNA effector molecule, e.g. an integrating or non-integrating vector. In one embodiment the cell is contacted with a vector that encodes a RNA effector molecule prior to culturing the host cell for immunogenic agent production, e.g., by transfection or transduction.

[0180] In one embodiment contacting a host cell does not include contacting the host cell with a vector that encodes a RNA effector molecule. In one embodiment, contacting a host cell does not include contacting a host cell with a vector the encodes a RNA effector molecule prior to culturing the host cell for immunogenic agent production, i.e., the cell is contacted with a RNA effector molecule only in cell growth culture, e.g., added to the host cell culture during the process of producing an immunogenic agent. For example, some embodiments of the present invention provide for contacting a host cell with a RNA effector molecule (e.g., a dsRNA) occurs prior to, during or after the viral infection or vector inoculation to inhibit cellular and anti-viral processes that compromise the yield and quality of the immunogenic agent harvest. The step of contacting a host cell in culture with a RNA effector molecule(s) can be repeated more than once (e.g., twice, 3×, 4×, 5×, 6×, 7×, 8×, 9×, 10×, 11×, 12×, 13×, 14×, 15×, 16×, 17×, 18×, 19×, 20×, 30×, 40×, 50×, 60×, 70×, 80×, 90×, 100× or more). In one embodiment, the cell is contacted such that the target gene is modulated only transiently, e.g., by addition of a RNA effector molecule composition to the cell culture medium used for the production of an immunogenic agent where the presence of the RNA effector molecules dissipates over time, i.e., the RNA effector molecule is not constitutively expressed in the cell.

[0181] “Introducing into a cell”, when referring to a RNA effector molecule, means facilitating or effecting uptake or absorption into the cell, as is understood by those skilled in the art. Absorption or uptake of a RNA effector molecule can occur through unaided diffusive or active cellular processes, or by auxiliary agents or devices. For example, introducing into a cell means contacting a host cell with at least one RNA effector molecule, or means the treatment of a cell with at least one RNA effector molecule and an agent that facilitates or effects uptake or absorption into the cell, often prepared in a composition comprising the RNA effector molecule and delivery agent that facilitates RNA effector molecule uptake (e.g., a transfection reagent, an emulsion, a cationic lipid, a non-cationic lipid, a charged lipid, a liposome, an anionic lipid, a penetration enhancer, or a modification to the RNA effector molecule to attach, e.g., a ligand, a targeting moiety, a peptide, a lipophillic group etc.). In vitro introduction into a cell includes methods known in the art such as electroporation and lipofection. Further approaches are described herein below or known in the art.

[0182] As used herein, a “RNA effector composition” includes an effective amount of a RNA effector molecule and an acceptable carrier. As used herein, “effective amount” refers to that amount of a RNA effector molecule effective to produce an effect (e.g., modulatory effect) on a bioprocess for the production of an immunogenic agent. In one embodiment, the RNA effector composition comprises a reagent that facilitates RNA effector molecule uptake (e.g., a transfection reagent, an emulsion, a cationic lipid, a non-cationic lipid, a charged lipid, a liposome, an anionic lipid, a penetration enhancer, or a modification to the RNA effector molecule to attach e.g., a ligand, a targeting moiety, a peptide, a lipophillic group, etc.)

[0183] The term “acceptable carrier” refers to a carrier for administration of a RNA effector molecule to cultured cells. Such carriers include, but are not limited to, saline, buffered saline, dextrose, water, glycerol, ethanol, and combinations thereof. In one embodiment the term “acceptable carrier” specifically excludes cell culture medium.

[0184] The term “expression” as used herein is intended to mean the transcription to a RNA and/or translation to one or more polypeptides from a target gene coding for the sequence of the RNA and/or the polypeptide.

[0185] As used herein, “target gene” refers to a gene that encodes a protein that affects one or more aspects of the production of an immunogenic agent by a host cell, such that modulating expression of the gene enhances production of an immunogenic agent. Target genes can be derived from the host cell, endogenous to the host cell (present in the host cell genome), transgenes (gene constructs inserted at ectopic sites in the host cell genome), or derived from a pathogen (e.g., a virus, fungus or bacterium) that is capable of infecting the host cell or the subject who will use the immunogenic agent or derivatives thereof (e.g., humans). Additionally, in some embodiments, a “target gene” refers to a gene that regulates expression of a nucleic acid (i.e., non-encoding genes) that affects one or more aspects of the production of an immunogenic agent by a cell, such that modulating expression of the gene enhances production of the immunogenic agent.

[0186] By “target gene RNA” or “target RNA” is meant RNA transcribed from the target gene. Hence, a target gene can be a coding region, a promoter region, a 3′ untranslated region (3′-UTR), and/or a 5′-UTR of the target gene.

[0187] A target gene RNA that encodes a polypeptide is more commonly known as messenger RNA (mRNA). Target genes can be derived from the host cell, latent in the host cell, endogenous to the host cell (present in the host cell genome), transgenes (gene constructs inserted at ectopic sites in the host cell genome), or derived from a pathogen (e.g., a virus, fungus or bacterium) which is capable of infecting either the host cell or the subject who will use the an immunogenic agent or derivatives or products thereof. In some embodiments, the target gene encodes a protein that affects one or more aspects of post-translational modification, e.g., peptide glycosylation, by a host cell. For example, modulating expression of a gene encoding a protein involved in post-translational processing enhances production of a polypeptide comprising at least one terminal mannose.

[0188] In some embodiments, the target gene encodes a non-coding RNA (ncRNA), such as an untranslated region. As used herein, a ncRNA refers to a target gene RNA that is not translated into a protein. The ncRNA can also be referred to as non-protein-coding RNA (npcRNA), non-messenger RNA (nmRNA), small non-messenger RNA (snmRNA), and functional RNA (fRNA) in the art. The target gene from which a ncRNA is transcribed as the end product is also referred to as a RNA gene or ncRNA gene. ncRNA genes include highly abundant and functionally important RNAs such as transfer RNA (tRNA) and ribosomal RNA (rRNA), as well as RNAs such as snoRNAs, microRNAs, siRNAs, and piRNAs. As used herein, a RNA effector molecule is said to target within a particular site of a RNA transcript if the RNA effector molecule promotes cleavage of the transcript anywhere within that particular site.

[0189] In some embodiments, the target gene is an endogenous gene of the host cell. For example, the target gene can encode the immunogenic agent or a portion thereof when the immunogenic agent is a polypeptide. The target gene can also encode a host cell protein that directly or indirectly affects one or more aspects of the production of the immunogenic agent. Examples of target genes that affect the production of polypeptides include genes encoding proteins involved in the secretion, folding or post-translational modification of polypeptides (e.g., glycosylation, deamidation, disulfide bond formation, methionine oxidation, or pyroglutamation); genes encoding proteins that influence a property or phenotype of the host cell (e.g., growth, viability, cellular pH, cell cycle progression, apoptosis, carbon metabolism or transport, lactate formation, cytoskeletal structure (e.g., actin dynamics), susceptibility to viral infection or RNAi uptake, activity, or efficacy); and genes encoding proteins that impair the production of an immunogenic agent by the host cell (e.g., a protein that binds or co-purifies with the immunogenic agent).

[0190] In some embodiments, the target gene encodes a host cell protein that indirectly affects the production of the immunogenic agent such that inhibiting expression of the target gene enhances production of the immunogenic agent. For example, the target gene can encode an abundantly expressed host cell protein that does not directly influence production of the immunogenic agent, but indirectly decreases its production, for example by utilizing cellular resources that could otherwise enhance production of the immunogenic agent. Target genes are discussed in more detail herein.

[0191] The term “modulates expression of” and the like, in so far as it refers to a target gene, herein refers to the modulation of expression of a target gene, as manifested by a change (e.g., an increase or a decrease) in the amount of target gene mRNA that can be isolated from or detected in a first cell or group of cells in which a target gene is transcribed and that has or have been treated such that the expression of a target gene is modulated, as compared to a second cell or group of cells substantially identical to the first cell or group of cells but that has or have not been so treated (control cells). The degree of modulation can be expressed in terms of:

$$\frac{( mRNA in control cells ) - ( mRNA in treated cells )}{( mRNA in control cells )} \cdot 100 \%$$

[0192] Alternatively, the degree of modulation can be given in terms of a parameter that is functionally linked to target gene expression, e.g., the amount of protein encoded by a target gene, or the number of cells displaying a certain phenotype, e.g., stabilization of microtubules. In principle, target gene modulation can be determined in any host cell expressing the target gene, either constitutively or by genomic engineering, and by any appropriate assay known in the art.

[0193] For example, in certain instances, expression of a target gene is inhibited. For example, expression of a target gene is inhibited by at least about 10%, 15%, 20%, 25%, 30%, 35%, 40%, 45%, or 50% by administration of a RNA effector molecule provided herein. In some embodiments, a target gene is inhibited by at least about 60%, 70%, or 80% by administration of a RNA effector molecule. In some embodiments, a target gene is inhibited by at least about 85%, 90%, or 95% or more by administration of a RNA effector molecule as described herein. In other instances, expression of a target gene is activated by at least about 10%, 20%, 25%, 50%, 100%, 200%, 400% or more by administration of a RNA effector molecule provided herein. In some embodiments, the modulation of expression is a partial inhibition. In some aspects, the partial inhibition is no greater than a percent inhibition selected from the group consisting of: 10%, 15%, 20%, 25%, 30%, 35%, 40%, 45%, 50%, 55%, 60%, 65%, 70%, 75%, 80%, and 85%.

[0194] As used herein, the term “RNA effector molecule” refers to an oligonucleotide agent capable of modulating the expression of a target gene, as defined herein, within a host cell, or a oligonucleotide agent capable of forming such an oligonucleotide, optionally, within a host cell (i.e., upon being introduced into a host cell). A portion of a RNA effector molecule is substantially complementary to at least a portion of the target gene, such as the coding region, the promoter region, the 3′ untranslated region (3′-UTR), and/or the 5′-UTR of the target gene.

[0195] The RNA effector molecules described herein generally have a first strand and a second strand, one of which is substantially complementary to at least a portion of the target gene and modulate expression of target genes by one or more of a variety of mechanisms, including but not limited to, Argonaute-mediated post-transcriptional cleavage of target gene mRNA transcripts (sometimes referred to in the art as RNAi) and/or other pre-transcriptional and pre-translational mechanisms.

[0196] RNA effector molecules can comprise a single strand or more than one strand, and can include, e.g., double stranded RNA (dsRNA), microRNA (miRNA), antisense RNA, promoter-directed RNA (pdRNA), Piwi-interacting RNA (piRNA), expressed interfering RNA (eiRNA), short hairpin RNA (shRNA), antagomirs, decoy RNA, DNA, plasmids, and aptamers. The RNA effector molecule can be single-stranded or double-stranded. A single-stranded RNA effector molecule can have double-stranded regions and a double-stranded RNA effector can have single-stranded regions.

[0197] The term “portion”, when used in reference to an oligonucleotide (e.g., a RNA effector molecule), refers to a portion of a RNA effector molecule having a desired length to effect complementary binding to a region of a target gene, or a desired length of a duplex region. For example, a “portion” or “region” refers to a nucleic acid sequence of at least 3, at least 4, at least 5, at least 6, at least 7, at least 8, at least 9, at least 10 or more nucleotides up to one nucleotide shorter than the entire RNA effector molecule. In some embodiments, the “region” or “portion” when used in reference to a RNA effector molecule includes nucleic acid sequence one nucleotide shorter than the entire nucleic acid sequence of a strand of a RNA effector molecule. One of skill in the art can vary the length of the “portion” that is complementary to the target gene or arranged in a duplex, such that a RNA effector molecule having desired characteristics (e.g., inhibition of a target gene or stability) is produced. Although not bound by theory, RNA effector molecules provided herein can modulate expression of target genes by one or more of a variety of mechanisms, including but not limited to, Argonaute-mediated post-transcriptional cleavage of target gene mRNA transcripts (sometimes referred to in the art as RNAi) and/or other pre-transcriptional and/or pre-translational mechanisms.

[0198] RNA effector molecules disclosed herein include a RNA strand (the antisense strand) having a region which is 30 nucleotides or less in length, e.g., 10 to 30 nucleotides in length, or 19 to 24 nucleotides in length, which region is substantially complementary to at least a portion of a target gene that affects one or more aspects of the production of an immunogenic agent, such as the yield, purity, homogeneity, biological activity, or stability of the immunogenic agent. The RNA effector molecules interact with RNA transcripts of target genes and mediate their selective degradation or otherwise prevent their translation.

[0199] The term “antisense strand” refers to the strand of a RNA effector molecule, e.g., a dsRNA, which includes a region that is substantially complementary to a target sequence. The term “region of complementarity” refers to the region on the antisense strand that is substantially complementary to a sequence, for example a target sequence, as defined herein. Where the region of complementarity is not fully complementary to the target sequence, the mismatches can be in the internal or terminal regions of the molecule. Generally, the most tolerated mismatches are in the terminal regions, e.g., within 5, 4, 3, or 2 nucleotides of the 5′ and/or 3′ terminus.

[0200] The term “sense strand” refers to the strand of a RNA effector molecule that includes a region that is substantially complementary to a region of the antisense strand as that term is defined herein.

[0201] As used herein, and unless otherwise indicated, the term “complementary”, when used to describe a first nucleotide sequence in relation to a second nucleotide sequence, refers to the ability of an oligonucleotide or polynucleotide comprising the first nucleotide sequence to hybridize and form a duplex structure under certain conditions with an oligonucleotide or polynucleotide comprising the second nucleotide sequence, as understood by the skilled artisan. “Complementary” sequences can also include, or be formed entirely from, non-Watson-Crick base pairs and/or base pairs formed from non-natural and modified nucleotides, in as far as the above requirements with respect to their ability to hybridize are fulfilled. Such non-Watson-Crick base pairs includes, but are not limited to, G:U Wobble or Hoogstein base pairing. Hybridization conditions can, for example, be stringent conditions, where stringent conditions can include 400 mM NaCl, 40 mM PIPES pH 6.4, 1 mM EDTA, 50° C. or 70° C., for 12 to 16 hours followed by washing. Other conditions, such as physiologically relevant conditions as can be encountered inside an organism, can apply. The skilled artisan will be able to determine the set of conditions most appropriate for a test of complementarity of two sequences in accordance with the ultimate application of the hybridized nucleotides.

[0202] The terms “complementary,” “fully complementary” and “substantially complementary” herein can be used with respect to the base matching between the sense strand and the antisense strand of a dsRNA, or between the antisense strand of a RNA effector molecule agent and a target sequence, as will be understood from the context of use. As used herein, an oligonucleotide that is “substantially complementary to at least part of” a target gene refers to an oligonucleotide that is substantially complementary to a contiguous portion of a target gene of interest (e.g., a mRNA encoded by a target gene, the target gene's promoter region or 3′ UTR, or ERV LTR). For example, an oligonucleotide is complementary to at least a part of a target mRNA if the sequence is substantially complementary to a non-interrupted portion of an mRNA encoded by a target gene.

[0203] Complementary sequences within a RNA effector molecule, e.g., within a dsRNA (a double-stranded ribonucleic acid) as described herein, include base-pairing of the oligonucleotide or polynucleotide comprising a first nucleotide sequence to an oligonucleotide or polynucleotide comprising a second nucleotide sequence over the entire length of one or both nucleotide sequences. Such sequences can be referred to as “fully complementary” with respect to each other herein. Where a first sequence is referred to as “substantially complementary” with respect to a second sequence herein, the two sequences can be fully complementary, or they can form one or more, but generally not more than 5, 4, 3 or 2 mismatched base pairs upon hybridization for a duplex up to 30 base pairs, while retaining the ability to hybridize under the conditions most relevant to their ultimate application, e.g., inhibition of gene expression via a RISC pathway. Where two oligonucleotides are designed to form, upon hybridization, one or more single-stranded overhangs, such overhangs shall not be regarded as mismatches with regard to the determination of complementarity. For example, a dsRNA comprising one oligonucleotide 21 nucleotides in length and another oligonucleotide 23 nucleotides in length, wherein the longer oligonucleotide comprises a sequence of 21 nucleotides that is fully complementary to the shorter oligonucleotide, can yet be referred to as “fully complementary” for the purposes described herein.

[0204] In some embodiments, the RNA effector molecule comprises a single-stranded oligonucleotide that interacts with and directs the cleavage of RNA transcripts of a target gene. For example, single stranded RNA effector molecules comprise a 5′ modification including one or more phosphate groups or analogs thereof to protect the effector molecule from nuclease degradation. The RNA effector molecule can be a single-stranded antisense nucleic acid having a nucleotide sequence that is complementary to at least a portion of a “sense” nucleic acid of a target gene, e.g., the coding strand of a double-stranded cDNA molecule or a RNA sequence, e.g., a pre-mRNA, mRNA, miRNA, or pre-miRNA. Accordingly, an antisense nucleic acid can form hydrogen bonds with a sense nucleic acid target. In an alternative embodiment, the RNA effector molecule comprises a duplex region of at least nine nucleotides in length.

[0205] Given a coding strand sequence (e.g., the sequence of a sense strand of a cDNA molecule), antisense nucleic acids can be designed according to the rules of Watson-Crick base pairing. The antisense nucleic acid can be complementary to a portion of the coding or noncoding region of a RNA, e.g., the region surrounding the translation start site of a pre-mRNA or mRNA, e.g., the 5′ UTR. An antisense oligonucleotide can be, for example, about 10 to 25 nucleotides in length (e.g., 10, 11, 12, 13, 14, 15, 16, 18, 19, 20, 21, 22, 23, or 24 nucleotides in length). In some embodiments, the antisense oligonucleotide comprises one or more modified nucleotides, e.g., phosphorothioate derivatives and/or acridine substituted nucleotides, designed to increase its biological stability of the molecule and/or the physical stability of the duplexes formed between the antisense and target nucleic acids. Antisense oligonucleotides can comprise ribonucleotides only, deoxyribonucleotides only (e.g., oligodeoxynucleotides), or both deoxyribonucleotides and ribonucleotides. For example, an antisense agent consisting only of ribonucleotides can hybridize to a complementary RNA and prevent access of the translation machinery to the target RNA transcript, thereby preventing protein synthesis. An antisense molecule including only deoxyribonucleotides, or deoxyribonucleotides and ribonucleotides, can hybridize to a complementary RNA and the RNA target can be subsequently cleaved by an enzyme, e.g., RNAse H, to prevent translation. The flanking RNA sequences can include 2′-O-methylated nucleotides, and phosphorothioate linkages, and the internal DNA sequence can include phosphorothioate internucleotide linkages. The internal DNA sequence is preferably at least five nucleotides in length when targeting by RNAseH activity is desired.

[0206] In some embodiments, RNA effector molecule is a double-stranded oligonucleotide. The term “double-stranded RNA” or “dsRNA”, as used herein, refers to an oligonucleotide molecule or complex of molecules having a hybridized duplex region that comprises two anti-parallel and substantially complementary nucleic acid strands, which will be referred to as having “sense” and “antisense” orientations with respect to a target RNA. Typically, region of complementarity is 30 nucleotides or less in length, generally, for example, 10 to 26 nucleotides in length, 18 to 25 nucleotides in length, or 19 to 24 nucleotides in length, inclusive. Upon contact with a cell expressing the target gene, the RNA effector molecule inhibits the expression of the target gene by at least 10% as assayed by, for example, a PCR or branched DNA (bDNA)-based method, or by a protein-based method, such as by protein immunoblot. Expression of a target gene in cell culture can be assayed by measuring target gene mRNA levels, e.g., by bDNA or TAQMAN® assay, or by measuring protein levels, e.g., by immunofluorescence analysis.

[0207] The duplex region can be of any length that permits specific degradation of a desired target RNA through a RISC pathway, but will typically range from 9 to 36 base pairs in length, e.g., 15 to 30 base pairs in length. More specifically, the duplex region can be of any length that permits specific degradation of a desired target RNA through a RISC pathway, but will typically range from 9 to 36 base pairs in length, e.g., 15 to 30 base pairs in length. Considering a duplex between 9 and 36 base pairs, the duplex can be any length in this range, for example, 9, 10, 11, 12, 13, 14, 15, 16, 17, 18, 19, 20, 21, 22, 23, 24, 25, 26, 27, 28, 29, 30, 31, 32, 33, 34, 35, or 36 and any sub-range there between, including, but not limited to 15 to 30 base pairs, 15 to 26 base pairs, 15 to 23 base pairs, 15 to 22 base pairs, 15 to 21 base pairs, 15 to 20 base pairs, 15 to 19 base pairs, 15 to 18 base pairs, 15 to 17 base pairs, 18 to 30 base pairs, 18 to 26 base pairs, 18 to 23 base pairs, 18 to 22 base pairs, 18 to 21 base pairs, 18 to 20 base pairs, 19 to 30 base pairs, 19 to 26 base pairs, 19 to 23 base pairs, 19 to 22 base pairs, 19 to 21 base pairs, 19 to 20 base pairs, 20 to 30 base pairs, 20 to 26 base pairs, 20 to 25 base pairs, 20 to 24 base pairs, 20 to 23 base pairs, 20 to 22 base pairs, 20 to 21 base pairs, 21 to 30 base pairs, 21 to 26 base pairs, 21 to 25 base pairs, 21 to 24 base pairs, 21 to 23 base pairs, or 21 to 22 base pairs, inclusive.

[0208] dsRNAs generated in the cell by processing with Dicer and similar enzymes are generally in the range of 19 to 22 base pairs in length. One strand of the duplex region of a dsDNA comprises a sequence that is substantially complementary to a region of a target RNA. The two strands forming the duplex structure can be from a single RNA molecule having at least one self-complementary region, or can be formed from two or more separate RNA molecules. Where the duplex region is formed from two strands of a single molecule, the molecule can have a duplex region separated by a single stranded chain of nucleotides (a “hairpin loop”) between the 3′-end of one strand and the 5′-end of the respective other strand forming the duplex structure. The hairpin loop can comprise at least one unpaired nucleotide; in some embodiments the hairpin loop can comprise at least 3, at least 4, at least 5, at least 6, at least 7, at least 8, at least 9, at least 10, at least 20, at least 23 or more unpaired nucleotides. Where the two substantially complementary strands of a dsRNA are comprised by separate RNA molecules, those molecules need not, but can be covalently connected. Where the two strands are connected covalently by means other than a hairpin loop, the connecting structure is referred to as a “linker.” The term “sRNA effector molecule” is also used herein to refer to a dsRNA.

[0209] Described herein are RNA effector molecules that modulate expression of a target gene. In one embodiment, the RNA effector molecule agent includes double-stranded ribonucleic acid (dsRNA) molecules for inhibiting the expression of a target gene in a cell, where the dsRNA includes an antisense strand having a region of complementarity which is complementary to at least a part of a target gene formed in the expression of a target gene, and where the region of complementarity is 30 nucleotides or less in length, generally 10 to 24 nucleotides in length, and where the dsRNA, upon contact with an cell expressing the target gene, inhibits the expression of the target gene by at least 10% as assayed by, for example, a PCR, PERT, or bDNA-based method, or by a protein-based method, such as a protein immunoblot (e.g., a western blot). Expression of a target gene in an cell can be assayed by measuring target gene mRNA levels, e.g., by PERT, bDNA or TAQMAN® gene expression assay, or by measuring protein levels, e.g., by immunofluorescence analysis or quantitative protein immunoblot.

[0210] A dsRNA includes two RNA strands that are sufficiently complementary to hybridize to form a duplex structure under conditions in which the dsRNA will be used. One strand of a dsRNA (the antisense strand) includes a region of complementarity that is substantially complementary, and generally fully complementary, to a target sequence, derived, for example, from the sequence of an mRNA formed during the expression of a target gene. The other strand (the sense strand) includes a region that is complementary to the antisense strand, such that the two strands hybridize and form a duplex structure when combined under suitable conditions. Generally, the duplex structure is, for example between 9 and 36, between 10 to 30 base pairs, between 18 and 25, between 19 and 24, or between 19 and 21 base pairs in length, inclusive. Similarly, the region of complementarity to the target sequence is, for example, between 10 and 30, between 18 and 25, between 19 and 24, or between 19 and 21 nucleotides in length, inclusive. In some embodiments, the dsRNA is between 10 and 20 nucleotides in length, inclusive, and in other embodiments, the dsRNA is between 25 and 30 nucleotides in length, inclusive. Thus, in one embodiment, to the extent that it becomes processed to a functional duplex of e.g., 15 to 30 base pairs that targets a desired RNA for cleavage, a RNA molecule or complex of RNA molecules having a duplex region greater than 30 base pairs is a dsRNA. As the ordinarily skilled person will recognize, the targeted region of a RNA targeted for cleavage will most often be part of a larger RNA molecule, often a mRNA molecule.

[0211] Where relevant, a “part” of a mRNA target is a contiguous sequence of a mRNA target of sufficient length to be a substrate for RNAi-directed cleavage (i.e., cleavage through a RISC pathway). dsRNAs having duplexes as short as 9 base pairs can, under some circumstances, mediate RNAi-directed RNA cleavage. Most often a target will be at least 10 nucleotides in length, such as from 15 to 30 nucleotides in length, inclusive.

[0212] The skilled person is well aware that dsRNAs having a duplex structure of between 20 and 23, but specifically 21, base pairs have been hailed as particularly effective in inducing RNA interference. Elbashir et al., 20 EMBO 6877-88 (2001). In the embodiments described above, by virtue of the nature of the oligonucleotide sequences, dsRNAs described herein can include at least one strand of a length of 21 nucleotides. It can be reasonably expected that shorter duplexes having one of the sequences minus only a few nucleotides on one or both ends can be similarly effective as compared to the dsRNAs described in detail. Hence, dsRNAs having a partial sequence of at least 10, 11, 12, 13, 14, 15, 16, 17, 18, 19, 20, or more contiguous nucleotides from a given sequence, and differing in their ability to inhibit the expression of a target gene by not more than 5%, 10%, 15%, 20%, 25%, or 30% inhibition from a dsRNA comprising the full sequence, are contemplated according to the invention.

[0213] The dsRNA can be synthesized by standard methods known in the art as further discussed below, e.g., by use of an automated DNA synthesizer, such as are commercially available from, for example, Biosearch Technologies (Novato, Calif.). In one embodiment, a target gene is a human target gene. In specific embodiments, the first sequence is a sense strand of a dsRNA that includes a sense sequence and the second sequence is a strand of a ds RNA that includes an antisense sequence. Alternative dsRNA agents that target elsewhere in the target sequence can readily be determined using the target sequence and the flanking target sequence. In this aspect, one of the two sequences is complementary to the other of the two sequences, with one of the sequences being substantially complementary to a sequence of an mRNA generated in the expression of a target gene. As such, in this aspect, a dsRNA will include two oligonucleotides, where one oligonucleotide is described as the sense strand and the second oligonucleotide is described as the antisense strand. As described elsewhere herein and as known in the art, the complementary sequences of a dsRNA can also be contained as self-complementary regions of a single nucleic acid molecule, as opposed to being on separate oligonucleotides.

[0214] A double-stranded oligonucleotide can include one or more single-stranded nucleotide overhangs. As used herein, the term “nucleotide overhang” refers to at least one unpaired nucleotide that protrudes from the terminus of a duplex structure of a double-stranded oligonucleotide, e.g., a dsRNA. For example, when a 3′-end of one strand of double-stranded oligonucleotide extends beyond the 5′-end of the other strand, or vice versa, there is a nucleotide overhang. A double-stranded oligonucleotide can comprise an overhang of at least one nucleotide; alternatively the overhang can comprise at least two nucleotides, at least three nucleotides, at least four nucleotides, at least five nucleotides or more. A nucleotide overhang can comprise or consist of a nucleotide/nucleoside analog. The overhang(s) can be on the sense strand, the antisense strand or any combination thereof. Furthermore, the nucleotide(s) of an overhang can be present on the 5′ end, 3′ end, or both ends of either an antisense or sense strand of a dsRNA.

[0215] In one embodiment, at least one end of a dsRNA has a single-stranded nucleotide overhang of 1 to 4, generally 1 or 2 nucleotides. dsRNAs having at least one nucleotide overhang have unexpectedly superior inhibitory properties relative to their blunt-ended counterparts. Moreover, the presence of a nucleotide overhang on only one strand, at one end of a dsRNA, strengthens the interference activity of the dsRNA, without affecting its overall stability. Such an overhang need not be a single nucleotide overhang; a dinucleotide overhang can also be present.

[0216] The antisense strand of a double-stranded oligonucleotide has a 1 to 10 nucleotide overhang at the 3′ end and/or the 5′ end, such as a double-stranded oligonucleotide having a 1 to 10 nucleotide overhang at the 3′ end and/or the 5′ end. One or more of the internucleoside linkages in the overhang can be replaced with a phosphorothioate. In some embodiments, the overhang comprises one or more deoxyribonucleoside or the overhang comprises one or more dT, e.g. the sequence 5′-dTdT-3′ or 5′-dTdTdT-3′. In some embodiments, overhang comprises the sequence 5′-dT*dT-3, wherein * is a phosphorothioate internucleoside linkage.

[0217] Without being bound theory, double-stranded oligonucleotides having at least one nucleotide overhang have unexpectedly superior inhibitory properties relative to their blunt-ended counterparts. Moreover, the presence of a nucleotide overhang on only one strand, at one end of a dsRNA, strengthens the interference activity of the double-stranded oligonucleotide, without affecting its overall stability.

[0218] dsRNA having only one overhang has proven particularly stable and effective in vivo, as well as in a variety of cells, cell culture media, blood, and serum. Generally, the single-stranded overhang is located at the 3′-terminal end of an antisense strand or, alternatively, at the 3′-terminal end of a sense strand. The dsRNA having an overhang on only one end will also have one blunt end, generally located at the 5′-end of the antisense strand. Such dsRNAs have superior stability and inhibitory activity, thus allowing administration at low dosages, i.e., less than 5 mg/kg body weight of the recipient per day. In one embodiment, the antisense strand of a dsRNA has a 1 to 10 nucleotide overhang at the 3′ end and/or the 5′ end. In one embodiment, the sense strand of a dsRNA has a 1 to 10 nucleotide overhang at the 3′ end and/or the 5′ end. In another embodiment, one or more of the nucleotides in the overhang is replaced with a nucleoside thiophosphate.

[0219] The terms “blunt” or “blunt ended” as used herein in reference to double-stranded oligonucleotide mean that there are no unpaired nucleotides or nucleotide analogs at a given terminal end of a double-stranded oligonucleotide, i.e., no nucleotide overhang. One or both ends of a double-stranded oligonucleotide can be blunt. Where both ends are blunt, the oligonucleotide is said to be double-blunt ended. To be clear, a “double-blunt ended” oligonucleotide is a double-stranded oligonucleotide that is blunt at both ends, i.e., no nucleotide overhang at either end of the molecule. Most often such a molecule will be double-stranded over its entire length. When only one end of is blunt, the oligonucleotide is said to be single-blunt ended. To be clear, a “single-blunt ended” oligonucleotide is a double-stranded oligonucleotide that is blunt at only one end, i.e., no nucleotide overhang at one end of the molecule. Generally, a single-blunt ended oligonucleotide is blunt ended at the 5′-end of sense stand.

[0220] A RNA effector molecule as described herein can contain one or more mismatches to the target sequence. For example, a RNA effector molecule as described herein contains no more than three mismatches. If the antisense strand of the RNA effector molecule contains mismatches to a target sequence, it is preferable that the area of mismatch not be located in the center of the region of complementarity. If the antisense strand of the RNA effector molecule contains mismatches to the target sequence, it is preferable that the mismatch be restricted to be within the last 5 nucleotides from either the 5′ or 3′ end of the region of complementarity. For example, for a 23-nucleotide RNA effector molecule agent RNA strand which is complementary to a region of a target gene, the RNA strand generally does not contain any mismatch within the central 13 nucleotides. The methods described herein, or methods known in the art, can be used to determine whether a RNA effector molecule containing a mismatch to a target sequence is effective in inhibiting the expression of a target gene. Consideration of the efficacy of RNA effector molecules with mismatches in inhibiting expression of a target gene is important, especially if the particular region of complementarity in a target gene is known to have polymorphic sequence variation within the population.

[0221] In some embodiments, the RNA effector molecule is a promoter-directed RNA (pdRNA) which is substantially complementary to at least a portion of a noncoding region of an mRNA transcript of a target gene. In one embodiment, the pdRNA is substantially complementary to at least a portion of the promoter region of a target gene mRNA at a site located upstream from the transcription start site, e.g., more than 100, more than 200, or more than 1,000 bases upstream from the transcription start site. In another embodiment, the pdRNA is substantially complementary to at least a portion of the 3′-UTR of a target gene mRNA transcript. In one embodiment, the pdRNA comprises dsRNA of 18-28 bases optionally having 3′ di- or tri-nucleotide overhangs on each strand. The dsRNA is substantially complementary to at least a portion of the promoter region or the 3′-UTR region of a target gene mRNA transcript. In another embodiment, the pdRNA comprises a gapmer consisting of a single stranded polynucleotide comprising a DNA sequence which is substantially complementary to at least a portion of the promoter or the 3′-UTR of a target gene mRNA transcript, and flanking the polynucleotide sequences (e.g., comprising the 5 terminal bases at each of the 5′ and 3′ ends of the gapmer) comprising one or more modified nucleotides, such as 2′ MOE, 2′OMe, or Locked Nucleic Acid bases (LNA), which protect the gapmer from cellular nucleases.

[0222] pdRNA can be used to selectively increase, decrease, or otherwise modulate expression of a target gene. Without being limited to theory, it is believed that pdRNAs modulate expression of target genes by binding to endogenous antisense RNA transcripts which overlap with noncoding regions of a target gene mRNA transcript, and recruiting Argonaute proteins (in the case of dsRNA) or host cell nucleases (e.g., RNase H) (in the case of gapmers) to selectively degrade the endogenous antisense RNAs. In some embodiments, the endogenous antisense RNA negatively regulates expression of the target gene and the pdRNA effector molecule activates expression of the target gene. Thus, in some embodiments, pdRNAs can be used to selectively activate the expression of a target gene by inhibiting the negative regulation of target gene expression by endogenous antisense RNA. Methods for identifying antisense transcripts encoded by promoter sequences of target genes and for making and using promoter-directed RNAs are known, see, e.g., WO 2009/046397.

[0223] In some embodiments, the RNA effector molecule comprises an aptamer which binds to a non-nucleic acid ligand, such as a small organic molecule or protein, e.g., a transcription or translation factor, and subsequently modifies (e.g., inhibits) activity. An aptamer can fold into a specific structure that directs the recognition of a targeted binding site on the non-nucleic acid ligand. Aptamers can contain any of the modifications described herein.

[0224] In some embodiments, the RNA effector molecule comprises an antagomir. Antagomirs are single stranded, double stranded, partially double stranded or hairpin structures that target a microRNA. An antagomir consists essentially of or comprises at least 10 or more contiguous nucleotides substantially complementary to an endogenous miRNA and more particularly a target sequence of an miRNA or pre-miRNA nucleotide sequence. Antagomirs preferably have a nucleotide sequence sufficiently complementary to a miRNA target sequence of about 12 to 25 nucleotides, such as about 15 to 23 nucleotides, to allow the antagomir to hybridize to the target sequence. More preferably, the target sequence differs by no more than 1, 2, or 3 nucleotides from the sequence of the antagomir. In some embodiments, the antagomir includes a non-nucleotide moiety, e.g., a cholesterol moiety, which can be attached, e.g., to the 3′ or 5′ end of the oligonucleotide agent.

[0225] In some embodiments, antagomirs are stabilized against nucleolytic degradation by the incorporation of a modification, e.g., a nucleotide modification. For example, in some embodiments, antagomirs contain a phosphorothioate comprising at least the first, second, and/or third internucleotide linkages at the 5′ or 3′ end of the nucleotide sequence. In further embodiments, antagomirs include a 2′-modified nucleotide, e.g., a 2′-deoxy, 2′-deoxy-2′-fluoro, 2′-O-methyl, 2′-O-methoxyethyl (2′-O-MOE), 2′-O-aminopropyl (2′-O-AP), 2′-O -dimethylaminoethyl (2′-O-DMAOE), 2′-O-dimethylaminopropyl (2′-O-DMAP), 2′-O-dimethylaminoethyloxyethyl (2′-O-DMAEOE), or 2′-O—N-methylacetamido (2′-O-NMA). In some embodiments, antagomirs include at least one 2′-O-methyl-modified nucleotide.

[0226] In some embodiments, the RNA effector molecule is a promoter-directed RNA (pdRNA) which is substantially complementary to at least a portion of a noncoding region of an mRNA transcript of a target gene. The pdRNA can be substantially complementary to at least a portion of the promoter region of a target gene mRNA at a site located upstream from the transcription start site, e.g., more than 100, more than 200, or more than 1,000 bases upstream from the transcription start site. Also, the pdRNA can substantially complementary to at least a portion of the 3′-UTR of a target gene mRNA transcript. For example, the pdRNA comprises dsRNA of 18 to 28 bases optionally having 3′ di- or tri-nucleotide overhangs on each strand. The dsRNA is substantially complementary to at least a portion of the promoter region or the 3′-UTR region of a target gene mRNA transcript. In another embodiment, the pdRNA comprises a gapmer consisting of a single stranded polynucleotide comprising a DNA sequence which is substantially complementary to at least a portion of the promoter or the 3′-UTR of a target gene mRNA transcript, and flanking the polynucleotide sequences (e.g., comprising the 5 terminal bases at each of the 5′ and 3′ ends of the gapmer) comprising one or more modified nucleotides, such as 2′MOE, 2′OMe, or Locked Nucleic Acid bases (LNA), which protect the gapmer from cellular nucleases.

[0227] pdRNA can be used to selectively increase, decrease, or otherwise modulate expression of a target gene. Without being limited to theory, pdRNAs can modulate expression of target genes by binding to endogenous antisense RNA transcripts which overlap with noncoding regions of a target gene mRNA transcript, and recruiting Argonaute proteins (in the case of dsRNA) or host cell nucleases (e.g., RNase H) (in the case of gapmers) to selectively degrade the endogenous antisense RNAs. In some embodiments, the endogenous antisense RNA negatively regulates expression of the target gene and the pdRNA effector molecule activates expression of the target gene. Thus, in some embodiments, pdRNAs can be used to selectively activate the expression of a target gene by inhibiting the negative regulation of target gene expression by endogenous antisense RNA. Methods for identifying antisense transcripts encoded by promoter sequences of target genes and for making and using promoter-directed RNAs are known. See, e.g., WO 2009/046397.

[0228] Expressed interfering RNA (eiRNA) can be used to selectively increase, decrease, or otherwise modulate expression of a target gene. Typically, eiRNA, the dsRNA is expressed in the first transfected cell from an expression vector. In such a vector, the sense strand and the antisense strand of the dsRNA can be transcribed from the same nucleic acid sequence using e.g., two convergent promoters at either end of the nucleic acid sequence or separate promoters transcribing either a sense or antisense sequence. Alternatively, two plasmids can be cotransfected, with one of the plasmids designed to transcribe one strand of the dsRNA while the other is designed to transcribe the other strand. Methods for making and using eiRNA effector molecules are known in the art. See, e.g., WO 2006/033756; U.S. Patent Pubs. No. 2005/0239728 and No. 2006/0035344.

[0229] In some embodiments, the RNA effector molecule comprises a small single-stranded Piwi-interacting RNA (piRNA effector molecule) which is substantially complementary to at least a portion of a target gene, as defined herein, and which selectively binds to proteins of the Piwi or Aubergine subclasses of Argonaute proteins. Without being limited to a particular theory, it is believed that piRNA effector molecules interact with RNA transcripts of target genes and recruit Piwi and/or Aubergine proteins to form a ribonucleoprotein (RNP) complex that induces transcriptional and/or post-transcriptional gene silencing of target genes. A piRNA effector molecule can be about 10 to 50 nucleotides in length, about 25 to 39 nucleotides in length, or about 26 to 31 nucleotides in length. See, e.g., U.S. Patent Pub. No. 2009/0062228.

[0230] MicroRNAs are a highly conserved class of small RNA molecules that are transcribed from DNA in the genomes of plants and animals, but are not translated into protein. Pre-microRNAs are processed into miRNAs. Processed microRNAs are single stranded ˜17-25 nucleotide (nt) RNA molecules that become incorporated into the RNA-induced silencing complex (RISC) and have been identified as key regulators of development, cell proliferation, apoptosis and differentiation. They are believed to play a role in regulation of gene expression by binding to the 3′-untranslated region of specific mRNAs. MicroRNAs cause post-transcriptional silencing of specific target genes, e.g., by inhibiting translation or initiating degradation of the targeted mRNA. In some embodiments, the miRNA is completely complementary with the target nucleic acid. In other embodiments, the miRNA has a region of noncomplementarity with the target nucleic acid, resulting in a “bulge” at the region of non-complementarity. In some embodiments, the region of noncomplementarity (the bulge) is flanked by regions of sufficient complementarity, e.g., complete complementarity, to allow duplex formation. For example, the regions of complementarity are at least 8 to 10 nucleotides long (e.g., 8, 9, or 10 nucleotides long).

[0231] miRNA can inhibit gene expression by, e.g., repressing translation, such as when the miRNA is not completely complementary to the target nucleic acid, or by causing target RNA degradation, when the miRNA binds its target with perfect or a high degree of complementarity. In further embodiments, the RNA effector molecule can include an oligonucleotide agent which targets an endogenous miRNA or pre-miRNA. For example, the RNA effector can target an endogenous miRNA which negatively regulates expression of a target gene, such that the RNA effector alleviates miRNA-based inhibition of the target gene. The oligonucleotide agent can include naturally occurring nucleobases, sugars, and covalent internucleotide (backbone) linkages and/or oligonucleotides having one or more non-naturally-occurring features that confer desirable properties, such as enhanced cellular uptake, enhanced affinity for the endogenous miRNA target, and/or increased stability in the presence of nucleases. In some embodiments, an oligonucleotide agent designed to bind to a specific endogenous miRNA has substantial complementarity, e.g., at least 70%, 80%, 90%, or 100% complementary, with at least 10, 20, or 25 or more bases of the target miRNA. Exemplary oligonucleotide agents that target miRNAs and pre-miRNAs are described, for example, in U.S. Patent Pubs. No. 20090317907, No. 20090298174, No. 20090291907, No. 20090291906, No. 20090286969, No. 20090236225, No. 20090221685, No. 20090203893, No. 20070049547, No. 20050261218, No. 20090275729, No. 20090043082, No. 20070287179, No. 20060212950, No. 20060166910, No. 20050227934, No. 20050222067, No. 20050221490, No. 20050221293, No. 20050182005, and No. 20050059005.

[0232] A miRNA or pre-miRNA can be 10 to 200 nucleotides in length, for example from 16 to 80 nucleotides in length. Mature miRNAs can have a length of 16 to 30 nucleotides, such as 21 to 25 nucleotides, particularly 21, 22, 23, 24, or 25 nucleotides in length. miRNA precursors can have a length of 70 to 100 nucleotides and can have a hairpin conformation. In some embodiments, miRNAs are generated in vivo from pre-miRNAs by the enzymes cDicer and Drosha. miRNAs or pre-miRNAs can be synthesized in vivo by a cell-based system or can be chemically synthesized. miRNAs can comprise modifications which impart one or more desired properties, such as superior stability, hybridization thermodynamics with a target nucleic acid, targeting to a particular tissue or cell-type, and/or cell permeability, e.g., by an endocytosis-dependent or -independent mechanism. Modifications can also increase sequence specificity, and consequently decrease off-site targeting.

[0233] In further embodiments, the RNA effector molecule can comprise an oligonucleotide agent which targets an endogenous miRNA or pre-miRNA. For example, the RNA effector can target an endogenous miRNA which negatively regulates expression of a target gene, such that the RNA effector alleviates miRNA-based inhibition of the target gene.

[0234] As used herein, the phrase “in the presence of at least one RNA effector molecule” encompasses exposure of the cell to a RNA effector molecule expressed within the cell, e.g., shRNA, or exposure by exogenous addition of the RNA effector molecule to the cell, e.g., delivery of the RNA effector molecule to the cell, optionally using an agent that facilitates uptake into the cell. A portion of a RNA effector molecule is substantially complementary to at least a portion of the target gene RNA, such as the coding region, the promoter region, the 3′untranslated region (3′-UTR), or a long terminal repeat (LTR) of the target gene RNA. RNA effector molecules disclosed herein include a RNA strand (the antisense strand) having a region which is 30 nucleotides or less in length, e.g., 10 to 200 nucleotides in length, or 19 to 24 nucleotides in length, which region is substantially complementary to at least a portion of a target gene which encodes a protein that affects one or more aspects of the production of a immunogenic agent, such as the yield, purity, homogeneity, biological activity, or stability of the immunogenic agent. A RNA effector molecule interacts with RNA transcripts of a target gene and mediates its selective degradation or otherwise prevents its translation. In various embodiments of the present invention, the RNA effector molecule is at least one gapmer, or siRNA, miRNA, dsRNA, saRNA, shRNA, piRNA, tkRNAi, eiRNA, pdRNA, antagomir, or ribozyme.

[0235] Double-stranded and single-stranded oligonucleotides that are effective in inducing RNA interference are also referred to as siRNA, RNAi agent, or iRNA agent, herein. These RNA interference inducing oligonucleotides associate with a cytoplasmic multi-protein complex known as RNAi-induced silencing complex (RISC). Without being bound by theory, RNA interference leads to Argonaute-mediated post-transcriptional cleavage of target gene mRNA transcripts. In many embodiments, single-stranded and double-stranded RNAi agents are sufficiently long that they can be cleaved by an endogenous molecule, e.g. by Dicer, to produce smaller oligonucleotides that can enter the RISC machinery and participate in RISC mediated cleavage of a target sequence, e.g., a target mRNA.

[0236] In some embodiments, the RNAs provided herein identify a site in a target transcript that is susceptible to RISC-mediated cleavage. As such, the present invention further features RNA effector molecules that target within one of such sequences. Such a RNA effector molecule will generally include at least 10 contiguous nucleotides from one of the sequences provided coupled to additional nucleotide sequences taken from the region contiguous to the selected sequence in a target gene.

[0237] The phrase “genome information” as used herein and throughout the claims and specification is meant to refer to sequence information from partial or entire genome of an organism, including protein coding and non-coding regions. These sequences are present every cell originating from the same organisms. As opposed to the transcriptome sequence information, genome information comprises not only coding regions, but also, for example, intronic sequences, promoter sequences, silencer sequences and enhancer sequences. Thus, the “genome information” can refer to, for example a human genome, a mouse genome, a rat genome. One can use complete genome information or partial genome information to add an additional dimension to the database sequences to increase the potential targets to modify with a RNA effector molecule.

[0238] The phrase “play a role” refers to any activity of a transcript or a protein in a molecular pathway known to a skilled artisan or identified elsewhere in this specification. Such pathways an cellular activities include, but are not limited to apoptosis, cell division, glycosylation, growth rate, a cellular productivity, a peak cell density, a sustained cell viability, a rate of ammonia production or consumption, or a rate of lactate production.

[0239] A “bioreactor”, as used herein, refers generally to any reaction vessel suitable for growing and maintaining host cells such that the host cells produce an immunogenic agent, and for recovering such immunogenic agent. Bioreactors described herein include cell culture systems of varying sizes, such as small culture flasks, Nunc multilayer cell factories, small high yield bioreactors (e.g., MiniPerm, INTEGRA-CELLine), spinner flasks, hollow fiber-WAVE bags (Wave Biotech, Tagelswangen, Switzerland), and industrial scale bioreactors. In some embodiments, the immunogenic agent is produced in a “large scale culture” bioreactor having a 1 L capacity or more, suitable for pharmaceutical or industrial scale production of immunogenic agents (e.g., a volume of at least 1 L, least 2 L, at least 5 L, at least 10 L, at least 25 L, at least 50 L, at least 100 L, or more, inclusive), often including means of monitoring pH, glucose, lactate, temperature, and/or other bioprocess parameters. In one embodiment, a large scale culture is at least 1 L in volume.

[0240] In one embodiment, a large scale culture is at least 2 L in volume. In one embodiment, a large scale culture is at least 5 L in volume. In one embodiment, a large scale culture is at least 25 L in volume. In one embodiment, a large scale culture is at least 40 L in volume. In one embodiment, a large scale culture is at least 50 L in volume. In one embodiment, a large scale culture is at least 100 L in volume.

[0241] A “host cell”, as used herein, is any cell, cell culture, cellular biomass or tissue, capable of being grown and maintained in cell culture under conditions allowing for production and recovery of useful quantities of an immunogenic agent, as defined herein. A host cell can be derived from a yeast, insect, amphibian, fish, reptile, bird, mammal or human, or can be a hybridoma cell. Host cells can be unmodified cells or cell lines, or cell lines which have been genetically modified (e.g., to facilitate production of an immunogenic agent). In some embodiments, the host cell is a cell line that has been modified to allow for growth under desired conditions, such as in serum-free media, in cell suspension culture, or in adherent cell culture. As used herein, “hamster” refers to Cricetulus griseus (Chinese hamster).

[0242] A mammalian host cell can be advantageous where the immunogenic agent is a mammalian recombinant polypeptide, particularly if the polypeptide is a biotherapeutic agent or is otherwise intended for administration to or consumption by humans. In some embodiments, the host cell is a CHO cell, which is a cell line used for the expression of many recombinant proteins. Additional mammalian cell lines used commonly for the expression of recombinant proteins include 293HEK cells, HeLa cells, COS cells, NIH/3T3 cells, Jurkat Cells, NSO cells. and HUVEC cells.

[0243] In one embodiment, the host cell is a Madin Darby canine kidney (MDCK) cell. MDCK cells are routinely used by those of skill in the art for virus/vaccine production.

[0244] In some embodiments, the host cell is a CHO cell derivative that has been modified genetically to facilitate production of recombinant proteins or other immunogenic agents. For example, various CHO cell strains have been developed which permit stable insertion of recombinant DNA into a specific gene or expression region of the cells, amplification of the inserted DNA, and selection of cells exhibiting high level expression of the recombinant protein. Examples of CHO cell derivatives useful in methods provided herein include, but are not limited to, CHO-K1 cells, CHO-DUKX, CHO-DUKX B1, CHO-DG44 cells, CHO—ICAM-1 cells, and CHO-h1FNγ cells. Methods for expressing recombinant proteins in CHO cells are known in the art and are described in, e.g., U.S. Pat. No. 4,816,567 and No. 5,981,214.

[0245] Examples of human cell lines useful in methods provided herein include the cell lines 293T. (embryonic kidney), 786-0 (renal), A498 (renal), A549 (alveolar basal epithelial), ACHN (renal), BT-549 (breast), BxPC-3 (pancreatic), CAKI-1 (renal), Capan-1 (pancreatic), CCRF-CEM (leukemia), COLO 205 (colon), DLD-1 (colon), DMS 114 (small cell lung), DU145 (prostate), EKVX (non-small cell lung), HCC-2998 (colon), HCT-15 (colon), HCT-116 (colon), HT29 (colon), HT-1080 (fibrosarcoma), HEK 293 (embryonic kidney), HeLa (cervical carcinoma), HepG2 (hepatocellular carcinoma), HL-60(TB) (leukemia), HOP-62 (non-small cell lung), HOP-92 (non-small cell lung), HS 578T. (breast), HT-29 (colon adenocarcinoma), IGR-OV1 (ovarian), IMR32 (neuroblastoma), Jurkat (T lymphocyte), K-562 (leukemia), KM12 (colon), KM20L2 (colon), LANS (neuroblastoma), LNCap.FGC (Caucasian prostate adenocarcinoma), LOX IMVI (melanoma), LXFL 529 (non-small cell lung), M14 (melanoma), M19-MEL (melanoma), MALME-3M (melanoma), MCFlOA (mammary epithelial), MCF7 (mammary), MDA-MB-453 (mammary epithelial), MDA-MB-468 (breast), MDA-MB-231 (breast), MDA-N (breast), MOLT-4 (leukemia), NCI/ADR-RES (ovarian), NCI-H226 (non-small cell lung), NCI—H23 (non-small cell lung), NCI—H322M (non-small cell lung), NCI—H460 (non-small cell lung), NCI—H522 (non-small cell lung), OVCAR-3 (ovarian), OVCAR-4 (ovarian), OVCAR-5 (ovarian), OVCAR-8 (ovarian), P388 (leukemia), P388/ADR (leukemia), PC-3 (prostate), PERC6® (E1-transformed embryonal retina), RPMI-7951 (melanoma), RPMI-8226 (leukemia), RXF 393 (renal), RXF-631 (renal), Saos-2 (bone), SF-268 (CNS), SF-295 (CNS), SF-539 (CNS), SHP-77 (small cell lung), SH-SY5Y (neuroblastoma), SK-OV-3 (breast), SK-MEL-2 (melanoma), SK-MEL-5 (melanoma), SK-MEL-28 (melanoma), SK-OV-3 (ovarian), SN12K1 (renal), SN12C (renal), SNB-19 (CNS), SNB-75 (CNS)SNB-78 (CNS), SR (leukemia), SW-620 (colon), T-47D (breast), THP-1 (monocyte-derived macrophages), TK-10 (renal), U87 (glioblastoma), U293 (kidney), U251 (CNS), UACC-257 (melanoma), UACC-62 (melanoma), UO-31 (renal), W138 (lung), and XF 498 (CNS).

[0246] Examples of non-human primate cell lines useful in methods provided herein include the cell lines monkey kidney (CVI-76), African green monkey kidney (VERO-76), green monkey fibroblast (COS-1), and monkey kidney (CVI) cells transformed by SV40 (COS-7). Additional mammalian cell lines are known to those of ordinary skill in the art and are catalogued at the American Type Culture Collection catalog (Manassas, Va.).

[0247] Additional examples of rodent cell lines useful in methods provided herein include the cell lines baby hamster kidney (BHK) (e.g., BHK21, BHK TK), mouse Sertoli (TM4), buffalo rat liver (BRL 3A), mouse mammary tumor (MMT), rat hepatoma (HTC), mouse myeloma (NS0), murine hybridoma (Sp2/0), mouse thymoma (EL4), murine embryonic (NIH/3T3, 3T3 Ll), rat myocardial (H9c2), mouse myoblast (C2C12), and mouse kidney (miMCD-3).

[0248] In some embodiments, the host cell is a multipotent stem cell or progenitor cell. Examples of multipotent cells useful in methods provided herein include murine embryonic stem (ES-D3) cells, human umbilical vein endothelial (HuVEC) cells, human umbilical artery smooth muscle (HuASMC) cells, human differentiated stem (HKB-II) cells, human mesenchymal stem (hMSC) cells, and induced pluripotent stem (iPS) cells.

[0249] In some embodiments, the host cell is a plant cell. Examples of plant cells that grow readily in culture include Arabidopsis thaliana (cress), Allium sativum (garlic) Taxus chinensis, T. cuspidata, T. baccata, T. brevifolia and T. mairei (yew), Catharanthus roseus (periwinkle), Nicotiana benthamiana (solanaceae), N. tabacum (tobacco) including tobacco cells lines such as NT-1 or BY-2 (NT-1 cells are available from ATCC, No. 74840, see also U.S. Pat. No. 6,140,075), Oryza sativa (rice), Lycopersicum esulentum (tomato), Medicago sativa (alfalfa), Glycine max (soybean), Medicago truncatula and M. sativa (clovers), Phaseolus vulgaris (bean), Solanum tuberosum (potato), Beta vulgaris (beet), Saccharum spp. (sugarcane), Tectona grandis (teak), Musa spp. (banana), Phyllostachys nigra (bamboo), Vitis vinifera and V. gamay (grape), Popuius alba (poplar), Elaeis guineensis (oil palm), Ulmus spp. (elm), Thalictrum minus (meadow rue), Tinospora cordifolia ( ), Vinca rosea (vinca), Sorghum spp., Lolium perenne (ryegrass), Cucumis sativus (cucumber), Asparagus officinalis, Brucea javanica (Yadanxi), Doritaenopsis and Phalaenopsis (orchids), Rubus chamaemorus (cloudberry), Coffea arabica, Triticum timopheevii (wheat), Actinidia deliciosa (kiwi), Typha latifolia (cattail), Azadirachta indica (neem), Uncaria tomentosa and U. guianensis (cat's claw), Platycodon grandiflorum (balloon flower), Calotropis gigantea (mikweed), Kosteletzkya virginica (mallow), Pyrus malus (apple), Papaver somniferum (opium poppy), Citrus ssp., Choisya ternata (mock orange), Galium mollugo (madder), Digitalis Janata and D. purpurea (foxglove), Stevia rebaudiana (sweetleaf), Stizolobium hassjoo (purselane), Panicum virgatum (switchgrass), Rudgea jasminoides, Panax quinquefolius (American ginseng), Cupressus macrocarpa and C. arizonica (cypress), Vetiveria zizanioides (vetiver grass), Withania somnifera (Indian ginseng), Vigna unguiculata (cowpea), Phyllanthus niruri (spurge), Pueraria tuberosa and P. lobata (kudzu), Glycyrrhiza echinata (liquorice), Cicer arietinum (chick pea), Silybum marianum (milk thistle), Callistemon citrinus (bottle brush tree), Astragalus chrysochlorus (cuckoo flower), Coronilla vaginalis, such as cell line 39 RAR (crown vetch), Salvia miltiorrhiza (red sage), Vigna radiata (mung bean), Gisekia pharmaceoides, Datura tatula and D. stramonium (devil's trumpet), and Zea mays spp. (maize/corn).

[0250] The plant cell cultures provided herein are not limited to any particular method for transforming plant cells. Technology for introducing DNA into plant cells is well-known to those of skill in the art. See, e.g., U.S. Patent Application Pub. No. 2010/0009449. Basic methods for delivering foreign DNA into plant cells have been described, including chemical methods (Graham & van der Eb, 54 Virol. 536-39 (1973); Zatloukal et al., 660 Ann. NY Acad. Sci. 136-53 (1992)); physical methods, including microinjection (Capeechi, 22 Cell 479-88 (1980), electroporation (Wong & Neumann, 107 Biochem. Biophys. Res. Commn. 584-87 (1982); Fromm et al., 82 PNAS 5824-28 (1985); U.S. Pat. No. 5,384,253), and the “gene gun” (Johnston & Tang, 43 Met. Cell. Biol. 353-65 (1994); Fynan et al., 90 PNAS 11478-82 (1993)); viral methods (Clapp, 20 Clin. Perinatol. 155-68 (1993); Lu et al., 178 J. Exp. Med. 2089-96 (1993); Eglitis & Anderson, 6 Biotechs. 608-14 (1988); Eglitis et al., 241 Avd. Exp. Med. Biol. 19-27 (1988); and receptor-mediated methods (Curiel et al., 88 PNAS 8850-54 (1991); Curiel et al., 3 Hum. Gen. Ther. 147-54 (1992); Wagner et al., 89 PNAS 6099-103 (1992). Transgenic plant is herein defined as a plant cell culture, plant cell line, plant tissue culture, lower plant, monocot plant cell culture, dicot plant cell culture, or progeny thereof derived from a transformed plant cell or protoplast, wherein the genome of the transformed plant contains foreign DNA, introduced by laboratory techniques, not originally present in a native, non-transgenic plant cell of the same species.

[0251] In some embodiments, the host cell is fungal, such as Sacharomyces cerevisiae, Pichia pastoris or P. methanolica, Rhizopus, Aspergillus, Scizosacchromyces pombe, Hansanuela polymorpha, or Kluyveromyces lactis. See, e.g., Petranovic & Vemuri, 144 J. Biotech. 204-11 (2009); Bollok et al., 3 Recent Pat. Biotech. 192-201 (2009); Takegawa et al., 53 Biotech. Appl. Biochem. 227-35 (2009); Chiba & Akeboshi, 32 Biol. Pharm. Bull. 786-95 (2009).

[0252] In some embodiments, the host cell is an insect cell, such as Sf9 cell line (derived from pupal ovarian tissue of Spodoptera frugiperda); Hi-5 (derived from Trichoplusia ni egg cell homogenates); or S2 cells (from Drosophila melanogaster).

[0253] In some embodiments, the host cells are suitable for growth in suspension cultures. Suspension-competent host cells are generally monodisperse or grow in loose aggregates without substantial aggregation. Suspension-competent host cells include cells that are suitable for suspension culture without adaptation or manipulation (e.g., hematopoietic cells, lymphoid cells) and cells that have been made suspension-competent by modification or adaptation of attachment-dependent cells (e.g., epithelial cells, fibroblasts).

[0254] In some embodiments, the host cell is an attachment dependent cell which is grown and maintained in adherent culture. Examples of human adherent cell lines useful in methods provided herein include the cell lines human neuroblastoma (SH-SY5Y, IMR32, and LANS), human cervical carcinoma (HeLa), human breast epithelial (MCFlOA), human embryonic kidney (293T), and human breast carcinoma (SK-BR3).

[0255] In some embodiments, the host cell is a cell line that has been modified to allow for growth under desired conditions, such as in serum-free media, in cell suspension culture, or in adherent cell culture. The host cell can be, for example, a human Namalwa Burkitt lymphoma cell (BLcl-kar-Namalwa), baby hamster kidney fibroblast (BHK), CHO cell, Murine myeloma cell (NS0, SP2/0), hybridoma cell, human embryonic kidney cell (293 HEK), human retina-derived cell (PER.C6® cells, U.S. Pat. No. 7,550,284), insect cell line (Sf9, derived from pupal ovarian tissue of Spodoptera frugiperda; or Hi-5, derived from Trichoplusia ni egg cell homogenates; see also U.S. Pat. No. 7,041,500), Madin-Darby canine kidney cell (MDCK), primary mouse brain cells or tissue, primary calf lymph cells or tissue, primary monkey kidney cells, embryonated hens' egg, primary chicken embryo fibroblast (CEF), Rhesus fetal lung cell (FRhL-2), Human fetal lung cell (WI-38, MRC-5), African green monkey kidney epithelial cell (Vero, CV-1), Rhesus monkey kidney cell (LLC-MK2), or yeast cell. Additional mammalian cell lines commonly used for the expression of recombinant proteins include, but are not limited to, HeLa cells, COS cells, NIH/3T3 cells, Jurkat Cells, and human umbilical vein endothelial cells (HUVEC) cells.

[0256] Host cells can be unmodified or genetically modified (e.g., a cell from a transgenic animal). For example, CEFs from transgenic chicken eggs can have one or more genes essential for the IFN pathway, e.g., interferon receptor, STAT1, etc., disrupted, i.e., a trangenic “knockout.” See, e.g., Sang, 12 Trends Biotech. 415 (1994); Perry et al., 2 Transgenic Res. 125 (1993); Stern, 212 Curr Top Micro. Immunol. 195-206 (1996); Shuman, 47 Experientia 897 (1991). Also, the cell can be modified to allow for growth under desired conditions, e.g., incubation at 30° C.

[0257] In some embodiments, the host cells are suitable for growth in suspension cultures. Suspension-competent host cells are generally monodisperse or grow in loose aggregates without substantial aggregation. Suspension-competent host cells include cells that are suitable for suspension culture without adaptation or manipulation (e.g., hematopoietic cells, lymphoid cells) and cells that have been made suspension-competent by modification or adaptation of attachment-dependent cells (e.g., epithelial cells, fibroblasts). In some embodiments, the host cell is an attachment dependent cell which is grown and maintained in adherent culture. In some embodiments, the host cell is contained in an egg, such as a fish, amphibian, or avian egg.

[0258] “Isolating immunogenic agent from the host cell” means at least one step in separating the immunogenic agent away from host cellular material, e.g., the host cell, host cell culture medium, host cellular biomass, or host tissue. Thus, isolating immunogenic agents that are secreted into, and ultimately harvested from, the host cell culture media are encompassed in the phrase “isolated from the host cell.” A useful quantity includes an amount, including an aliquot or sample, used to screen for or monitor production, including monitoring modulation of target gene expression.

[0259] The present invention provides for the production of immunogenic agents, including an antigen, antigenic polypeptide, a metabolite, an intermediate, a viral antigen, bacterial antigen, fungal antigen, parasite antigen, virus particle, defective virus, live attenuated virus, killed virus, or vaccine. Immunogenic agents can include any immunogenic substance capable of being produced by a host cell and recovered in useful quantities, including but not limited to, polypeptides, glycoproteins and “biologics” such as a a vaccine that is synthesized from living organisms or their products, and used as a preventive, or therapeutic agent. Thus, immunogenic agents can be used for a wide range of applications, including as biotherapeutic agents, vaccines, research or diagnostic reagents, and the like.

[0260] In some embodiments, the immunogenic agent is a polypeptide. The polypeptide can be a recombinant polypeptide or a polypeptide endogenous to the host cell. In some embodiments, the polypeptide is a glycoprotein and the host cell is a mammalian cell. Non-limiting examples of polypeptides that can be produced according to methods provided herein include receptors, membrane proteins, cytokines, chemokines, hormones, enzymes, growth factors, growth factor receptors, antibodies, antibody derivatives and other immune effectors, interleukins, interferons, erythropoietin, integrins, soluble major histocompatibility complex antigens, binding proteins, transcription factors, translation factors, oncoproteins or proto-oncoproteins, muscle proteins, myeloproteins, neuroactive proteins, tumor growth suppressors, structural proteins, and blood proteins (e.g., thrombin, serum albumin, Factor VII, Factor VIII, Factor IX, Factor X, Protein C, von Willebrand factor, etc.) to which an immune response is desired.

[0261] As used herein, a polypeptide encompasses glycoproteins or other polypeptides which have undergone post-translational modification, such as deamidation, glycosylation, and the like. In some embodiments, the immunogenic agent is an aberrantly glycosylated protein. For example, many cancer antigens are known to be aberrantly glycoylated, particularly involving fucosyl residues. Moriwaki & Miyoshi, 2 World J. Heparol., 151-61 (2010). Thus, in one embodiment, the production of a cancer antigen is enhanced by modulating expression of a target gene encoding a fucosyltransferase, such as FUT8 (for example, by contacting a host CHO cell by use of a corresponding RNA effector molecule comprising an an antisense strand comprising at least 16 contiguous nucleotides (e.g., at least 17, at least 18, at least 19 nucleotides) of an oligonucleotide nucleotide having a sequence selected from the group consisting of SEQ ID NOs:209841-210227). In a particular embodiment, methods are provided for enhancing production of a fucosylated immunogen (e.g., a recombinant cancer antigen) by contacting a cell (e.g., CHO cell) with one or more RNA effector molecules that comprise at least 16 contiguous nucleotides of a nucleotide sequence (e.g., at least 17, at least 18, at least 19 nucleotides or more) to modulate fucosylation of the biological product. For example, the cell can be contacted with one or more RNA effector molecules of SEQ ID NOs:3152714-3152753, wherein the contacting modulates expression of the CHO cell fucosyltransferase (FUT8).

[0262] In one embodiment, production of the immunogenic agent is enhanced by contacting the host cell with at least one RNA effector molecule against target genes selected from the group consisting of FUT8, TSTA3, and GMDS, e.g., to modulate fucosylation. In one embodiment, at least two RNA effector molecules against target genes selected from the group consisting of FUT8, TSTA3, and GMDS are used. In one aspect of these embodiments, the host cell can be further contacted with a RNA effector molecule that targets a gene that encodes a sialytransferase, e.g., CHO cell ST3 β-galactoside-2,3-sialyltransferase 1 (SEQ ID NO:2088), ST3 β-galactoside-2,3-sialyltransferase 4 (SEQ ID NO:2167), ST3 β-galactoside-2,3-sialyltransferase 3 (SEQ ID NO:3411), ST3 β-galactoside-2,3-sialyltransferase 5 (SEQ ID NO:3484), ST6 (—N-acetyl-neuraminyl-2,3-β-galactosyl-1,3)—N-acetylgalactosaminide-2,6-sialyltransferase 6 (SEQ ID NO:4186) or ST3 β-galactoside-2,3-sialyltransferase 2 (SEQ ID NO:4319). Targeting sialyltransferases can also be advantageous in the context of altering host cell membrane-associated sialic acid viral receptors, as discussed further herein.

[0263] In one embodiment the RNA effector molecule is an siRNA having a sequence selected from the group consisting of CHO cell ST3 β-galactoside α-2,3-sialyltransferase 1 (SEQ ID NOs:681105-681454), ST3 β-galactoside α-2,3-sialyltransferase 4 (SEQ ID NOs:707535-707870), ST3 β-galactoside α-2,3-sialyltransferase 3 (SEQ ID NOs:1131123-1131445), ST3 β galactoside α-2,3-sialyltransferase 5 (SEQ ID NOs:1155324-1155711), ST6 (α-N-acetyl-neuraminyl-2,3-β-galactosyl-1,3)-N-acetylgalactosaminide α-2,6-sialyltransferase 6 (SEQ ID NOs:1391079-1391449), or ST3 β-galactoside α-2,3-sialyltransferase 2 (SEQ ID NOs: 1435989-1436317).

[0264] In other embodiments, the immunogenic agent is an immunogenic viral, bacterial, allergen, fungal, parasite, protozoan, or recombinant protein derived from an expression vector.

[0265] Another example approach for producing viral-based vaccines involves the use of attenuated live virus vaccines, which are capable of replication but are not pathogenic, and, therefore, provide lasting immunity and afford greater protection against disease. The conventional methods for producing attenuated viruses involve the chance isolation of host range mutants, many of which are temperature sensitive, e.g., the virus is passaged through unnatural hosts, and progeny viruses which are immunogenic, yet not pathogenic, are selected. Efficient vaccine production requires the growth of large quantities of virus produced in high yields from a host system. Different types of virus require different growth conditions in order to obtain acceptable yields. The host in which the virus is grown is therefore of great significance. As a function of the virus type, a virus can be grown in embryonated eggs, primary tissue culture cells, or in established cell lines.

[0266] Thus, in some embodiments of the present invention, the immunogenic agent is a viral product, for example, naturally occurring viral strains, variants or mutants; mutagenized viruses (e.g., generated by exposure to mutagens, repeated passages and/or passage in non-permissive hosts), reassortants (in the case of segmented viral genomes), and/or genetically engineered viruses (e.g., using the “reverse genetics” techniques) having the desired phenotype. The viruses of these embodiments can be attenuated; i.e., they are infectious and can replicate in vivo, but generate low titers resulting in subclinical levels of infection that are generally non-pathogenic.

[0267] Additionally, the immunogenic agent of the present invention can be derived from an intracellular parasite against which production of an immunogenic agent can be enhanced using the compositions, cells, and/or methods of the present invention, e.g., using a RNA effector molecule. For example, alternative embodiments of the present invention provide for production of a bacterial immunogen in a eukaryotic cell. These bacteria include Shigella flexneri, Listeria monocytogenes, Rickettsiae tsutsugamushi, Rickettsiae rickettsiae, Mycobacterium leprae, Mycobacterium tuberculosis, Legionella pneumophila, Chlamydia ssp. Additional embodiments of the present invention provide for production of a protozoan immunogen in a eukaryotic cell. These protozoa include Plasmodium falciparum, Tripanosoma cruzi, and Leishmania donovani.

[0268] In some embodiments, the enhancement of production of an immunogenic agent is achieved by improving viability of the cells in culture. As used herein, the term “improving cell viability” refers to an increase in cell density (e.g., as assessed by a Trypan Blue exclusion assay) or a decrease in apoptosis (e.g., as assessed using a TUNEL assay) of at least 10% in the presence of a RNA effector molecule(s) compared with the cell density or apoptosis levels in the absence of such a treatment. In some embodiments, the increase in cell density or decrease in apoptosis in response to treatment with a RNA effector molecule(s) is at least 20%, at least 30%, at least 40%, at least 50%, at least 60%, at least 70%, at least 80%, at least 90%, at least 95%, or even 100% compared to untreated cells. In some embodiments, the increase in cell density in response to treatment with a RNA effector molecule(s) is at least 2-fold, at least 5-fold, at least 10-fold, at least 20-fold, at least 50-fold, at least 100-fold, at least 1000-fold or higher than the cell density in the absence of the RNA effector molecule(s).

[0269] “Bioprocessing” as used herein is an exemplary process for the industrial-scale production of an immunogenic agent (e.g., a recombinant antigenic polypeptide) in cell culture (e.g., in a mammalian host cell), that typically includes the following steps: (a) inoculating mammalian host cells (e.g., that comprises either a virus, or a transgene that encodes a recombinant antigenic polypeptide) into a seed culture vessel containing cell culture medium and propagating the cells to reach a minimum threshold cross-seeding density; (b) transferring the propagated seed culture cells, or a portion thereof, to a large-scale bioreactor; (c) propagating the large-scale culture under conditions allowing for rapid growth and cell division until the cells reach a predetermined density; (d) maintaining the culture under conditions that disfavor continued cell growth and/or host cell division and facilitate expression of the antigenic protein or virus particles.

[0270] Steps (a) to (c) of the above method generally comprise a “growth” phase, whereas step (d) generally comprises a “production” phase. In some embodiments, fed batch culture or continuous cell culture conditions are tailored to enhance growth and division of the host cells in the growth phase and to disfavor cell growth and/or division and facilitate expression of the immunogenic agent during the production phase. For example, in some embodiments, an immunogenic agent is expressed at levels of about 1 mg/L, about 2.5 mg/L, about 5 mg/L, about 1 g/L, about 5 g/L, about 15 g/L, or higher. The rate of cell growth and/or division can be modulated by varying culture conditions, such as temperature, pH, dissolved oxygen (dO₂) and the like. For example, suitable conditions for the growth phase can include a pH of between about pH 6.5 and pH 7.5, a temperature between about 30° C. to 38° C., and a dO₂ between about 5% to 90% saturation. In some embodiments, the expression of a heterologous protein can be enhanced in the production phase by inducing a temperature shift to a lower culture temperature (e.g., from about 37° C. to about 30° C.), increasing the concentration of solutes in the cell culture medium, or adding a toxin (e.g., sodium butyrate) to the cell culture medium. In some embodiments, the expression of a heterologous protein can be enhanced in the production phase by inducing a temperature shift to about 28° C., e.g., to increase protein expression in the absence of call division (see, e.g., Example 11). A variety of additional protocols and conditions for enhancing growth and/or protein expression during the production phase are known in the art.

[0271] The host cells can be cultured in a stirred tank bioreactor system in a fed batch culture process in which the host cells and culture medium are supplied to the bioreactor initially and additional culture nutrients are fed, continuously or in discrete increments, throughout the cell culture process. The fed batch culture process can be semi-continuous, wherein periodically whole culture (including cells and medium) is removed and replaced by fresh medium. Alternatively, a simple batch culture process can be used in which all components for cell culturing (including the cells and culture medium) are supplied to the culturing vessel at the start of the process. A continuous perfusion process can also be used, in which the cells are immobilized in the culture, e.g., by filtration, encapsulation, anchoring to microcarriers, or the like, and the supernatant is continuously removed from the culturing vessel and replaced with fresh medium during the process.

[0272] In one embodiment, after the production phase the immunogenic agent is recovered from the cell culture medium using various methods known in the art. For example, recovering a secreted heterologous protein typically involves removal of host cells and debris from the medium, for example, by centrifugation or filtration. In some cases, particularly if the immunogenic agent is a protein is not secreted, protein recovery can also be performed by lysing the cultured host cells, e.g., by mechanical shear, osmotic shock, or enzymatic treatment, to release the contents of the cells into the homogenate. The protein can then be separated from subcellular fragments, insoluble materials, and the like by differential centrifugation, filtration, affinity chromatography, hydrophobic interaction chromatography, ion-exchange chromatography, size exclusion chromatography, electrophoretic procedures (e.g., preparative isoelectric focusing (IEF)), ammonium sulfate precipitation, and the like. Procedures for recovering and purifying particular types of proteins are known in the art.

[0273] In some embodiments, it is desirable to adapt cells to serum free media and adapt adherent cells to cell growth in suspension. In some embodiments, cells are adapted to grow in serum-free medium. In one aspect of the invention, adaptation of cells is facilitated by increasing cell placisity by using a RNA effector molecule that targets genes involved in control of plasticity. For example, a RNA effector targeting cell cycle regulators (e.g., cyclin kinase and others described herein) (see, e.g., Table 13, that identifies example CHO cyclin kinase target genes and exemplary siRNAs (antisense strand)); histone and DNA methylases (see Tables 1-2, that identify example CHO target genes and exemplary siRNAs (anti-sense stand)); p53 (see Table 13, that identifies example CHO target genes and exemplary siRNAs (antisense strand); and stress response proteins for example, heat shock proteins (e.g., HSP90, etc.) (see Table 15, that identifies example CHO target genes and exemplary siRNAs (antisense strand)), and the like can be used. In one embodiment, a RNA effector targets a transcript that encodes transformation related protein p53 (CHO4957.1) comprising SEQ ID NO:4957. In one embodiment, the RNA effector molecule targeting p53 comprises at least 16 contiguous nucleotides (e.g., at least 17, at least 18, at least 19 nucleotides) of an oligonucleotide nucleotide having a sequence selected from the group consisting of SEQ ID NOs:1649857-1650157.

TABLE 2
Histone Deacetylase

| SEQ ID | | | Avg | siRNA |
|---|---|---|---|---|
| NO: | consL | Description | Cov | SEQ ID Nos: |
| 1754 | 2157 | histone deacetylase 6 | 10.782 | 567757-568119 |
| 1979 | 2085 | histone deacetylase 5 | 7.779 | 644628-644970 |
| 2337 | 1975 | histone deacetylase 1 | 59.419 | 765392-765715 |
| 2781 | 1861 | histone deacetylase 3 | 24.855 | 916015-916347 |
| 3049 | 1780 | histone deacetylase 7 | 2.965 | 1007551-1007926 |
| 3374 | 1701 | histone deacetylase 2 | 14.591 | 1118498-1118826 |
| 4712 | 1390 | histone deacetylase 4 | 1.236 | 1566324-1566700 |
| 5878 | 1129 | histone deacetylase 8 | 1.863 | 1972862-1973238 |

TABLE 3
Histone Demethylase

| SEQ | | | Avg | |
|---|---|---|---|---|
| ID NO: | consL | Description | Cov | siRNA SEQ ID NOs: |
| 8124 | 593 | jumonji C domain-containing histone | 0.097 | 2740320-2740607 |
| | | demethylase 1 homolog D (S. cerevisiae) | | |
| 3143 | 1759 | KDM1 lysine (K)-specific demethylase 6B | 0.901 | 1039895-1040219 |
| 3732 | 1616 | KDM3B lysine (K)-specific demethylase 3B | 1.408 | 1238921-1239289 |
| 1277 | 2344 | lysine (K)-specific demethylase 1 | 23.583 | 404752-404996 |
| 46 | 4190 | lysine (K)-specific demethylase 2A | 3.834 | 24130-24506 |
| 804 | 2588 | lysine (K)-specific demethylase 2B | 2.962 | 249009-249279 |
| 2238 | 2001 | lysine (K)-specific demethylase 3A | 2.287 | 731689-732019 |
| 5937 | 1116 | lysine (K)-specific demethylase 4A | 0.332 | 1994536-1994923 |
| 4730 | 1387 | lysine (K)-specific demethylase 4C | 0.743 | 1572325-1572714 |
| 3157560 | 3436 | lysine (K)-specific demethylase 5A | 0.649 | 3201397-3201496 |
| 4012 | 1547 | lysine (K)-specific demethylase 5B | 0.291 | 1332770-1333138 |
| 207 | 3330 | lysine (K)-specific demethylase 5C | 4.939 | 74541-74774 |

[0274] The terms “system”, “computing device”, and “computer-based system” refer to the computer hardware, associated software, and data storage devices used to analyze the information of the present invention. In one embodiment, the computer-based systems of the present invention comprises one or more central processing units (e.g., CPU, PAL, PLA, PGA), input means (e.g., keyboard, cursor control device, touch screen), output means (e.g., computer display, printer) and data storage devices (e.g., RAM, ROM, volatile and non-volatile memory devices, hard disk drives, network attached storage, optical storage devices, magnetic storage devices, solid state storage devices). As such, any convenient computer-based system can be employed in the present invention. Further, the computing device can included an embedded system based on a combination computing hardware and associated software or firmware.

[0275] A “processor” includes any hardware and/or software combination which can perform the functions under program control. For example, any processor herein can be a programmable digital microprocessor such as available in the form of an embedded system, a programmable controller, mainframe, server or personal computer (desktop or portable). Where the processor is selectively programmable, suitable programs, software or firmware can be communicated from a remote location to the processor, or previously saved in a computer program product (such as a portable or fixed computer readable storage medium, whether magnetic, optical or solid state device based). For example, a magnetic medium or optical disk can store the program or operating instructions and can be read and transferred to each processor at its corresponding station.

[0276] “Computer readable medium” as used herein refers to any storage or transmission medium that participates in providing instructions and/or data to a computer for execution and/or processing. Examples of storage media include floppy disks, magnetic media (tape, disk), UBS, optical media (CD-ROM, DVD, Blu-Ray), solid state media, a hard disk drive, a RAM, a ROM or integrated circuit, a magneto-optical disk, or a computer readable card such as a PCMCIA card and the like, whether or not such devices are internal or external to the computer. A file containing information can be “stored” on computer readable medium, where “storing” means recording information such that it is accessible and retrievable at a later date by a computer.

[0277] With respect to computer readable media, “permanent memory” or “non-volatile memory” refers to memory that is permanently stored on a data storage medium. Permanent memory is not erased by termination of the electrical supply to a computer or processor. A computer hard-drive, ROM, CD-ROM, floppy disk and DVD are all examples of permanent memory. Random Access Memory (RAM) is an example of non-permanent or volatile memory.

[0278] To “record” or “store” data, programming or other information on a computer readable medium refers to a process for storing information, using any convenient method. Any convenient data storage structure can be chosen, based on the means used to access the stored information.

[0279] A “memory” or “memory unit” refers to any device which can store information for subsequent retrieval by a processor, and can include magnetic or optical devices (such as a hard disk, floppy disk, CD, or DVD), or solid state memory devices (such as volatile or non-volatile RAM). A memory or memory unit can have more than one physical memory device of the same or different types (for example, a memory can have multiple memory devices such as multiple hard drives or multiple solid state memory devices or some combination of hard drives and solid state memory devices).

[0280] This application describes a variety of genes, transcripts, proteins, etc. using known names for the nucleic acid sequence. To the extent a specific sequence identifier is not cross-referenced to such a name, the artisan can readily do so by known means. For example, there are numerous searchable sites such as GeneCards.org (a collaborative searchable, integrated, database of human genes that provides concise genomic, transcriptomic, genetic, proteomic, functional and disease related information on all known and predicted human genes; database developed at the Crown Human Genome Center, Department of Molecular Genetics, the Weizmann Institute of Science), and publications that form the basis of such sites. One can readily use the name to locate the sequence and using such sequence cross-reference the Sequence No. used herein. Similarly, by looking for complementary sequences of at least 15 nucleic acids identify the corresponding siRNAs to such genes.

[0281] Throughout the specification, in some cases we have given the gene abbreviation or alias of the target gene and corresponding siRNA SEQ ID NOs for that gene. In some cases we have given the full gene name of the target gene, the corresponding SEQ ID NO. for the target gene (e.g., transcript sequence) as well as example siRNA SEQ ID NOs directed against the target gene. In various embodiments of the invention, the RNA effector molecule is a siRNA that comprises an antisense strand comprising at least 16 contiguous nucleotides of a siRNA nucleotide sequence of any of the siRNA sequences identified herein by SEQ ID NO., see, e.g., Tables 1-16, 21-25, 27-30, 31, 33, 35, 37, 39, 41, 43, 45, 47, 49, 50, 51-61, 64, 65 and 66.

[0282] It should be understood that the siRNAs identified by SEQ ID NO. are often referred to herein within a range of SEQ ID NOs, e.g., from SEQ ID NOs: 2480018-2480362. The range includes all SEQ ID NOs: within the range, e.g., SEQ ID NO: 2480018, SEQ ID NO:2480019, SEQ ID NO: 2480020, etc., all the way to SEQ ID NO: 2480362.

### II. ENHANCING BIOPROCESSING

[0283] The invention provides methods for enhancing the production of immunogenic agents using the RNA effector molecules described herein. The methods generally comprise contacting a cell with a RNA effector molecule, a portion of which is complementary to a target gene, and maintaining the cell in culture (e.g., a large-scale bioreactor) for a time sufficient to modulate expression of the target gene, wherein the modulation enhances production of the immunogenic agent from the cell, and isolating the immunogenic agent from the cell. The RNA effector molecule(s) can be added to the cell culture medium used to maintain the cells under conditions that permit production of an immunogenic agent, e.g., to provide transient modulation of the target gene thereby enhancing expression of the immunogen.

[0284] As known to those of skill in the art liposome mediated delivery of siRNA using lipid polynucleotide carriers is commonly used in research applications. As described in PCT publication WO 2009/012173, however, the use of lipid polynucleotide carriers, e.g., common liposome transfection reagents, has been found to be detrimental when used in bioprocessing of protein. Polynucleotide carriers have been reported to be toxic to host cells due to toxicity such that they impair the ability of host cells to produce the desired immunogenic agent on an industrial level. In addition, polynucleotide carriers have been observed to cause adverse and unwanted changes in the phenotype of host cells, e.g., CHO cells, compromising the ability of the host cells to produce the immunogenic agent of interest. Accordingly, the artisan would expect that the use of such polynucleotide carriers would hinder a cells ability to produce a desired protein.

[0285] Surprisingly, as described herein, RNA effector molecules (e.g., targeting BAX, BAK and/or LDH) can be delivered transiently to host cells in culture by using polynucleotide carriers (e.g., lipid formulated mediated delivery) during the bioprocessing procedure in large scale cultures (e.g., 1 L and 40 L) without detrimental effects on the cells, e.g., cell viability and density is maintained. Thus, large scale production of immunogenic agents can be done, on an industrial scale, using lipid reagents to facilitate RNA effector uptake in cells when they are in culture (e.g., suspension culture), for example, resulting in transient modulation of genes that increase protein production. It should be understood, however, that embodiments of the invention are not limited to delivery of RNA effector molecules by lipid formulation mediated delivery.

[0286] In one embodiment, the production of an immunogenic agent is enhanced by contacting cultured cells with a RNA effector molecule provided herein during the production phase to modulate expression of a target gene encoding a protein that affects protein expression, post-translational modification, folding, secretion, and/or other processes related to production and/or recovery of the immunogenic agent. In further embodiments, the production of an immunogenic agent is enhanced by contacting cultured cells with a RNA effector molecule that inhibits cell growth and/or cell division during the production phase.

[0287] In some embodiments, the production of an immunogenic agent in a cultured host cell is enhanced by contacting the cell with a RNA effector molecule which modulates expression of a protein of a contaminating virus, thus reducing the contaminant's infectivity and/or viral load in the host cell. In additional embodiments, production of an immunogenic agent in a cultured host cell is enhanced by contacting the cell with a RNA effector molecule which modulates expression of a host cell protein involved in viral infection, e.g., a cell membrane ligand, or viral reproduction, thus reducing the infectivity and/or load of contaminating viruses in the host cell.

[0288] In some embodiments, host cell target genes useful for modulation include those described in Table 1 as follows:

TABLE 1
Focused Immune Response Targets

| SEQ | | | Avg | siRNA SEQ |
|---|---|---|---|---|
| ID NO: | consL | Description | Cov | ID NOs: |
| 166 | 3461 | xenotropic and polytropic retrovirus receptor 1 | 0.95 | 62021-62362 |
| 680 | 2676 | polymerase (RNA) III (DNA directed) polypeptide E | 5.84 | 211082-211316 |
| 2455 | 1943 | host cell factor C1 | 2.096 | 805085-805458 |
| 2525 | 1927 | myxovirus (influenza virus) resistance 2 | 8.118 | 829145-829432 |
| 2543 | 1922 | beclin 1, autophagy related | 22.681 | 835365-835694 |
| 3179 | 1750 | polymerase (RNA) III (DNA directed) | 5.685 | 1052412-1052729 |
| | | polypeptide D | | |
| 3259 | 1732 | polymerase (RNA) III (DNA directed) polypeptide C | 15.023 | 1079448-1079786 |
| 3885 | 1577 | SWI/SNF related, matrix associated, actin dependent | 11.687 | 1290692-1291012 |
| | | regulator of chromatin, subfamily b, member 1 | | |
| 4201 | 1500 | eukaryotic translation initiation factor 2 α kinase 3 | 2.46 | 1396283-1396617 |
| 4256 | 1491 | polymerase (RNA) III (DNA directed) | 1.005 | 1414629-1414949 |
| | | polypeptide B | | |
| 4266 | 1488 | tumor susceptibility gene 101 | 23.4 | 1417992-1418306 |
| 4832 | 1362 | mitochondrial antiviral signaling protein | 1.615 | 1607184-1607527 |
| 5436 | 1229 | polymerase (RNA) III (DNA directed) | 0.45 | 1814931-1815240 |
| | | polypeptide F | | |
| 5608 | 1188 | caspase 12 | 0.856 | 1875252-1875646 |
| 5618 | 1187 | myeloid differentiation primary response gene 88 | 1.629 | 1878827-1879137 |
| 5799 | 1146 | lysosomal trafficking regulator | 0.206 | 1944185-1944541 |
| 5948 | 1114 | interferon regulatory factor 7 | 2.718 | 1998635-1999022 |
| 7260 | 823 | DEAD (Asp-Glu-Ala-Asp) box polypeptide 58 | 0.166 | 2454994-2455378 |
| 7439 | 778 | B-cell leukemia/lymphoma 2 | 0.149 | 2513854-2514170 |
| 7465 | 772 | zinc finger CCCH type, antiviral 1 | 0.346 | 2522447-2522771 |
| 7670 | 721 | myxovirus (influenza virus) resistance 1 | 0.687 | 2588615-2588951 |
| 7683 | 718 | toll-like receptor 3 | 0.226 | 2593179-2593525 |
| 7716 | 710 | polymerase (RNA) III (DNA directed) | 2.352 | 2604412-2604804 |
| | | polypeptide H | | |
| 7764 | 698 | polymerase (RNA) III (DNA directed) | 0.231 | 2620918-2621272 |
| | | polypeptide G | | |
| 7929 | 651 | interleukin 23, α subunit p19 | 0.852 | 2676772-2677097 |
| 8096 | 601 | barrier to autointegration factor 1 | 10.185 | 2731441-2731749 |
| 8245 | 562 | calcitonin gene-related peptide-receptor | 0.987 | 2778256-2778534 |
| | | component protein | | |
| 8318 | 541 | T-cell specific GTPase | 0.193 | 2802893-2803167 |
| 8531 | 490 | interleukin 15 | 1.901 | 2874576-2874952 |
| 9014 | 389 | polymerase (RNA) III (DNA directed) | 0.509 | 3021834-3022134 |
| | | polypeptide K | | |
| 9395 | 285 | 2′-5′ oligoadenylate synthetase 1B | 0.156 | 3108340-3108557 |
| 9402 | 282 | ISG15 ubiquitin-like modifier | 1.263 | 3109784-3109974 |
| 9724 | 148 | ATP-binding cassette, sub-family C | 0.096 | 3149990-3150001 |
| | | (CFTR/MRP), member 9 | | |
| 9741 | 139 | NLR family, pyrin domain containing 3 | 0.035 | 3150878-3150975 |
| 3157613 | 530 | radical S-adenosyl Met domain containing 2 | 0.148 | 3252217-3252316 |

[0289] In some embodiments, the enhancement of production of an immunogenic agent upon modulation of a target gene is detected by monitoring one or more measurable bioprocess parameters, such as a parameter selected from the group consisting of: cell density, pH, oxygen levels, glucose levels, lactic acid levels, temperature, and protein production. Protein production can be measured as specific productivity (SP) (the concentration of a product, such as a heterologously expressed polypeptide, in solution) and can be expressed as mg/L or g/L; in the alternative, specific productivity can be expressed as pg/cell/day. An increase in SP can refer to an absolute or relative increase in the concentration of a product produced under two defined set of conditions (e.g., when compared with controls not treated with RNA effector molecule(s)).

[0290] In some embodiments, the enhancement of production of an immunogenic agent, upon modulation of a target gene, is detected by monitoring one or more measurable bioprocess parameters, such as cell density, medium pH, oxygen levels, glucose levels, lactic acid levels, temperature, viral protein, or viral particle production. For example, protein production can be measured as specific productivity (SP) (the concentration of a product in solution) and can be expressed as mg/L or g/L; in the alternative, specific productivity can be expressed as pg/cell/day. An increase in SP can refer to an absolute or relative increase in the concentration of an immunogenic agent produced under two defined set of conditions. Alternatively, viral particle products can be titrated by well known plaque assays, measured as plaque forming units per mL (PFU/mL).

[0291] In some embodiments, RNA effector compositions include two or more RNA effector molecules, e.g., comprise two, three, four or more RNA effector molecules. In various embodiments, the two or more RNA effector molecules are capable of modulating expression of the same target gene and/or one or more additional target genes. Advantageously, certain compositions comprising multiple RNA effector molecules are more effective in enhancing production of an immunogenic agent, or one or more aspects of such production, than separate compositions comprising the individual RNA effector molecules.

[0292] In other embodiments, a plurality of different RNA effector molecules are contacted with the cell culture and permit modulation of one or more target genes. In one embodiment, at least one of the plurality of different RNA effector molecules is a RNA effector molecule that modulates expression of glutaminase, glutamine dehydrogenase, or LDH. In another embodiment, RNA effector molecules targeting Bax and Bak are co-administered to a cell culture during production of the immunogenic agent and can optionally contain at least one additional RNA effector molecule or agent. In another embodiment, a plurality of different RNA effector molecules is contacted with the cells in culture to permit modulation of Bax, Bak and LDH expression. In another embodiment, a plurality of different RNA effector molecules is contacted with the cells in culture to permit modulation of expression of Bax and Bak, as well as glutaminase and/or glutamine dehydrogenase.

[0293] When a plurality of different RNA effector molecules are used to modulate expression of one or more target genes the plurality of RNA effector molecules can be contacted with cells simultaneously or separately. In addition, each RNA effector molecule can have its own dosage regimen. For example, one can prepare a composition comprising a plurality of RNA effector molecules are contacted with a cell. Alternatively, one can administer one RNA effector molecule at a time to the cell culture. In this manner, one can easily tailor the average percent inhibition desired for each target gene by altering the frequency of administration of a particular RNA effector molecule. For example, strong inhibition (e.g., >80% inhibition) of lactate dehydrogenase (LDH) may not always be necessary to significantly improve production of an immunogenic agent and under some conditions it may be preferable to have some residual LDH activity. Thus, one may desire to contact a cell with a RNA effector molecule targeting LDH at a lower frequency (e.g., less often) or at a lower dosage (e.g., lower multiples over the IC₅₀) than the dosage for other RNA effector molecules. Contacting a cell with each RNA effector molecule separately can also prevent interactions between RNA effector molecules that can reduce efficiency of target gene modulation. For ease of use and to prevent potential contamination it may be preferred to administer a cocktail of different RNA effector molecules, thereby reducing the number of doses required and minimizing the chance of introducing a contaminant to the cell or cell culture.

[0294] In some embodiments, the production of an immunogenic agent is enhanced by contacting cultured cells with a RNA effector molecule provided herein during the growth phase to modulate expression of a target gene encoding a protein that affects cell growth, cell division, cell viability, apoptosis, nutrient handling, and/or other properties related to cell growth and/or division. In further embodiments, the production of a heterologous protein is enhanced by contacting cultured cells with a RNA effector molecule which transiently inhibits expression of the heterologous protein during the growth phase.

[0295] In yet further embodiments, the modulation of expression (e.g., inhibition) of a target gene by a RNA effector molecule can be alleviated by contacting the cell with second RNA effector molecule, wherein at least a portion of the second RNA effector molecule is complementary to a target gene encoding a protein that mediates RNAi in the host cell. For example, the modulation of expression of a target gene can be alleviated by contacting the cell with a RNA effector molecule that inhibits expression of an argonaute protein (e.g., Argonaute-2) or other component of the RNAi pathway of the cell. In one embodiment, the immunogenic agent is a recombinant protein and expression of the product is transiently inhibited by contacting the cell with a first RNA effector molecule targeted to the transgene encoding the immunogenic agent. The inhibition of expression of the immunogenic agent is then alleviated by contacting the host cell with a second RNA effector molecule targeted against a gene encoding a protein of the RNAi pathway of the cell.

[0296] Host Cell Immune Response

[0297] In additional embodiments, production of an immunogenic agent in a host cell is further enhanced by introducing a RNA effector molecule that modulates expression of a host cell protein involved in microbial infection or replication such that the infectivity, load, and/or production of the immunogenic agent is increased. Modulating a host cell immune response can also be beneficial in the production of certain immunogenic agents that are themselves involved in modulating the immune response (e.g., influenza and the like).

[0298] For example, several human, mammalian and avian viruses are introduced into and/or cultivated in cells for either virus production or heterologous protein expression (e.g., ultimately for vaccine production). Infection or transfection results in the accumulation of an immunogenic agent, such as live virus particles, which can be collected from either cells or cell media after a suitable incubation period. For example, the standard method of vaccine production consists of culturing cells, infecting with a live virus (e.g., rotavirus, influenza, yellow fever), incubation, harvesting of cells or cell media, downstream processing, and filling and finishing. For the classic inactived influenza vaccine, purification, inactivation, and stabilization of this harvested immunogenic agent yields vaccine product, which techniques are well known in the art.

[0299] Recombinant DNA technology and genetic engineering techniques, in theory, can afford a superior approach to producing an attenuated virus because specific mutations are deliberately engineered into the viral genome. The genetic alterations required for attenuation of viruses are not always predictable, however. In general, the attempts to use recombinant DNA technology to engineer viral vaccines have been directed to the production of subunit vaccines which contain only the protein subunits of the pathogen involved in the immune response, expressed in recombinant viral vectors such as vaccinia virus or baculovirus. More recently, recombinant DNA techniques have been utilized to produce herpes virus deletion mutants or polioviruses that mimic attenuated viruses found in nature or known host range mutants.

[0300] The yield of an immunogenic agent, such as an attenuated live influenza virus or an immunomodulatory polypeptide, made in a host cell can be adversely affected by the immune response of the host cell, e.g., the interferon response of the host cell in which the virus or viral vector is replicated. Additionally, the infected host cell(s) can become apoptotic before viral yield is maximized. Thus, although these attenuated viruses are immunogenic and non-pathogenic, they are often difficult to propagate in conventional cell substrates for the purposes of making vaccines. Hence, some embodiments of the present invention provide for compositions and methods using a RNA effector molecules to modulate the expression of adverse host cell responses and therefore increase yield. For example, some embodiments of the present invention relate to contacting a cell with a RNAi-based product siRNA prior to, during or after the viral or vector administration, to inhibit cellular and anti-viral processes that compromise the yield and quality of the product harvest.

[0301] The use of cell-based bioprocesses for the manufacture of immunogenic agents is enhanced, in some embodiments, by modulating expression of a target gene affecting the host cell's reaction to viral infection. This approach is useful where the immunogenic agent is viral or otherwise immunomodulatory, or where viral vectors are used to introduce heterologous proteins into the host cell.

[0302] For example, in some embodiments the target gene is a cell interferon protein or a protein associated with interferon signaling. In particular, the gene can be an interferon gene such as IFN-α(e.g., Gallus IFN-α, GeneID: 396398); IFN-β (e.g., Gallus IFN-β, GeneID: 554219); or IFN-γ (e.g., Gallus IFN-γ, GeneID: 396054). Thus, for example, IFN-β expression can be modulated by use of corresponding RNA effector molecule having an antisense strand comprising at least 16 contiguous nucleotides (e.g., at least 17, at least 18, at least 19 nucleotides) of an oligonucleotide nucleotide having a sequence selected from the group consisting of SEQ ID NOs:3156155-3156180 (Gallus, sense), SEQ ID NOs:3156181-3156206 (Gallus, antisense), SEQ ID NOs:3155493-3155540 (Canis, sense), SEQ ID NOs:3155445-3155492 (Canis, antisense), depending on the cultured cell.

[0303] Alternatively, the target gene can be an interferon receptor such as IFNAR1 (interferon α, β and ω receptor 1) (e.g., Gallus IFNAR1, GeneID: 395665), IFNAR2 (interferon α, β and ω receptor 2) (e.g., Gallus IFNAR2, GeneID: 395664), IFNGR1 (interferon γ receptor 1) (e.g., Gallus IFNGR1, GeneID: 421685) or IFNGR2 (interferon γ receptor 2 (interferon γ transducer 1)) (e.g., Gallus IFNGR2, GeneID: 418502). Thus, for example, IFNAR1 expression can be modulated by use of corresponding RNA effector molecule having an antisense strand comprising at least 16 contiguous nucleotides (e.g., at least 17, at least 18, at least 19 nucleotides) of an oligonucleotide nucleotide having a sequence selected from the group consisting of SEQ ID NOs:2436536-2436863 (CHO cell, antisense), SEQ ID NOs:3154605-3154633 (Gallus, sense), SEQ ID NOs:3154634-3154662 (Gallus, antisense), SEQ ID NOs:3155397-3155444 (Canis, sense), SEQ ID NOs:3155445-3155492 (Canis, antisense), depending on the cultured cell.

[0304] In some embodiments, the gene can be associated with interferon signaling such as STAT-1 (signal transducer and activator of transcription 1) (e.g., Gallus Stat1, GeneID: 424044), STAT-2, STAT-3 (e.g., Gallus Stat3, GeneID:420027), STAT-4 (e.g., Gallus Stat4, GeneID: 768406), STAT-5 (e.g., Gallus Stat5, GeneID: 395556; JAK-1 (Janus kinase 1) (e.g., Gallus Jak1, GeneID: 395681; JAK-2 (e.g., Gallus Jak2, GeneID: 374199), JAK-3 (e.g., Gallus Jak3, GeneID: 395845), IRF1 (interferon regulatory factor 1) (e.g., Gallus IRF1, GeneID: 396384), IRF2 (e.g., Gallus GeneID: 396115), IRF3, IRF4 (e.g., Gallus GeneID: 374179), IRF5 (e.g., Gallus GeneID: 430409), IRF6 (e.g., Gallus GeneID: 419863), IRF7 (e.g., Gallus GeneID: 396330), IRF8 (e.g., Gallus GeneID:396385), IRF 9, or IRF10 (e.g., Gallus GeneID: 395243).

[0305] Thus, for example, IRF3 expression can be modulated by use of corresponding RNA effector molecule having an antisense strand comprising at least 16 contiguous nucleotides (e.g., at least 17, at least 18, at least 19 nucleotides) of an oligonucleotide nucleotide having a sequence selected from the group consisting of SEQ ID NOs:1430473-1430786 (CHO cell, antisense), SEQ ID NOs:3288948-3289249 (Gallus, sense), SEQ ID NOs:3289250-3289551 (Gallus, antisense), SEQ ID NOs:3290142-3290445 (Canis, sense), SEQ ID NOs:320446-320749 (Canis, antisense), depending on the cultured cell.

[0306] Similarly, the target gene can encode an interferon-induced protein such as 2′,5′ oligoadenylate synthetases (2-50AS); an interferon-induced antiviral protein; RNaseL (ribonuclease L (2′,5′-oligoisoadenylate synthetase-dependent) (e.g., Gallus GeneID: 424410 (Silverman et al., 14 J. Interferon Res. 101-04 (1994)); dsRNA-dependent protein kinase (PKR) aka: eukaryotic translation initiation factor 2-α kinase 2 (EIF2AK2) (Li et al., 106 PNAS 16410-05 (2009)); Mx (MX1 myxovirus (influenza virus) resistance 1, interferon-inducible protein p78) (e.g., Gallus MX, GeneID: 395313; Haller et al., 9 Microbes Infect. 1636-43 (2007)); IFITM1, IFITM2, IFITM3 (Brass et al., 139 Cell 1243-54 (2009)); Proinflammatory cytokines; MYD88 (myeloid differentiation primary response gene) up-regulated upon viral challenge (e.g., Gallus Myd88, GeneID: 420420); or TRIF (toll-like receptor adaptor molecule 1) (e.g., Gallus TRIF, GeneID: 100008585), Hghighi et al., Clin. Vacc. Immunol. (Jan. 13, 2010).

[0307] Thus, for example, MX1 expression can be modulated by use of corresponding RNA effector molecule having an antisense strand comprising at least 16 contiguous nucleotides (e.g., at least 17, at least 18, at least 19 nucleotides) of an oligonucleotide nucleotide having a sequence selected from the group consisting of SEQ ID NOs:2588615-2588951 (CHO cell, antisense), SEQ ID NOs:326682-3286975 (Gallus, sense), SEQ ID NOs:3286976-3287269 (Gallus, antisense), SEQ ID NOs:3286132-3286406 (Canis, sense), SEQ ID NOs:3286407-3286681 (Canis, antisense), depending on the cultured cell.

[0308] Also, for example IFTM1 expression can be modulated by use of corresponding RNA effector molecule having an oligonucleotide strand comprising at least 16 contiguous nucleotides (e.g., at least 17, at least 18, at least 19 nucleotides) of an oligonucleotide nucleotide having a sequence selected from the group consisting of SEQ ID NOs:3155115-3155161 (Canis, sense), SEQ ID NOs:3155162-3155208 (Canis, antisense).

[0309] Additionally, IFITM2 expression can be modulated by use of corresponding RNA effector molecule having an oligonucleotide strand comprising at least 16 contiguous nucleotides (e.g., at least 17, at least 18, at least 19 nucleotides) of an oligonucleotide nucleotide having a sequence selected from the group consisting of SEQ ID NOs:3156587-3156633 (CHO cell, sense), SEQ ID NOs:3156634-3156680 (CHO cell, antisense), SEQ ID NOs:2685171-2685550 (CHO cell, antisense), SEQ ID NOs:3155209-3155255 (Canis, sense), SEQ ID NOs:3155256-3155302 (Canis, antisense), depending on the cultured cell.

[0310] Likewise, IFITM3 expression can be modulated by use of corresponding RNA effector molecule having an antisense strand comprising at least 16 contiguous nucleotides (e.g., at least 17, at least 18, at least 19 nucleotides) of an oligonucleotide having a sequence selected from the group consisting of SEQ ID NOs:3156681-3156727 (CHO cell, sense), SEQ ID NOs:3156728-3156774 (CHO cell, antisense), SEQ ID NOs:2696169-2696546 (CHO cell, antisense), SEQ ID NOs:3155303-3155349 (Canis, sense), SEQ ID NOs:3155350-3155350 (Canis, antisense), depending on the cultured cell.

[0311] Further regarding example interferon-induced expression, PKR (EIF2AK2) expression can be modulated by use of corresponding RNA effector molecule having an antisense strand comprising at least 16 contiguous nucleotides (e.g., at least 17, at least 18, at least 19 nucleotides) of an oligonucleotide nucleotide having a sequence selected from Tables 67 and 68, as follows:

TABLE 67
Example target PKR (EIF2AK2) oligonucletides

| Gallus PKR Sense | Gallus PKR Antisense |
|---|---|
| CCACUGAGUGAUUCAGCCU | AGGCUGAAUCACUCAGUGG |
| GGUACAGGCGUUGGUAAGA | UCUUACCAACGCCUGUACC |
| CAGGCGUUGGUAAGAGUAA | UUACUCUUACCAACGCCUG |
| GAAUGUGCAUACUUCGGAU | AUCCGAAGUAUGCACAUUC |
| CAUACUUCGGAUGUAGUGA | UCACUACAUCCGAAGUAUG |
| GACAUUGCAGCUAGUUGAU | AUCAACUAGCUGCAAUGUC |
| CAUUGCAGCUAGUUGAUUA | UAAUCAACUAGCUGCAAUG |
| CCACGCUCCAAUGUAUUCU | AGAAUACAUUGGAGCGUGG |
| GUAAUUAGUGGUCAUGUAU | AUACAUGACCACUAAUUAC |
| CAUGAACUCAGUAAUUCCU | AGGAAUUACUGAGUUCAUG |
| GAGUCAUGGGGUAUUACCU | AGGUAAUACCCCAUGACUC |
| GGUAUUACCUUUAAAGACU | AGUCUUUAAAGGUAAUACC |
| GAAAGACAUGUCCCUAUCU | AGAUAGGGACAUGUCUUUC |
| GAGCCUUCAAAUUGUCGGA | UCCGACAAUUUGAAGGCUC |
| GAGUAUUGGCACCUAAUUU | AAAUUAGGUGCCAAUACUC |
| GGUUUCGUCAGCAGUAUAA | UUAUACUGCUGACGAAACC |
| CUAUGCAAUCAAACGAGUU | AACUCGUUUGAUUGCAUAG |
| GUUAAUAAAUAGGAACGUA | UACGUUCCUAUUUAUUAAC |
| GCUCGCGAAUCUUGAACAU | AUGUUCAAGAUUCGCGAGC |
| CGCGAAUCUUGAACAUGAA | UUCAUGUUCAAGAUUCGCG |
| GAAUUCUAUCGUAGCUGUU | AACAGCUACGAUAGAAUUC |
| GAAUAUAUUCCUAUCAUAU | AUAUGAUAGGAAUAUAUUC |
| CUUUGGUCUCGUGACUUCU | AGAAGUCACGAGACCAAAG |
| CCCUCUGACUAAGAACCGA | UCGGUUCUUAGUCAGAGGG |
| GAGGAACACAGUCAUAUAU | AUAUAUGACUGUGUUCCUC |
| GAUAUGGAAAGGAAGUAGA | UCUACUUCCUUUCCAUAUC |
| GGUAUGGCAGGAUGUUAGA | UCUAACAUCCUGCCAUACC |
| CCAGGUACCCAUAAUCAAA | UUUGAUUAUGGGUACCUGG |
| GACAACUCGCAUAAAGCUU | AAGCUUUAUGCGAGUUGUC |
| CACUUCUUUUAGGUGAACU | AGUUCACCUAAAAGAAGUG |
| CCUUAAGUAUUUAGCUUUU | AAAAGCUAAAUACUUAAGG |
| GUUCUUCCUUAUAGGAACA | UGUUCCUAUAAGGAAGAAC |
| CAGGUAGGGUCCUCUUAAU | AUUAAGAGGACCCUACCUG |
| GUAGGGUCCUCUUAAUACA | UGUAUUAAGAGGACCCUAC |
| CUCCUAUACAGUACGGUUU | AAACCGUACUGUAUAGGAG |
| CUAUACAGUACGGUUUUAA | UUAAAACCGUACUGUAUAG |
| GUACGGUUUUAAUCGCCUA | UAGGCGAUUAAAACCGUAC |
| GGUUUUAAUCGCCUAUUAU | AUAAUAGGCGAUUAAAACC |
| GAUUAUAGGUGUACCUGAA | UUCAGGUACACCUAUAAUC |
| GUCAGCUCAACAUAAGGUA | UACCUUAUGUUGAGCUGAC |
| CUGAUUGACCGUUACUCUU | AAGAGUAACGGUCAAUCAG |
| GACCGUUACUCUUUGGUUA | UAACCAAAGAGUAACGGUC |
| CGUUACUCUUUGGUUAUAU | AUAUAACCAAAGAGUAACG |
| GGUUAUAUACUUAAGAGAU | AUCUCUUAAGUAUAUAACC |
| CUUAAGAGAUUUCUCGUUU | AAACGAGAAAUCUCUUAAG |
| GAUUUCUCGUUUGACUAAA | UUUAGUCAAACGAGAAAUC |
| CUCGUUUGACUAAAUAAGA | UCUUAUUUAGUCAAACGAG |

TABLE 68
Example target PKR (EIF2AK2) oligonucletides

| Canis PKR Sense | Canis PKR Antisense |
|---|---|
| CAGAAAGGUACUUAAGUAU | AUACUUAAGUACCUUUCUG |
| AGAAAGGUACUUAAGUAUA | UAUACUUAAGUACCUUUCU |
| AAAGGUACUUAAGUAUAAU | AUUAUACUUAAGUACCUUU |
| UACUUAAGUAUAAUGAACU | AGUUCAUUAUACUUAAGUA |
| AAGUAUAAUGAACUGUCUA | UAGACAGUUCAUUAUACUU |
| GGACCUGCACAUAACUUAA | UUAAGUUAUGUGCAGGUCC |
| ACUUAAGAUUUACAUUCCA | UGGAAUGUAAAUCUUAAGU |
| AGCCAAAUUAGCUCUUGAA | UUCAAGAGCUAAUUUGGCU |
| AAACAAGGCGGUUAGUUCU | AGAACUAACCGCCUUGUUU |
| UUAGAAGGCGUUGGGAAUU | AAUUCCCAACGCCUUCUAA |
| UAGAAGGCGUUGGGAAUUA | UAAUUCCCAACGCCUUCUA |
| AUUACAUAGGCCGUAUGAA | UUCAUACGGCCUAUGUAAU |
| UUACAUAGGCCGUAUGAAU | AUUCAUACGGCCUAUGUAA |
| UACAUAGGCCGUAUGAAUA | UAUUCAUACGGCCUAUGUA |
| GAAGGAACAACUAUCUGUA | UACAGAUAGUUGUUCCUUC |
| AGAAAGAUUUCAUUGCAGA | UCUGCAAUGAAAUCUUUCU |
| ACAUUUGGCUGCUAAAUUU | AAAUUUAGCAGCCAAAUGU |
| UUGCAUAUGAACAGAUACA | UGUAUCUGUUCAUAUGCAA |
| AUUGUAACAGGGACAAUGU | ACAUUGUCCCUGUUACAAU |
| CUCUGAGCAAUGCCAGAUA | UAUCUGGCAUUGCUCAGAG |
| ACACAGUGGAACUCAGGUU | AACCUGAGUUCCACUGUGU |
| GAAAUAGAACCAAUUGGCU | AGCCAAUUGGUUCUAUUUC |
| AAUAGAACCAAUUGGCUCA | UGAGCCAAUUGGUUCUAUU |
| GCUCAGGUGGAUAUGGUCA | UGACCAUAUCCACCUGAGC |
| GAUUUAUGUUAUUAAACGU | ACGUUUAAUAACAUAAAUC |
| UUUAUGUUAUUAAACGUGU | ACACGUUUAAUAACAUAAA |
| UAUGUUAUUAAACGUGUUA | UAACACGUUUAAUAACAUA |
| AUGUUAUUAAACGUGUUAA | UUAACACGUUUAAUAACAU |
| UGUUAUUAAACGUGUUAAA | UUUAACACGUUUAAUAACA |
| AAGGUAGAACGGGAAGUAA | UUACUUCCCGUUCUACCUU |
| AGCGCUUGAUCACGUAAAU | AUUUACGUGAUCAAGCGCU |
| GCGCUUGAUCACGUAAAUA | UAUUUACGUGAUCAAGCGC |
| CGCUUGAUCACGUAAAUAU | AUAUUUACGUGAUCAAGCG |
| AUCACGUAAAUAUCGUGCA | UGCACGAUAUUUACGUGAU |
| UAUCGUGCACUACCGUAGU | ACUACGGUAGUGCACGAUA |
| CCUUCAAGAACAACUAAGU | ACUUAGUUGUUCUUGAAGG |
| UCUGUGAUAAAGGAACAUU | AAUGUUCCUUUAUCACAGA |
| CAUUGGAGCAAUGGAUUGA | UCAAUCCAUUGCUCCAAUG |
| GGCUAAUUCUUGCAGAACU | AGUUCUGCAAGAAUUAGCC |
| UACAUAUGUCCCACUGUUU | AAACAGUGGGACAUAUGUA |
| CUAAGGGCUGGCAAGUUCU | AGAACUUGCCAGCCCUUAG |
| ACUUGAGCCCAUGAAACGA | UCGUUUCAUGGGCUCAAGU |
| GCCCAUGAAACGACCUAAU | AUUAGGUCGUUUCAUGGGC |
| CAUGAAACGACCUAAUGCA | UGCAUUAGGUCGUUUCAUG |
| GAAACGACCUAAUGCAUCU | AGAUGCAUUAGGUCGUUUC |
| AUAUUAGAGCCCUUCUAAA | UUUAGAAGGGCUCUAAUAU |
| UCUUCUAGGGUAUUUACCU | AGGUAAAUACCCUAGAAGA |

[0312] In another embodiment, the immunogenic agent is produced by a cell transfected with one or more retroviral vectors. Upon transfection with a first retroviral vector, expression of the retroviral vector Env and/or Gag molecule is transiently inhibited by contacting the cell with a first RNA effector molecule (i.e., targeting the env gene or gag gene), allowing more efficient transfection with a second retroviral vector. For example, a first retroviral vector can encode a first peptide and a second retroviral vector can encode a second peptide (such that the recombinant immunogenic agent contains both peptides). Additionally, the inhibition of expression can be alleviated by introducing into the cell an additionally RNA effector molecule targeted against a gene encoding a protein of the RNAi pathway.

[0313] In some embodiments, the target gene is a regulatory element or gene of an endogenous retrovirus (ERV) of the cell. For example, in particular embodiments the target gene can encode an ERV LTR, env protein, or gag protein. In some embodiments, the target gene is a gene of a latent virus such as a herpesvirus, adenovirus, vesivirus, or circovirus. In particular embodiments, for example, the target gene can encode a polypeptide or protein, such as a latent HSV glycoprotein D or PCV-1 Rep protein (described elsewhere herein). Provided herein in Table 64 are exemplary RNA effector molecules for targeting PCV-1:

TABLE 64
Duplexes targeting PCV-1 with modified nucleotides

| Duplex | | |
|---|---|---|
| No | Sense | Antisense |
| 1 | uAGAAAuAAGuGGuGGGAudTsdT | AAcACCcACCUCUuAUGGGdTsdT |
| 2 | AAuAAGuGGuGGGAuGGAudTsdT | uAAGGGUGAAcACCcACCUdTsdT |
| 3 | AuAAGuGGuGGGAuGGAuAdTsdT | UuAAGGGUGAAcACCcACCdTsdT |
| 4 | uAAGuGGuGGGAuGGAuAudTsdT | AUuAAGGGUGAAcACCcACdTsdT |
| 5 | GuGGuGGGAuGGAuAucAudTsdT | uAUuAAGGGUGAAcACCcAdTsdT |
| 6 | GGAuGGAuAucAuGGAGAAdTsdT | UuAUuAAGGGUGAAcACCCdTsdT |
| 7 | uGGAuAucAuGGAGAAGAAdTsdT | AAGCUCCCGuAUUUUGUUUdTsdT |
| 8 | AuAucAuGGAGAAGAAGuudTsdT | AAGGGAGAUUGGAAGCUCCdTsdT |
| 9 | ucAuGGAGAAGAAGuuGuudTsdT | UUCCUCUCCGcAAAcAAAAdTsdT |
| 10 | uGGAGAAGAAGuuGuuGuudTsdT | AAACCUUCCUCUCCGcAAAdTsdT |
| 11 | GGAGAAGAAGuuGuuGuuudTsdT | UUCcAAACCUUCCUCUCCGdTsdT |
| 12 | GAGAAGAAGuuGuuGuuuudTsdT | uACCCUCUUCcAAACCUUCdTsdT |
| 13 | AGAAGuuGuuGuuuuGGAudTsdT | UUCuACCCUCUUCcAAACCdTsdT |
| 14 | AGuuGuuGuuuuGGAuGAudTsdT | AAUUCGcAAACCCCUGGAGdTsdT |
| 15 | GuuGuuGuuuuGGAuGAuudTsdT | AAAUUCGcAAACCCCUGGAdTsdT |
| 16 | uuuuAuGGcuGGuuAccuudTsdT | uAGcAAAAUUCGcAAACCCdTsdT |
| 17 | uGGcuGGuuAccuuGGGAudTsdT | UUCUuAGcAAAAUUCGcAAdTsdT |
| 18 | cuGGuuAccuuGGGAuGAudTsdT | AAGUCUGCUUCUuAGcAAAdTsdT |
| 19 | GAGAcuGuGuGAccGGuAudTsdT | AAAGUCUGCUUCUuAGcAAdTsdT |
| 20 | cuGuGuGAccGGuAuccAudTsdT | AAAAGUCUGCUUCUuAGcAdTsdT |
| 21 | uGuGuGAccGGuAuccAuudTsdT | uAAAAGUCUGCUUCUuAGCdTsdT |
| 22 | ccGGuAuccAuuGAcuGuAdTsdT | UuAAAAGUCUGCUUCUuAGdTsdT |
| 23 | ccAuuGAcuGuAGAGAcuAdTsdT | UUcACCUUGUuAAAAGUCUdTsdT |
| 24 | GuAuuuuGAuuAccAGcAAdTsdT | uACcACUUcACCUUGUuAAdTsdT |
| 25 | uAuuuuGAuuAccAGcAAudTsdT | AuACcACUUcACCUUGUuAdTsdT |
| 26 | cAGGAAuGGuAcuccucAAdTsdT | AAuACcACUUcACCUUGUUdTsdT |
| 27 | cAGcuGuAGAAGcucucuAdTsdT | AAAuACcACUUcACCUUGUdTsdT |
| 28 | AGcuGuAGAAGcucucuAudTsdT | UUCGCUUUCUCGAUGUGGCdTsdT |
| 29 | uAucGGAGGAuuAcuAcuudTsdT | UUCCUUUCGCUUUCUCGAUdTsdT |
| 30 | AucGGAGGAuuAcuAcuuudTsdT | UuAUUCUGCUGGUCGGUUCdTsdT |
| 31 | GAGGAuuAcuAcuuuGcAAdTsdT | UUCUUuAUUCUGCUGGUCGdTsdT |
| 32 | AGGAuuAcuAcuuuGcAAudTsdT | uACUGcAGuAUUCUUuAUUdTsdT |
| 33 | cuAcuuuGcAAuuuuGGAAdTsdT | UuACUGcAGuAUUCUUuAUdTsdT |
| 34 | uuGGAAGAcuGcuGGAGAAdTsdT | UUuACUGcAGuAUUCUUuAdTsdT |
| 35 | AAGAcuGcuGGAGAAcAAudTsdT | AUGUGGCCUUCUUuACUGCdTsdT |
| 36 | AGAAcAAuccAcGGAGGuAdTsdT | uAUGUGGCCUUCUUuACUGdTsdT |
| 37 | AcccGAAGGccGAuuuGAAdTsdT | AAGuAUGUGGCCUUCUUuAdTsdT |
| 38 | uGcccuuuucccAuAuAAAdTsdT | uAAGuAUGUGGCCUUCUUUdTsdT |

[0314] In some embodiments, the target gene is an endogenous non-ERV gene. For example, the target gene can encode the immunogenic agent, or a portion thereof, when the immunogenic agent is a polypeptide.

[0315] Production of an immunogenic agent can also be enhanced by reducing the expression of a protein that binds to the immunogenic agent or its vector. For example, in producing a recombinant protein it can be advantageous to reduce or inhibit expression of a receptor/ligand produced by an ERV, so that its expression in the host cell does not inhibit super-infection by the recombinant vector. It is known to a skilled artisan that a receptor can be a cell surface receptor or an internal (e.g., nuclear) receptor. The expression of the binding partner can be modulated by contacting the host cell with a RNA effector molecule directed at the receptor gene according to methods described herein.

[0316] In additional embodiments, the target gene is a cell protein that mediates viral infectivity, such as TLR3 that detects dsRNA (e.g., Gallus TLR3, GeneID: 422720), TLR7 that detects ssRNA (e.g., Gallus TLR7, GeneID: 418638), TLR21, that recognizes unmethylated DNA with CpG motifs (e.g., Gallus T1r3, GeneID: 415623), RIG-1 involved with viral sensing (Myong et al., 323 Science 1070-74 (2009)); LPGP2 and other RIG-1-like receptors, which are positive regulators of viral sensing (Satoh et al., 107 PNAS 1261-62 (2010); Nakhaei et al., 2009); TRIM25 (e.g., Gallus Trim25, GeneID: 417401; Gack et al., 5 Cell Host Microb. 439-49 (2009)); or MAVS/VISA/IPS-1/Gardif (MAVS), which interacts with RIG-1 to initiate an antiviral signaling cascade (see Cui et al., 29 Mol. Cell. 169-79 (2008); Kawai et al., 6 Nat. Immunol. 981-88 (2005)).

[0317] Thus, for example, TLR3 expression can be modulated by use of corresponding RNA effector molecule(s) having an antisense strand comprising at least 16 contiguous nucleotides (e.g., at least 17, at least 18, at least 19 nucleotides) of an oligonucleotide nucleotide having a sequence selected from the group consisting of SEQ ID NOs:3156491-3156538 (CHO cell, sense), SEQ ID NOs:3156539-3156586 (CHO cell, antisense), SEQ ID NOs:2593179-2593525 (CHO cell, antisense), SEQ ID NOs:3155965-3156011 (Gallus, sense), SEQ ID NOs:3156012-3156058 (Gallus, antisense), SEQ ID NOs:315777-3155823 (Canis, sense) and SEQ ID NOs:3155824-3155870 (Canis, antisense), depending on the cultured cell.

[0318] Additionally, for example, MAVS expression can be modulated by use of corresponding RNA effector molecule(s) having an antisense strand comprising at least 16 contiguous nucleotides (e.g., at least 17, at least 18, at least 19 nucleotides) of an oligonucleotide nucleotide having a sequence selected from the group consisting of SEQ ID NOs:3156397-3156443 (CHO cell, sense), SEQ ID NOs:3156444-3156490 (CHO cell, antisense), SEQ ID NOs:1607184-1607527 (CHO cell, antisense), SEQ ID NOs:3286682-3286975 (Gallus, sense), SEQ ID NOs:3286976-3287269 (Gallus, antisense), SEQ ID NOs:3286132-3286406 (Canis, sense) and SEQ ID NOs:3286407-3286681 (Canis, antisense), depending on the cultured cell.

[0319] There are host cell proteins that impact viral replication in a specific fashion, yet the exact mechanisms for this activity is unresolved. For example, the suppression of the cellular protein casein kinase 2β (CSKN2B) increases influenza replication, protein production and viral titer. Marjuki et al., 3 J. Mol. Signal. 13 (2008). CSKN2B expression can be modulated by use of corresponding RNA effector molecule having an antisense strand comprising at least 16 contiguous nucleotides (e.g., at least 17, at least 18, at least 19 nucleotides) of an oligonucleotide nucleotide having a sequence selected from the group consisting of SEQ ID NOs:2634978-2635358 (CHO cell, antisense), SEQ ID NOs:3289552-3289846 (Gallus, sense), SEQ ID NOs:3289847-3290141 (Gallus, antisense), SEQ ID NOs:3288368-3288657 (Canis, sense), SEQ ID NOs:3288658-3288947 (Canis, antisense), depending on the cultured cell.

[0320] A composition, in alternative embodiments, can comprise one or more RNA effector molecules capable of modulating expression of one or multiple genes relating to a common biological process or property of the cell, for example the interferon signaling pathway including IFN, STAT proteins or other proteins in the JAK-STAT signaling pathway, IFNRA1 and/or IFNRA2. For example, viral infection results in swift innate response in infected cells against potential lytic infection, transformation and/or apoptosis, which is characterized by the production of IFNα and IFNβ. This signaling results in activation of IFN-stimulated genes (ISGs) that mediate the effects of IFN. IFN regulatory factor (IRFs) are family of nine cellular factors that bind to consensus IFN-stimulated response elements (ISREs) and induce other ISGs. See Kirshner et al., 79 J. Virol. 9320-24 (2005). The IFNs increase the expression of intrinsic proteins including TRIM5α, Fv, Mx1, eIF2α and 2′-5′ OAS, and induce apoptosis of virus-infected cells and cellular resistance to viral infection. Koyam et al., 43 Cytokine 336-41 (2008). Hence, a particular embodiment provides for a RNA effector molecule that targets a IFNRA1 gene. Other embodiments target one or more genes in the IFN signaling pathway.

[0321] Inhibition of IFN signaling responses can be determined by measuring the phosphorylated state of components of the IFN pathway following viral infection, e.g., IRF-3, which is phosphorylated in response to viral dsRNA. In response to type I IFN, Jak1 kinase and TyK2 kinase, subunits of the IFN receptor, STAT1, and STAT2 are rapidly tyrosine phosphorylated. Thus, in order to determine whether the RNA effector molecule inhibits IFN responses, cells can be contacted with the RNA effector molecule, and following viral infection, the cells are lysed. IFN pathway components, such as Jak1 kinase or TyK2 kinase, are immunoprecipitated from the infected cell lysates, using specific polyclonal sera or antibodies, and the tyrosine phosphorylated state of the kinase determined by immunoblot assays with an anti-phosphotyrosine antibody. See, e.g., Krishnan et al., 247 Eur. J. Biochem. 298-305 (1997). A decreased phosphorylated state of any of the components of the IFN pathway following infection with the virus indicates decreased IFN responses by the virus in response to the RNA effector molecule(s).

[0322] Efficacy of IFN signaling inhibition can also be determined by measuring the ability to bind specific DNA sequences or the translocation of transcription factors induced in response to viral infection, and RNA effector molecule treatment, e.g., targeting IRF3, STAT1, STAT2, etc. In particular, STAT 1 and STAT2 are phosphorylated and translocated from the cytoplasm to the nucleus in response to type I IFN. The ability to bind specific DNA sequences or the translocation of transcription factors can be measured by techniques known to skilled artisan, e.g., electromobility gel shift assays, cell staining, etc. Another approach to measuring inhibition of IFN induction determines whether an extract from the cell culture producing the desired viral product and contacted with a RNA effector molecule is capable of conferring protective activity against viral infection. More specifically, for example, cells are infected with the desired virus and contacted with a RNA effector. Approximately 15 to 20 hours post-infection, the cells or cell media are harvested and assayed for viral titer, or by quantitative product-enhanced reverse transcriptase (PERT) assay, immune assays, or in vivo challenge.

[0323] Host Cell Receptors

[0324] In some embodiments, the target gene is a host cell gene (endogenous) that encodes or is involved in the synthesis or regulation of a membrane receptor or other moiety. Modulating expression of the cell membrane can increase or decrease viral infection (e.g., by increasing or decreasing receptor expression), or can increase recovery of product that would otherwise adsorb to host cell membrane (by decreasing receptor expression).

[0325] For example, many viruses adhere to host cell-surface heparin, including PCV (Misinzo et al., 80 J. Virol. 3487-94 (2006); CMV (Compton et al., 193 Virology 834-41 (1993)); pseudorabies virus (Mettenleiter et al., 64 J. Virol. 278-86 (1990)); BHV-1 (Okazaki et al., 181 Virology 666-70 (1991)); swine vesicular disease virus (Escribano-Romero et al., 85 Gen. Virol. 653-63 (2004)); and HSV (WuDunn & Spear, 63 J. Virol. 52-58 (1989)). Additionally, enveloped viruses having infectivity associated with surface heparin binding include HIV-1 (Mondor et al., 72 J. Virol. 3623-34 (1998)); AAV-2 (Summerford & Samulski, 72 J. Virol. 1438-45 (1998)); equine arteritis virus (Asagoe et al., 59 J. Vet. Med. Sci. 727-28 (1997)); Venezuelan equine encephalitis virus (Bernard et al., 276 Virology 93-103 (2000)); Sindbis virus (Byrnes & Griffin, 72 J. Virol. 7349-56 (1998); Chung et al., 72 J. Virol. 1577-85 (1998)); swine fever virus (Hulst et al., 75 J. Virol. 9585-95 (2001)); porcine reproductive and respiratory syndrome virus (Jusa et al., 62 Res. Vet. Sci. 261-64 (1997)); and RSV (Krusat & Streckert, 142 Arch. Virol. 1247-54 (1997)). A number of non-enveloped virus associate with cell surface heparin as well. Some picornaviridae family members associate with cell-surface heparin, including, foot-and-mouth disease virus (FMDV) (binds in in vitro culture) (Fry et al., 18 EMBO J. 543-54 (1999); Jackson et al., 70 J. Virol. 5282-87 (1996)); coxsackie virus B3 (CVB3) (Zautner et al., 77 J. Virol. 10071-77 (2003)); Theiler's murine encephalomyelitis virus (Reddi & Lipton, 76 J. Virol. 8400-07 (2002)); and certain echovirus serotypes (Goodfellow et al., 75 J. Virol. 4918-21 (2001)).

[0326] Hence, in particular embodiments of the present invention, cellular expression of heparin can be modulated in order to decrease or increase viral adsorption to the host cell. For example, one or more RNA effector molecule(s) can target one or more genes associated with heparin synthesis or structure, such as epimerases, xylosyltransferases, galactosyltransferases, N-acetylglucosaminyl transferases, glucuronosyltransferases, or 2-O-sulfotransferases. See, e.g., Rostand & Esko, 65 Infect. Immun. 1-8 (1997).

[0327] In the instance where the expression of cell-surface heparin is increased, a RNA effector molecule can target genes associated with heparin degradation, such as genes encoding heparanase (hep) (e.g., mouse hep GeneID: 15442, mouse hep 2 GeneID: 545291, rat hep GeneID: 64537, rat hep 2 GeneID: 368128, human HEP GeneID: 10855, human HEP 2 GeneID: 60495, Xenopus hep GeneID: 100145320, wild pig Sus scrofa hep GeneID: 100271932, Gallus hep GeneID: 373981, Gallus hep 2 GeneID: 423834, dog hep GeneID: 608707, bovine hep GeneID: 8284471, Callithrix monkey hep GeneID: 100402671, Callithrix hep 2 GeneID: 100407598, P. troglodytes hep GeneID: 461206, rabbit hep GeneID: 100101601, Rhesus Macaque hep GeneID: 707583, or zebrafish hep GeneID: 563020). See Gingis-Velitski et al., 279 J. Biol. Chem. 44084-92 (2004).

[0328] Similarly, the infectivity of influenza virus is dependent on the presence of sialic acid on the cell surface (Pedroso et al., 1236 Biochim. Biophys. Acta 323-30 (1995), as is the infectivity of rotaviruses (Is a et al., 23 Glycoconjugate J. 27-37 (2006); Fukudome et al., 172 Virol. 196-205 (1989)), other reoviruses (Paul et al., 172 Virol. 382-85 (1989)), and bovine coronaviruses (Schulze & Herrler, 73 J. Gen. Virol. 901-06 (1992)). Additional host cell-surface receptors include VCAM1 for encephalomyocarditis virus (Huberm 68 J. Virol. 3453-58 (1994); integrin VLA-2 for Echovirus (Bergelson et al., 1718-20 (1992); and members of the immunoglobulin super-family for poliovirus (Mendelson et al., 56 Cell 855-65 (1989). As such, a RNA effector targeting a host sialidase gene can be used to modulate host cell infectivity.

[0329] Thus, in some embodiments the gene target includes a host cell gene involved in sialidase (see Wang et al., 10 BMC Genomics 512 (2009)). For example, because influenza binds to cell surface sialic acid residues, decreased sialidase can increase the rate of purification. Target genes include, for example, NEU2 sialidase 2 (cytosolic sialidase) (Gallus Neu2, GeneID: 430542); NEU3 sialidase 3 (membrane sialidase) (Gallus Neu3, GeneID: 68823); solute carrier family 35 (CMP-sialic acid transporter) member A1 (Slc35A1). Example RNA effector molecules targeting SCL35A1 can have the sequences provided in SEQ ID NOs:3154345-3154368 (Gallus, sense) and SEQ ID NOs:3154369-3154392 (Gallus, antisense); and for SCL35A2, SEQ ID NOs:464674-465055 (CHO cell, antisense). For UDP-N-acetylglucosamine 2-epimerase/N-acetylmannosamine kinase (Gne), example siRNAs include SEQ ID NOs:2073971-2074368 (CHO cell, antisense), SEQ ID NOs:3154297-3154320 (Gallus, sense) and SEQ ID NOs:3154321-3154344 (Gallus, antisense)); cytidine monophospho-N-acetylneuraminic acid synthetase (Cmas), example siRNAs shown in SEQ ID NOs:1633101-1633406 (CHO cell, antisense), SEQ ID NOs:3154249-3154272 (Gallus, sense) and SEQ ID NOs:3154273-3154296 (Gallus, antisense)); UDP-Gal:βGlcNAc β1,4-galactosyltransferase (B4GalT1), example siRNAs having sequences chosen from SEQ ID NOs:2528454-2528763 (CHO cell, antisense), SEQ ID NOs:3154153-3154176 (Gallus, sense) and SEQ ID NOs:3154177-3154200 (Gallus, antisense)); and UDP-Gal:βGlcNAc β1,4-galactosyltransferase, polypeptide 6 (B4GalT6), example siRNAs in SEQ ID NOs:1635173-1635561 (CHO cell, antisense), SEQ ID NOs:3154201-3154224 (Gallus, sense) and SEQ ID NOs:3154225-3154248 (Gallus, antisense).

[0330] Host Cell Viability

[0331] In some embodiments, the production of an immunogenic agent in a host cell is enhanced by introducing into the cell an additional RNA effector molecule that affects cell growth, cell division, cell viability, apoptosis, nutrient handling, and/or other properties related to cell growth and/or division within the cell. The target gene can also encode a host cell protein that directly or indirectly affects one or more aspects of the production of the immunogenic agent. Examples of target genes that affect the production of polypeptides include genes encoding proteins involved in the secretion, folding or post-translational modification of polypeptides (e.g., glycosylation, deamidation, disulfide bond formation, methionine oxidation, or pyroglutamation); genes encoding proteins that influence a property or phenotype of the host cell (e.g., growth, viability, cellular pH, cell cycle progression, apoptosis, carbon metabolism or transport, lactate formation, susceptibility to viral infection or RNAi uptake, activity or efficacy); and genes encoding proteins that impair the production of an immunogenic agent by the host cell (e.g., a protein that binds or co-purifies with the immunogenic agent).

[0332] In some embodiments of the invention, the target gene encodes a host cell protein that indirectly affects the production of an immunogenic agent such that inhibiting expression of the target gene enhances production of the immunogenic agent. For example, the target gene can encode an abundantly expressed host cell protein that does not influence directly production of the immunogenic agent, but indirectly decreases its production, for example by utilizing cellular resources that could otherwise enhance production of the immunogenic agent.

[0333] In some embodiments, Ago1 (Eukaryotic translation initiation factor 2C, 1); BLK (B lymphoid tyrosine kinase); CCNB3 (Cyclin B3); HILI (piwi-like 2 (Drosophila); HIWI1 (piwi-like 2 (Drosophila); HIWI2 (piwi-like 2 (Drosophila); HIWI3 (piwi-like 2 (Drosophila); is targeted using the methods and compositions described herein.

[0334] For optimal production of an immunogenic agent in cell-based bioprocesses described herein, it is desirable to maximize cell viability. Accordingly, in one embodiment, production of an immunogenic agent is enhanced by modulating expression of a cell protein that affects apoptosis or cell viability, such as Bax (BCL2-associated X protein), for example; Bak (BCL2-antagonist/killer 1) (e.g., Gallus Bak, GeneID: 419912), LDHA (lactate dehydrogenase A) (e.g., Gallus LdhA, GeneID: 396221), LDHB (e.g., Gallus LdhB, GeneID: 373997), BIK; BAD (SEQ ID NOs:3049436-3049721), BID (SEQ ID NOs:2582517-2582823), BIM, HRK, BCLG, HR, NOXA, PUMA (SEQ ID NOs:1712045-1712425), BOK (BCL2-related ovarian killer) (e.g., Mus musculus Bok, GeneID: 395445, Gallus Bok, GeneID: 995445, human BOK, GeneID: 666), BOO, BCLB, CASP2 (apoptosis-related cysteine peptidase 2) (e.g., Gallus Casp2, GeneID: 395857) (SEQ ID NOs:2718675-2719039), CASP3 (apoptosis-related cysteine peptidase) (e.g., Gallus Casp3, GeneID: 395476) (SEQ ID NOs:1924836-1925195), CASP6 (e.g., Gallus Casp6, GeneID: 395477 (SEQ ID NOs:2408466-2408843); CASP7 (e.g., Gallus, GeneID: 423901 (SEQ ID NOs:2301618-2301960); CASP8 (e.g., Gallus Casp8, GeneID: 395284, human CASP8 GeneID:841, M. musculus Casp8, GeneID: 12370, Canis Casp8, GeneID:488473) (SEQ ID NOs:2995593-2995870); CASP9 (e.g., Gallus Casp9, GeneID: 426970) (SEQ ID NOs:1412589-1412860), CASP10 (e.g., Gallus Casp10, GeneID: 424081), BCL2 (B-cell CLL/lymphoma 2) (e.g., Gallus Bcl2, GeneID: 396282), p53 (e.g., Gallus p53, GeneID: 396200) (SEQ ID NOs:1283506-1283867), APAF1, HSP70 (e.g., Gallus Hsp70, GeneID: 423504) (SEQ ID NOs:3147029-3147080); TRAIL (TRAIL-LIKE TNF-related apoptosis inducing ligand-like) (e.g., Gallus Trail, GeneID: 395283), BCL2L1 (BCL2-like 1) (e.g., Gallus Bcl2L₁, GeneID: 373954) BCL2L13 (BCL2-like 13 [apoptosis facilitator]) (e.g., Gallus Bcl2113, GeneID: 418163, human BCL2L₁₃, GeneID: 23786), BCL2L14 (BCL2-like 14 [apoptosis facilitator]) (e.g., allus Bcl2114, GeneID: 419096), FASLG (Fas ligand [TNF superfamily, member 6]) (e.g., Gallus Faslg, GeneID: 429064), DPF2 (D4, zinc and double PHD fingers family 2) (e.g., Gallus Dpf2, GeneID: 429064), AIFM2 (apoptosis-inducing factor mitochondrion-associated 2) (e.g., human AIFM2, GeneID: 84883, Gallus Aifm2, GeneID: 423720), AIFM3 (e.g., Gallus Aifm3, GeneID: 416999), STK17A (serine/threonine kinase 17a [apoptosis-inducing]) (e.g., Gallus Stk17A, GeneID: 420775), APITD1 (apoptosis-inducing, TAF9-like domain 1) (e.g., Gallus Apitd1, GeneID: 771417), SIVA1 (apoptosis-inducing factor) (e.g., Gallus Siva1, GeneID: 423493), FAS (TNF receptor superfamily member 6) (e.g., Gallus Fas, GeneID: 395274), TGFβ2 (transforming growth factor β2) (e.g., Gallus TgfB2, GeneID: 421352), TGFBR1 (transforming growth factor, β receptor I) (e.g., Gallus TgfR1, GeneID: 374094), LOC378902 (death domain-containing tumor necrosis factor receptor superfamily member 23) (Gallus GeneID: 378902), or BCL2A1 (BCL2-related protein A1) (e.g., Gallus Bcl2A1, GeneID: 395673). For example, the BAK protein is known to down-regulate cell apoptosis pathways. Suyama et al., S1 Nucl. Acids. Res. 207-08 (2001).

[0335] For example, LDHA expression can be modulated by use of a corresponding RNA effector molecule comprising an antisense strand comprising at least 16 contiguous nucleotides (e.g., at least 17, at least 18, at least 19 nucleotides) of the nucleotides in SEQ ID NOs:3154553-3154578 (Gallus, sense), SEQ ID NOs:3154579-3154604 (Gallus, antisense), SEQ ID NOs:3152540-3152603 (CHO cell), SEQ ID NOs:3152843-3152823 (CHO cell), SEQ ID NOs:1297283-1297604 (CHO cell, antisense), SEQ ID NOs:3155589-3155635 (Canis, sense), SEQ ID NOs:3154971-3155018 (Canis, antisense).

[0336] Further, for example, the Bak protein is known to down-regulate cell apoptosis pathways. Thus, RNA effector molecules that target Bak can be used to suppress apoptosis and increase product yield, and can comprise an antisense strand comprising at least 16 contiguous nucleotides (e.g., at least 17, at least 18, at least 19 nucleotides) of the nucleotides in SEQ ID NOs:3152412-3152475 (CHO cell), SEQ ID NOs:3152804-3152813), SEQ ID NOs:2259855-220161 (CHO cell, antisense), SEQ ID NOs:3154393-3154413 (Gallus, sense), SEQ ID NOs:3154414-3154434 (Gallus, antisense), SEQ ID NOs:3154827-3154874 (Canis, sense), SEQ ID NOs:3154875-3154922 (Canis, antisense). See also Suyama et al., 51 Nucl. Acids. Res. 207-08 (2001). A particular embodiment thus provides for a RNA effector molecule that targets the Bak gene. A particular embodiment thus provides for a RNA effector molecule that targets the BAK1 gene.

[0337] Similarly, Bax protein is known to down-regulate cell apoptosis pathways. Thus, RNA effector molecules that target chicken Bax can be used to suppress apoptosis and increase immunogen product yield, and can comprise an antisense strand comprising at least 16 contiguous nucleotides (e.g., at least 17, at least 18, at least 19 nucleotides) of the nucleotides in SEQ ID NOs:3154393-3154413 (Gallus, sense), SEQ ID NOs:315414-3154434 (Gallus, antisense), SEQ ID NOs:3152412-3152539 (CHO cell), SEQ ID NOs:3152794-3152803 (CHO cell), SEQ ID NOs:3023234-3023515 (CHO cell, antisense), SEQ ID NOs:3154923-3154970 (Canis, sense), and SEQ ID NOs:3154971-3155018 (Canis, antisense).

[0338] In some embodiments, administration of RNA effector molecule/s targeting at least one gene involved in apoptosis (e.g., Bak, Bax, caspases etc.) is followed by a administration of glucose to the cell culture medium in order to increase cell density and switch cells to a lactate utilization mode. In some embodiments the concentration of glucose is increased at least 2-fold, at least 3-fold, at least 4 fold, or at least 5-fold.

[0339] Another embodiment provides for a plurality of different RNA effector molecules is contacted with the cells in culture to permit modulation of Bax, Bak and LDH expression. In another embodiment, RNA effector molecules targeting Bax and Bak are co-administered to a cell culture during production of the immunogenic agent and can optionally contain at least one additional RNA effector molecule or agent.

[0340] Alternatively, one can administer one RNA effector molecule at a time to the cell culture. In this manner, one can easily tailor the average percent inhibition desired for each target gene by altering the frequency of administration of a particular RNA effector molecule. For example, >80% inhibition of lactate dehydrogenase (LDH) may not always be necessary to significantly improve production of an immunogenic agent and under some conditions may even be detrimental to cell viability. Thus, one may desire to contact a cell with a RNA effector molecule targeting LDH at a lower frequency (e.g., less often) than the frequency of contacting with the other RNA effector molecules (e.g., Bax/Bak). Alternatively, the cell can be contacted with a RNA effector molecule targeting LDH at a lower dosage (e.g., lower multiples over the IC₅₀) than the dosage for other RNA effector molecules (e.g., Bax/Bak). For ease of use and to prevent potential contamination it may be preferred to administer a cocktail of different RNA effector molecules, thereby reducing the number of doses required and minimizing the chance of introducing a contaminant to the cell culture.

[0341] The production of an immunogenic agent in cell-based bioprocesses described herein can also be optimized by targeting genes that have been identified through screens. These include, for example, PUSL1 (pseudouridylate synthase-like 1) (CHO-Pusl1: SEQ ID NO:3157237; siRNA SEQ ID NOs:3249217-3249316); TPST1 (tyrosylprotein sulfotransferase 1) (e.g., Gallus Tpst1, GeneID: 417546) (CHO TPST1: SEQ ID NO:2613, corresponding siRNAs: SEQ ID NOs:858808-859104), and WDR33 (WD repeat domain 33) (e.g., Gallus Wdr33, GeneID: 424753) (CHO: SEQ ID NO:3433, corresponding siRNAs: SEQ ID NOs:1138341-1138649) (Brass et al., 139 Cell 1243-54 (2009)); Nod2 (nucleotide-binding oligomerization domain containing 2) (CHO: SEQ ID NO:6858; siRNA SEQ ID NOs:2322123-2322429) (Sabbah et al., 10 Nat. Immunol. 1973-80 (2009)); MCT4 (solute carrier family 16, member 4 [monocarboxylic acid transporter 4]) (e.g., Gallus Mct4, GeneID: 395383), ACRC (acidic repeat containing) (e.g., Gallus AcrC, GeneID:422202), AMELY, ATCAY (cerebellar, Cayman type [caytaxin]) (e.g., Gallus Atcay, GeneID: 420094), ANP32B (acidic [leucine-rich] nuclear phosphoprotein 32 family member) (e.g., Gallus Anp32B, GeneID: 420087), DEFA3, DHRS10, DOCK4 (dedicator of cytokinesis 4) (e.g., Gallus Dock4, GeneID: 417779), FAM106A, FKBP1B (FK506 binding protein 1B) (e.g., human FKCB1B, GeneID: 2281, M. musculus Fkbp1b, GeneID: 14226, Gallus Fkbp1B, GeneID: 395254), IRF3, KBTBD8 (kelch repeat and BTB [POZ] domain containing 8) (e.g., Gallus Kbtbd8, GeneID: 416085), KIAA0753 (e.g., Gallus Kiaa0753, GeneID: 417681), LPGAT1 (lysophosphatidyl-glycerol acyltransferase 1) (e.g., Gallus Lpgat1, GeneID: 421375), MSMB (microseminoprotein β) (e.g., Gallus Msmb, GeneID: 423773), NFS1 (nitrogen fixation 1 homolog) (e.g., Gallus Nfs1, GeneID: 419133), NPIP, NPM3 (nucleophosmin/nucleoplasmin 3) (e.g., Gallus Npm3, GeneID: 770430), SCGB2A1, SERPINB7, SLC16A4 (solute carrier family 16, member 4 [monocarboxylic acid transporter 5]) (e.g., Gallus S1c16a4, GeneID: 419809), SPTBN4 (spectrin, β, non-erythrocytic 4) (e.g., Gallus SptBn4, GeneID: 430775), or TMEM146 (Krishnan et al., 2008).

[0342] Other target genes that can be affected to optimize immunogen production include genes associated with cell cycle and/or cell proliferation, such as CDKN1B (cyclin-dependent kinase inhibitor 1B, p27, kip1) (e.g., Gallus Cdkn1b, GeneID: 374106), a target for which a siRNA against p27kip1 induces proliferation (Kikuchi et al., 47 Invest. Opthalmol. 4803-09 (2006)); or FOX01, a target for which a siRNA induces aortic endothelial cell proliferation (Fosbrink et al., J. Biol. Chem. 19009-18 (2006). Thus, for example, in CEF or other chicken cells, the expression of CDKN2A, associated with cell division, can be modulated using a corresponding RNA effector molecule having an antisense strand comprising at least 16 contiguous nucleotides (e.g., at least 17, at least 18, at least 19 nucleotides) of an oligonucleotide nucleotide having a sequence selected from the group consisting of SEQ ID NOs:3154663-3154696 (Gallus, sense) and SEQ ID NOs:3154697-3154730 (Gallus, antisense).

[0343] Reactive oxygen species (ROS) are toxic to host cells and can mediate non-specific oxidation, degradation and/or cleavage and other structural modifications of the immunogenic agent that lead to increased heterogeneity, decreased biological activity, lower recoveries, and/or other impairments to of biologics produced by methods provided herein. Accordingly, production of an immunogenic agent is enhanced by modulating expression of a pro-oxidant enzyme, such as a CHO cell protein selected from the group consisting of: NAD(p)H oxidase, peroxidase such as a glutathione peroxidase (e.g., glutathione peroxidase 1, glutathione peroxidase 4, glutathione peroxidase 8 (putative), glutathione peroxidase 3, encoded by the oligonucleotides of SEQ ID NO:7213, NO:7582, NO:8011, and NO:9756, respectively (RNA effector molecules: SEQ ID NOs:2439217-2439612, NOs:2560559-2560895, NOs:2703865-2704225, NOs:3151589-3151685, respectively), myeloperoxidase, constitutive neuronal nitric oxide synthase (cnNOS), xanthine oxidase (XO) (SEQ ID NOs:374846-375216) and myeloperoxidase (MPO), 15-lipoxygenase-1 (SEQ ID NOs:2480018-2480362), NADPH cytochrome c reductase, NAPH cytochrome c reductase, NADH cytochrome b5 reductase (SEQ ID NOs:569460-569777, NOs:1261910-1262218, NOs:2195311-2195681, NOs:3146048-3146071, NOs:259827-260060, respectively), and cytochrome P4502E1.

[0344] Additionally, protein production can be enhanced by modulating expression of a protein that affects the cell cycle of host cells (e.g., CHO cells) such as a cyclin (e.g., cyclin M4, cyclin J, cyclin T2, cyclin-dependent kinase inhibitor 1A (P21), cyclin-dependent kinase inhibitor 1B, cyclin M3, cyclin-dependent kinase inhibitor 2B (p15, inhibits CDK4), cyclin E2, S100 calcium-binding protein A6 (calcyclin), cyclin-dependent kinase 5, regulatory subunit 1 (p35), cyclin T1, inhibitor of CDK, cyclin A1 interacting protein 1, by use of corresponding a RNA effector molecule comprising an an antisense strand comprising at least 16 contiguous nucleotides (e.g., at least 17, at least 18, at least 19 nucleotides) of an oligonucleotide nucleotide having a sequence selected from the group consisting of SEQ ID NOs:2447340-2447632, NOs:2463782-2464073, NOs:2466004-2466274, NOs:2659502-2659871, NOs:2731076-2731440, NOs:2748583-2748914, NOs:2895015 2895359, NOs:2904183-2904530, NOs:2966362-2966657, NOs:3088848-3089061, NOs:3107706-3107919, and NOs:3122589-3122734, respectively), or a cyclin dependent kinase (CDK). In some embodiments, the cyclin-dependent kinase is a CHO cell cyclin-dependent kinase selected from the group consisting of: CDK2 (SEQ ID NOs:1193336-1193684), CDK4 (SEQ ID NOs:1609522-1609852), P10 (SEQ ID NOs:3013998-3014274), P21 (SEQ ID NOs:2659502-2659871), P27 (SEQ ID NOs:2731076-2731440), p53, P57, p161NK4a, P14ARF, and CDK4 (SEQ ID NOs:1609522-1609852). For example, in various embodiments, the expression of one or more proteins that affect cell cycle progression can be transiently modulated during the growth and/or production phases of heterologous protein production in order to enhance expression and recovery of heterologous proteins.

[0345] In addition, production of excess ammonia in bioprocessing is a common problem in large scale cell culture. High ammonia concentrations result in reduced cell and product yields, depending on cell line and process conditions. Liberation of ammonia is thought to occur through the breakdown of glutamine to glutamate by glutaminase, and/or through the conversion of glutamate to a-ketoglutarate by glutamate dehydrogenase. Therefore, in one embodiment, biologics production can be enhanced by modulating expression of a protein that affects ammonia production, such as glutaminase or glutamate dehydrogenase. A particular embodiment provides for a RNA effector that targets CHO cell glutaminase having the transcript of SEQ ID NO:311 (CHO311.1). In one embodiment the RNA effector is a siRNA selected from SEQ ID NOs:105170-105438, which target glutaminase. In another embodiment, the RNA effector targets CHO cell glutamate dehydrogenase having SEQ ID NO:569 (CHO569.1). In one embodiment the RNA effector is a siRNA selected from SEQ ID NOs:177779-178010, which target CHO cell glutamate dehydrogenase 1.

[0346] It is known that production of lactic acid in cell cultures inhibits cell growth and influences metabolic pathways involved in glycolysis and glutaminolysis (Lao & Toth, 13 Biotech. Prog., 688-91 (1997)). The accumulation of lactate in cells is caused mainly by the incomplete oxidation of glucose to CO₂ and H₂O, in which most of the glucose is oxidized to pyruvate and finally converted to lactate by lactate dehydrogenase (LDH). The accumulation of lactic acid in cells is detrimental to achieving high cell density and viability. Accordingly, in one embodiment, immunogenic protein production is enhanced by modulating expression of a protein that affects lactate formation, such as lactate dehydrogenase A (LDHA). Hence, a particular embodiment provides for a RNA effector molecule that targets the LDHA 1 gene.

[0347] In some embodiments, glucose utilization of cells is manipulated by modulation expression of e.g., target genes Myc and AKT. In one embodiment the target gene is CHO myelocytomatosis oncogene comprising the sequence of SEQ ID NO:2185 (CHO2185.1). In one embodiment the RNA effector molecule is a siRNA having a sequence selected from SEQ ID NOs:713438-713745. In one embodiment the RNA effector molecule is a siRNA having a sequence selected from SEQ ID NOs:713438-713473. In one embodiment the target gene is CHO thymoma viral proto-oncogene-1 comprising the nucleotides of SEQ ID NO:1793 (CHO1793.1). In one embodiment the RNA effector molecule is a siRNA having a sequence selected from SEQ ID NOs:581286-581643. In one embodiment the RNA effector molecule is a siRNA having a sequence selected from SEQ ID NOs:581286-581334.

[0348] In one embodiment, a cell culture is treated as described herein with RNA effector molecules that permit modulation of Bax, Bak and LDH expression. In another embodiment, the RNA effector molecules targeting Bax, Bak and LDH can be administered in combination with one or more additional RNA effector molecules and/or agents. Provided herein is a cocktail of RNA effector molecules targeting Bax, Bak and LDH expression, which can optionally be combined with additional RNA effector molecules or other bioactive agents as described herein.

[0349] In some embodiments, production of an immunogenic agent is enhanced by modulating expression of a protein that affects cellular pH, such as LDH or lysosomal V-type ATPase.

[0350] In some embodiments, production of an immunogenic agent is enhanced by modulating expression of a protein that affects carbon metabolism or transport, such as GLUT1, for example, by contacting the cell with a RNA effector molecule wherein the RNA effector molecule comprises an antisense strand comprising at least 16 contiguous nucleotides (e.g., at least 17, at least 18, at least 19 nucleotides) of an oligonucleotide having the nucleotide sequence selected from the group consisting of SEQ ID NOs:438155-438490, GLUT2, GLUT3, GLUT4, PTEN (SEQ ID. NOs:6091-6940) (with a RNA effector molecule wherein the RNA effector molecule comprises an antisense strand comprising at least 16 contiguous nucleotides (e.g., at least 17, at least 18, at least 19 nucleotides) of the nucleotide sequence selected from the group consisting of SEQ ID NOs:69091-69404 (CHO cell, antisense), or LDH (with a RNA effector molecule wherein the RNA effector molecule comprises an antisense strand comprising at least 16 contiguous nucleotides (e.g., at least 17, at least 18, at least 19 nucleotides) of the oligonucleotide having a nucleotide sequence selected from the group consisting of SEQ ID NOs:1297283-1297604)—see also Table 10 with LDHs).

TABLE 4
GLUTS and PTEN

| SEQ ID | Transcript | | | Avg | siRNA SEQ |
|---|---|---|---|---|---|
| NO: | No. | consL | Description | Coverage | ID NOs: |
| 1375 | CHO1375.1 | 2298 | solute carrier family 2 (facilitated | 14.092 | 438155-438490 |
| | | | glucose transporter), member 1 | | |
| 6869 | CHO6869.1 | 910 | solute carrier family 2, (facilitated | 0.818 | 2325698-2325997 |
| | | | glucose transporter), member 8 | | |
| 7909 | CHO7909.1 | 656 | solute carrier family 2 (facilitated | 0.689 | 2669929-2670303 |
| | | | glucose transporter), member 13 | | |
| 189 | CHO189.1 | 3384 | PTEN (phosphatase and | 0.633 | 69091-69404 |
| | | | tensin homolog) | | |

[0351] In some embodiments, production of an immunogenic agent is enhanced by modulating expression of cofilin (for example a muscle cofilin 2, or non-muscle cofilin-1). In one embodiment, a cell with a RNA effector molecule wherein the RNA effector molecule comprises an antisense strand comprising at least 16 contiguous nucleotides (e.g., at least 17, at least 18, at least 19 nucleotides) of the oligonucleotide having a nucleotide sequence selected from the group consisting of SEQ ID NOs:435213-435610, targeting the CHO muscle cofilin 2 (SEQ ID NO:1366). In another embodiment, a cell with a RNA effector molecule wherein the RNA effector molecule comprises an antisense strand comprising at least 16 contiguous nucleotides (e.g., at least 17, at least 18, at least 19 nucleotides) of the oligonucleotide having a nucleotide sequence selected from the group consisting of SEQ ID NOs:1914036-1914356, targeting the CHO non-muscle cofilin 1 (SEQ ID NO:5716).

[0352] In some embodiments, production of an immunogenic agent is enhanced by modulating expression of a protein that affects uptake or efficacy of a RNA effector molecule in host cells, such as ApoE, Mannose/GalNAc-receptor, and Eri1. In various embodiments, the expression of one or more proteins that affects RNAi uptake or efficacy in cells is modulated according to a method provided herein concurrently with modulation of one or more additional target genes, such as a target gene described herein, in order to enhance the degree and/or extent of modulation of the one or more additional target genes.

[0353] In some embodiments, the production of an immunogenic agent is enhanced by inducing a stress response in the host cells which causes growth arrest and increased productivity. A stress response can be induced, e.g., by limiting nutrient availability, increasing solute concentrations, or low temperature or pH shift, and oxidative stress. Along with increased productivity, stress responses can also have adverse effects on protein folding and secretion. In some embodiments, such adverse effects are ameliorated by modulating the expression of a target gene encoding a stress response protein, such as a protein that affects protein folding and/or secretion described herein.

[0354] In some embodiments, production of an immunogenic agent is enhanced by modulating expression of a protein that affects cytoskeletal structure, e.g. altering the equilibrium between monomeric and filamentous actin. In one embodiment the target gene encodes cofilin and a RNA effector molecule inhibits expression of cofilin. In one embodiment, at least one RNA effector molecule increases expression of a target gene selected from the group consisting of: cytoplasmic actin capping protein (CapZ), Ezrin (VIL2), and Laminin A. See, e.g., Table 5, as follows:

TABLE 5
Example hamster genes and siRNAs (antisense strand) targeting Laminin and CapZ

| SEQ | | | Avg | siRNA SEQ |
|---|---|---|---|---|
| ID NO: | consL | Description | Cov | ID NOs: |
| 763 | 2614 | capping protein (actin filament) muscle Z-line, α 1 | 5.404 | 235917-236159 |
| 3104 | 1768 | capping protein (actin filament) muscle Z-line, α 2 | 15.011 | 1026343-1026702 |
| 3590 | 1647 | capping protein (actin filament) muscle Z-line, β | 60.716 | 1190654-1190998 |
| 5752 | 1156 | capping protein (actin filament), gelsolin-like | 62.723 | 1927144-1927507 |
| 1081 | 2436 | ezrin | 31.498 | 339220-339540 |
| 122 | 3653 | laminin, α 5 | 10.318 | 48814-49139 |
| 8777 | 444 | laminin, α 2 | 0.046 | 2954307-2954650 |
| 3157936 | 2200 | laminin, α 3 | 0.41 | 3160721-3160820 |

[0355] The modulation of expression (e.g., inhibition) of a target gene by a RNA effector molecule can be further alleviated by introducing a second RNA effector molecule, wherein at least a portion of the second RNA effector molecule is complementary to a target gene encoding a protein that mediates RNAi in the host cell. For example, the modulation of expression of a target gene can be alleviated by introducing into the cell a RNA effector molecule that inhibits expression of an Argonaute protein (e.g., argonaute-2) or other component of the RNAi pathway of the cell. In one embodiment, the immunogenic agent is transiently inhibited by contacting the cell with a first RNA effector molecule targeted to the immunogenic agent. The inhibition of expression of the immunogenic agent is then alleviated by introducing into the cell a second RNA effector molecule targeted against a gene encoding a protein of the RNAi pathway.

[0356] Additionally, the production of a desired immunogenic agent can be enhanced by introducing into the cell a RNA effector molecule during the production phase to modulate expression of a target gene encoding a protein that affects protein expression, post-translational modification, folding, secretion, and/or other processes related to production and/or recovery of the desired immunogenic agent. Alternatively, the production of an immunogenic agent is enhanced by introducing into the cell a RNA effector molecule which inhibits cell growth and/or cell division during the production phase.

[0357] Post-Translational Processing

[0358] Post-translational modifications can require additional bioprocess steps to separate modified and unmodified polypeptides, increasing costs and reducing efficiency of biologics production. Accordingly, in some embodiments, in production of a polypeptide agent in a cell is enhanced by modulating the expression of a target gene encoding a protein that affects post-translational modification. In additional embodiments, biologics production is enhanced by modulating the expression of a first target gene encoding a protein that affects a first post-translational modification, and modulating the expression of a second target gene encoding a protein that affects a second post-translational modification.

[0359] More specifically, proteins expressed in eukaryotic cells can undergo several post-translational modifications that can impair production and/or the structure, biological activity, stability, homogeneity, and/or other properties of the immunogenic agent. Many of these modifications occur spontaneously during cell growth and polypeptide expression and can occur at several sites, including the peptide backbone, the amino acid side-chains, and the amino and/or carboxyl termini of a given polypeptide. In addition, a given polypeptide can comprise several different types of modifications. For example, proteins expressed in avian and mammalian cells can be subject to acetylation, acylation, ADP-ribosylation, amidation, ubiquitination, methionine oxidation, disulfide bond formation, methylation, demethylation, sulfation, formation of cysteine, formation of pyroglutamate, formylation, gamma-carboxylation, hydroxylation, iodination, myristoylation, oxidation, proteolytic processing, phosphorylation, prenylation, racemization, glycosylation, gluconoylation, sequence mutations, N-terminal glutamine cyclization and deamidation, and asparagine deamidation. N-terminal asparagine deamidation can be reduced by contacting the cell with a RNA effector molecule targeting the N-terminal Asn amidase (encoded, for example, by SEQ ID NO:5950), wherein the RNA effector molecule comprises an antisense strand comprising at least 16 contiguous nucleotides (e.g., at least 17, at least 18, at least 19 nucleotides) of the oligonucleotide having a nucleotide sequence selected from the group consisting of SEQ ID NOs:1999410-1999756.

[0360] In some embodiments, immunogen production is enhanced by modulating expression of a target gene which encodes a protein involved in protein deamidation. Proteins can be deaminated via several pathways, including the cyclization and deamidation of N-terminal glutamine and deamidation of asparagine. Thus, in one embodiment, the protein involved in protein deamidation is N-terminal asparagine amidohydrolase. Protein deamidation can lead to altered structural properties, reduced potency, reduced biological activity, reduced efficacy, increased immunogenicity, and/or other undesirable properties and can be measured by several methods, including but not limited to, separations of proteins based on charge by, e.g., ion exchange chromatography, HPLC, isoelectric focusing, capillary electrophoresis, native gel electrophoresis, reversed-phase chromatography, hydrophobic interaction chromatography, affinity chromatography, mass spectrometry, or the use of L-isoaspartyl methyltransferase.

[0361] When the immunogenic agent comprises a glycoprotein, such as a viral product having viral surface membrane proteins or monoclonal antibody having glycosylated amino acid residues, biologics production can be enhanced by modulating expression of a target gene that encodes a protein involved in protein glycosylation. Glycosylation patterns are often important determinants of the structure and function of mammalian glycoproteins, and can influence the solubility, thermal stability, protease resistance, antigenicity, immunogenicity, serum half-life, stability, and biological activity of glycoproteins.

[0362] In various embodiments, the protein that affects glycosylation is selected from the group consisting of: dolichyl-diphosphooligosaccharide-protein glycosyltransferase (SEQ ID NOs:2742894-2743239), UDP glycosyltransferase, UDP-Gal:βGlcNAc beta 1,4-galactosyltransferase (SEQ ID NOs:851115-851489, NOs:1552461-1552728, NOs:1562813-1563108, and NOs:1635173-1635561), UDP-galactose-ceramide galactosyltransferase, fucosyltransferase (SEQ ID NOs:209841-210227), protein O-fucosyltransferase (SEQ ID NOs:916726-917035), N-acetylgalactosaminytransferase (SEQ ID NOs:57147-57422, NOs:65737-65999, NOs:1013002-1013376, NOs:1363583-1363970, NOs:1546609-1546999, NOs:1965217-1965613, NOs:2876241-2876595), particularly T4 (SEQ ID NOs:2876241-2876595), O-GlcNAc transferase (SEQ ID NOs:607012-607348), oligosaccharyl transferase (SEQ ID NOs:89738-90024, NOs:262368-262621), O-linked N-acetylglucosamine transferase, and α-galactosidase (SEQ ID NOs:1600968-1601288) and β-galactosidase (SEQ ID NOs:690601-690989).

[0363] In other embodiments. The protein that affects glycosylation is selected, for example, from Table 6, as follows:

TABLE 6
O-linked glycosylation

| SEQ | | | Avg | siRNA SEQ |
|---|---|---|---|---|
| ID NO: | consL | Description | Cov | ID NOs: |
| 150 | 3549 | UDP-N-acetyl--D-galactosamine:polypeptide | 11.757 | 57147-57422 |
| | | N-acetylgalactosaminyltransferase 1 | | |
| 178 | 3411 | UDP-N-acetyl--D-galactosamine:polypeptide | 22.835 | 65737-65999 |
| | | N-acetylgalactosaminyltransferase 2 | | |
| 1720 | 2167 | protein-O-mannosyltransferase 2 | 1.099 | 555946-556293 |
| 1869 | 2123 | O-linked N-acetylglucosamine (GlcNAc) transferase | 0.839 | 607012-607348 |
| | | (UDP-N-acetylglucosamine:polypeptide-N- | | |
| | | acetylglucosaminyl transferase) | | |
| 3065 | 1776 | UDP-N-acetyl--D-galactosamine:polypeptide | 1.546 | 1013002-1013376 |
| | | N-acetylgalactosaminyltransferase 10 | | |
| 4007 | 1548 | protein-O-mannosyltransferase 1 | 1.418 | 1331135-1331436 |
| 4654 | 1402 | UDP-N-acetyl--D-galactosamine: polypeptide | 0.782 | 1546609-1546999 |
| | | N-acetylgalactosaminyltransferase 7 | | |
| 5740 | 1158 | protein O-linked mannose β1,2-N- | 2.323 | 1922712-1923111 |
| | | acetylglucosaminyltransferase | | |
| 6857 | 913 | protein O-fucosyltransferase 1 | 0.441 | 2321807-2322122 |
| 258 | 3197 | STT3, subunit of the oligosaccharyltransferase | 25.073 | 89738-90024 |
| | | complex, homolog B (S. cerevisiae) | | |
| 1114 | 2420 | ribophorin II | 272.65 | 350422-350752 |
| 2417 | 1954 | mannoside acetylglucosaminyltransferase 2 | 5.098 | 792371-792746 |
| 2614 | 1903 | dolichyl-di-phosphooligosaccharide- | 179.1 | 859105-859389 |
| | | protein glycotransferase | | |
| 4441 | 1452 | dolichyl pyrophosphate phosphatase 1 | 2.663 | 1476398-1476763 |
| 4945 | 1339 | mannoside acetylglucosaminyltransferase 5 | 0.5 | 1645857-1646201 |
| 5594 | 1191 | mannoside acetylglucosaminyltransferase 1 | 3.072 | 1870192-1870557 |
| 5740 | 1158 | protein O-linked mannose β1,2-N- | 2.323 | 1922712-1923111 |
| | | acetylglucosaminyltransferase | | |
| 8007 | 632 | asparagine-linked glycosylation 6 homolog | 1.15 | 2702432-2702775 |
| | | (yeast, α-1,3,-glucosyltransferase) | | |
| 8404 | 518 | keratinocyte associated protein 2 | 6.913 | 2832647-2833030 |

[0364] In further embodiments, production of an immunogenic glycoprotein is enhanced by modulating expression of a sialidase or a sialytransferase enzyme. Terminal sialic acid residues of glycoproteins are particularly important determinants of glycoprotein solubility, thermal stability, resistance to protease attack, antigenicity, and specific activity. For example, when terminal sialic acid is removed from serum glycoproteins, the desilylated proteins have significantly decreased biological activity and lower circulatory half-lives relative to sialylated counterparts. The amount of sialic acid in a glycoprotein is the result of two opposing processes, i.e., the intracellular addition of sialic acid by sialyltransferases and the removal of sialic acid by sialidases. Thus, in some embodiments, production of a glycoprotein is enhanced by inhibiting expression of a sialidase and/or activating expression of a sialytransferase. Example sialyltransferase targets and exemplary siRNAs are found in Table 7, as follows:

TABLE 7
Example sialyltransferase targets

| SEQ | | | Avg | siRNA SEQ |
|---|---|---|---|---|
| ID NO: | consL | Description | Cov | ID NOs: |
| 2088 | 2048 | ST3 β-galactoside α-2,3-sialyltransferase 1 | 5.651 | 681105-681454 |
| 2167 | 2021 | ST3 β-galactoside α-2,3-sialyltransferase 4 | 13.01 | 707535-707870 |
| 3411 | 1689 | ST3 β-galactoside α-2,3-sialyltransferase 3 | 3.964 | 1131123-1131445 |
| 3484 | 1672 | ST3 β-galactoside α-2,3-sialyltransferase 5 | 21.148 | 1155324-1155711 |
| 4186 | 1504 | ST6 (α-N-acetyl-neuraminyl-2,3-β-galactosyl- | 5.237 | 1391079-1391449 |
| | | 1,3)-N-acetylgalactosaminide α-2,6- | | |
| | | sialyltransferase 6 | | |
| 4319 | 1476 | ST3 β-galactoside α-2,3-sialyltransferase 2 | 1.043 | 1435989-1436317 |
| 3157960 | 2282 | ST8 α-N-acetyl-neuraminide α-2,8- | 1.629 | 3246817-3246916 |
| | | sialyltransferase 4 | | |
| 3158211 | 343 | ST6 (α-N-acetyl-neuraminyl-2,3-β-galactosyl- | 0.282 | 3260605-3260704 |
| | | 1,3)-N-acetylgalactosaminide α-2,6- | | |
| | | sialyltransferase 4 | | |

[0365] In some embodiments, immunogenic agent production is enhanced by modulating expression of a glutaminyl cyclase which catalyzes the intramolecular cyclization of N-terminal glutamine residues into pyroglutamic acid, liberating ammonia (pyroglutamation). Glutaminyl cyclase modulation can be accomplished by contacting the cell with a RNA effector molecule targeting the glutaminyl cyclase gene (for example, hamster glutaminyl cyclase encoded by SEQ ID NO:5486), wherein the RNA effector molecule comprises an antisense strand comprising at least 16 contiguous nucleotides (e.g., at least 17, at least 18, at least 19 nucleotides) of the oligonucleotide having a nucleotide sequence selected from the group consisting of SEQ ID NOs:1832626-1832993.

[0366] In some embodiments, production of immunogenic agents containing disulfide bonds is enhanced by modulating expression of a protein that affects disulfide bond oxidation, reduction, and/or isomerization, such as protein disulfide isomerase or sulfhydryl oxidase. Disulfide bond formation can be particularly problematic for the production of multi-subunit proteins or peptides in eukaryotic cell culture. Examples of multi-subunit proteins or peptides include receptors, extracellular matrix proteins, immunomodulators, such as MHC proteins, full chain antibodies and antibody fragments, enzymes and membrane proteins.

[0367] In some embodiments, protein production is enhanced by modulating expression of a protein that affects methionine oxidation. Reactive oxygen species (ROS) can oxidize methionine (Met) to methionine sulfoxide (MetO), resulting in increased degradation and product heterogeneity, and reduced biological activity and stability. In some embodiments, the target gene encodes a methionine sulfoxide reductase, which catalyzes the reduction of MetO residues back to methionine. For example, wherein the CHO cell RNA effector molecule comprises an antisense strand comprising at least 16 contiguous nucleotides (e.g., at least 17, at least 18, at least 19 nucleotides) of the oligonucleotide having a nucleotide sequence selected from the group consisting of SEQ ID NOs:2044387-2044676, SEQ ID NOs:2557492-2557809, and SEQ ID NOs:3076104-3076309.

[0368] Immunogenic agents (including some live attenuated viruses) produced in cell culture on an industrial-scale are typically secreted by cultured cells and recovered and purified from the surrounding cell culture media. In general, the rate of protein production and the yield of recovered protein is directly related to the rate of protein folding and secretion by the host cells. For example, an accumulation of misfolded proteins in the endoplasmic reticulum (ER) of host cells can slow or stop secretion via the unfolded protein response (UPR) pathway. The UPR is triggered by stress-sensing proteins in the ER membrane which detect excess unfolded proteins. UPR activation leads to the upregulation of chaperone proteins (e.g., Bip) which bind to misfolded proteins and facilitate proper folding. UPR activation also upregulates the transcription factors XBP-1 (e.g., CHO cell SEQ ID NOs:187955-188152) and CHOP (e.g., CHO cell SEQ ID NOs:2813622-2813956). CHOP generally functions as a negative regulator of cell growth, differentiation and survival, and its upregulation via the UPR causes cell cycle arrest and increases the rate of protein folding and secretion to clear excess unfolded proteins from the cell. Hence, cell cycle can be promoted initially, then repressed during virus production phase to increase viral product yield. An increase the rate of immunogenic protein secretion by the host cells can be measured by, e.g., monitoring the amount of protein present in the culture media over time.

[0369] The present invention provides methods for enhancing the production of a secreted polypeptide in cultured eukaryotic host cells by modulating expression of a target gene which encodes a protein that affects protein secretion by the host cells. In some embodiments, the target gene encodes a protein of the UPR pathway, such as IRE1, PERK, ATF4 (CHO cell, SEQ ID NOs:1552067-1552460), ATF6 (CHO cell, SEQ ID NOs:570138-570498), eIF2a (CHO cell, SEQ ID NOs:1828122-1828492), GRP78 (CHO cell, SEQ ID NOs:292590-292837), GRP94 (CHO cell, SEQ ID NOs:180574-180954), calreticulin (CHO cell, SEQ ID NOs:895691-896051) or a variant thereof, or a protein that regulates the UPR pathway, such as a transcriptional control element (e.g., the cis-acting UPR element (UPRE)).

[0370] Other target genes involved in protein secretion are listed in Table 8, which identifies example hamster transcript target genes and exemplary siRNAs (antisense strand):

TABLE 8
Example Chinese hamster secretory pathway targets

| SEQ | | | Avg | |
|---|---|---|---|---|
| ID NO: | consL | Description | Cov | siRNA SEQ ID NOs: |
| 8 | 4838 | myosin VA | 2.412 | 12025-12278 |
| 584 | 2751 | transmembrane emp24-like trafficking | 22.212 | 182087-182337 |
| | | protein 10 (yeast) | | |
| 1448 | 2267 | glycyl-tRNA synthetase | 58.453 | 462911-463286 |
| 2119 | 2036 | ADP-ribosylation factor interacting protein 1 | 1.425 | 691369-691690 |
| 2236 | 2001 | MON1 homolog A (yeast) | 8.293 | 730977-731347 |
| 2859 | 1843 | retinoid X receptor | 3.715 | 942750-943051 |
| 3432 | 1685 | lipase maturation factor 1 | 6.857 | 1138015-1138340 |
| 4066 | 1533 | WD repeat domain 77 | 15.26 | 1350827-1351146 |
| 4826 | 1363 | N-acetylglucosamine-1-phosphate | 0.701 | 1605188-1605495 |
| | | transferase, and β subunits | | |
| 5380 | 1240 | K intermediate/small conductance Ca- | 8.029 | 1795510-1795838 |
| | | activated channel, subfamily N, member 4 | | |
| 5799 | 1146 | lysosomal trafficking regulator | 0.206 | 1944185-1944541 |
| 7480 | 768 | endoplasmic reticulum protein 29 | 24.355 | 2526951-2527343 |
| 8119 | 595 | serglycin | 9.946 | 2738723-2739031 |
| 3157722 | 251 | forkhead box A1 | 0.147 | 3261005-3261104 |

[0371] In some embodiments, the protein that affects protein secretion is a molecular chaperone selected from the group consisting of: Hsp40 (e.g., CHO cell SEQ ID NOs:677203-677558), HSP47 (e.g., CHO cell SEQ ID NOs:777036-777317), HSP60 (e.g., CHO cell SEQ ID NOs: 494743-495086), Hsp70 (e.g., CHO cell SEQ ID NOs:3147029-3147080), HSP90, HSP100, protein disulfide isomerase (e.g., CHO cell SEQ ID NOs:72748-72996), peptidyl prolyl isomerase (e.g., CHO cell SEQ ID NOs:38781-39067, NOs:1074139-1074475, NOs:1127061-1127426, NOs:1649170-1649515, NOs:2197146-2197532, NOs:2253978-2254373, NOs:2261765-2262058, NOs:2275330-2275633, NOs:2579547-2579908, and NOs:3115010-3115199), calnexin (e.g., CHO cell SEQ ID NOs:61559-61785), Erp57 (e.g., CHO cell SEQ ID NOs:774355-774677), and BAG-1.

[0372] In some embodiments, the protein that affects protein secretion is selected from the group consisting of: gamma-secretase, p115, a signal recognition particle (SRP) protein, secretin, and a kinase (e.g., MEK).

[0373] The production of immunogenic agents in cell culture can be negatively affected by proteins which have an affinity for the immunogenic agent or a molecule or factor that binds specifically to the immunogenic agent. For example, a number of heterologous proteins have been shown to bind the glycoproteins heparin and heparan sulfate at host cell surfaces. This can lead to the co-purification of heparin, heparan sulfate, and/or heparin/heparan sulfate-binding proteins with recombinant protein products, decreasing yield and reducing homogeneity, stability, biological activity, and/or other properties of the recovered proteins. Examples of heterologous proteins which have been shown to bind heparin and/or heparan sulfate include BMP3 (bone morphogenetic protein 3 or osteogenin), TNF-α, GDNF, TGF-β family members, and HGF. Therefore, in one embodiment, the production of a heterologous protein, such as BMP3, TNF-α, GDNF, TGF-β family members, or HGF, or another immunogenic agent in cultured host cells is enhanced by contacting the cells with a RNA effector molecule which modulates (e.g., inhibits) expression and/or production of heparin and/or heparan sulfate. In one embodiment, the level of heparin and/or heparan sulfate is reduced by modulating expression of a host cell enzyme involved in the production of heparin and/or heparan sulfate, such as a host cell xylotransferase (SEQ ID NOs:1554774-1555054).

[0374] In some embodiments, for example when in immunogenic agent is a viral particle, such as an influenza virus, target genes can include those involved in reducing sialic acid from the host cell surface, which reduces virus binding, and therefore increases recovery of the virus in cell culture media (i.e., less virus remains stuck on host cell membranes). These targets include: solute carrier family 35 (CMP-sialic acid transporter) member A1 (SLC35A1) (e.g., CHO gene inferred from M. muscuslus Slac35a1, GeneID:24060) (Gallus target gene sequences selected from SEQ ID NOs:3154345-3154368 and NOs:3154369-3154392) (CHO cell target gene sequences selected from SEQ ID NOs:464674-465055), solute carrier family 35 (UDP-galactose transporter), member A2 (SLC35A2) (e.g., CHO gene inferred from M. muscuslus Slc35a2, GeneID: 22232) UDP-N-acetylglucosamine 2-epimerase/N-acetylmannosamine kinase (GNE) (e.g., CHO gene inferred from M. muscuslus Gne, GeneID: 10090) (Gallus target gene sequences selected from SEQ ID NOs:3154297-3154320 and NOs:3154321-3154344) (CHO cell target gene sequences selected from SEQ ID NOs:2073971-2074368), cytidine monophospho-N-acetylneuraminic acid synthetase (Cmas) (e.g., CHO gene inferred from M. muscuslus Cmas, GeneID: 12764) (Gallus target gene sequences selected from SEQ ID NOs:3154249-3154272 and NOs:3154273-3154296) (CHO cell target gene sequences selected from SEQ ID NOs:1633101-1633406), UDP-Gal:βGlcNAc β1,4-galactosyltransferase (B4GalT1) (e.g., CHO gene inferred from M. muscuslus B4galT1, GeneID: 14595) (Gallus target gene sequences selected from SEQ ID NOs:3154153-3154176 and NOs:3154177-3154200) (CHO cell target gene sequences selected from SEQ ID NOs:2528454-2528763), and UDP-Gal:βGlcNAc β1,4-galactosyltransferase, polypeptide 6 (B4GalT6) (e.g., CHO gene inferred from M. muscuslus B4GalT6, GeneID: 56386) (Gallus target gene sequences selected from SEQ ID NOs:3154201-3154224 and NOs:3154225-3154248) (CHO cell target gene sequences selected from SEQ ID NOs:1635173-1635561).

[0375] Additional targets can include those involved in avian host sialidase (see Wang et al., 10 BMC Genomics 512 (2009)), because influenza binds to cell surface sialic acid residues, thus decreased sialidase can increase the rate of infection or purification: NEU2 sialidase 2 (cytosolic sialidase) (e.g., Gallus Neu2, GeneID: 430542) and NEU3 sialidase 3 (membrane sialidase) (e.g., Gallus Neu3, GeneID: 68823). Additional target genes include miRNA antagonists that can be used to determine if this is the basis of some viruses not growing well in cells, for example Dicer (dicer 1, ribonuclease type III) because knock-down of Dicer leads to a modest increase in the rate of infection (Matskevich et al., 88 J. Gen. Virol. 2627-35 (2007)); or ISRE (interferon-stimulated response element), as a decoy titrate TFs away from ISRE-containing promoters. Example genes and targets associated with sialidases (neuraminidases) are shown in Table 9, as follows:

TABLE 9
Example sialidases (neuraminidase)

| | | | Avg | siRNA |
|---|---|---|---|---|
| SEQ ID NO: | consL | Description | Coverage | SEQ ID NOs: |
| 4150 | 1513 | neuraminidase 1 | 11.083 | 1378888-1379212 |
| 4816 | 1365 | neuraminidase 2 | 6.612 | 1601657-1601952 |
| 7787 | 692 | neuraminidase 3 | 0.275 | 2628786-2629181 |

[0376] The use of bioprocesses for the manufacture of immunogenic agents at an industrial scale is often confounded by the presence of pathogens, such as active viral particles, and other adventitious agents (e.g., prions), often necessitating the use of expensive and time consuming steps for their detection, removal (e.g., viral filtration) and/or inactivation (e.g., heat treatment) to conform to regulatory procedures. Such problems can be exacerbated due to the difficulty in detecting and monitoring the presence of such viruses. Accordingly, in some embodiments, methods are provided for enhancing production of an immunogenic agent by modulating expression of a target gene affecting the susceptibility of a host cell to pathogenic infection. For example, in some embodiments, the target gene is a host cell protein that mediates viral infectivity, such as the transmembrane proteins XPR1 (e.g., CHO cell SEQ ID NOs:62021-62362), RDR, Flvcr, CCR5, CXCR4, CD4, Pit1, and Pit2 (e.g., CHO cell SEQ ID NOs:3068222-3068455).

[0377] Although a target sequence is generally 10 to 30 nucleotides in length, there is wide variation in the suitability of particular sequences in this range for directing cleavage of any given target RNA. Various software packages and the guidelines set out herein provide guidance for the identification of optimal target sequences for any given gene target, but an empirical approach can also be taken in which a “window” or “mask” of a given size (as a non-limiting example, 21 nucleotides) is literally or figuratively (including, e.g., in silico) placed on the target RNA sequence to identify sequences in the size range that can serve as target sequences. By moving the sequence “window” progressively one nucleotide upstream or downstream of an initial target sequence location, the next potential target sequence can be identified, until the complete set of possible sequences is identified for any given target size selected. This process, coupled with systematic synthesis and testing of the identified sequences (using assays as described herein or as known in the art) to identify those sequences that perform optimally can identify those RNA sequences that, when targeted with a RNA effector molecule agent, mediate the best inhibition of target gene expression. Thus, although the sequences identified herein represent effective target sequences, it is contemplated that further optimization of inhibition efficiency can be achieved by progressively “walking the window” one nucleotide upstream or downstream of the given sequences to identify sequences with equal or better inhibition characteristics.

[0378] Further, it is contemplated that for any sequence identified herein, further optimization could be achieved by systematically either adding or removing nucleotides to generate longer or shorter sequences and testing those and sequences generated by walking a window of the longer or shorter size up or down the target RNA from that point. Coupling this approach to generating new candidate targets with testing for effectiveness of RNA effector molecules based on those target sequences in an inhibition assay as known in the art or as described herein can lead to further improvements in the efficiency of inhibition. Further still, such optimized sequences can be adjusted by, e.g., the introduction of modified nucleotides as described herein or as known in the art, addition or changes in overhang, or other modifications as known in the art and/or discussed herein to further optimize the molecule (e.g., increasing serum stability or circulating half-life, increasing thermal stability, enhancing transmembrane delivery, targeting to a particular location or cell type, increasing interaction with silencing pathway enzymes, increasing release from endosomes, etc.) as an expression inhibitor.

### III. BIOCONTAMINATION

[0379] Cell lines used commonly in biotechnology manufacturing processes, such as CHO cells, have been demonstrated to produce retrovirus-like particles. Moreover, MMV (murine minute virus) contamination in a large-scale biologics manufacturing process has occurred, and was attributed to adventitious contamination of raw materials used in production. Consequently, international regulatory agencies require biologics manufacturers to employ a comprehensive viral clearance strategy, including characterization of cell lines and raw materials, employing robust viral inactivation and removal steps, and testing of process intermediates and final products. Multiple orthogonal steps, including chromatographic methods, physiochemical inactivation (e.g., low pH, solvent detergent), and size exclusion-based filtration, together yield cumulative inactivation and removal of viruses. See, e.g., Marques et al., 25 Biotech. Prog. 483-91 (2009); Khan et al., 52 Biotech. Appl. Biochem. 293-301 (2009). Viral clearance and clearance validation are some of the most time-consuming and revenue-eating activities in bioprocessing: Downstream processing accounts for about 70% of the total biomanufacturing cost. Chochois et al., 36 Bioprocess Intl. (June, 2009). Downstream bioprocessing filter products, alone, cost biotechnology and vaccine makers more than $1 billion annually.

[0380] Thus, in further embodiments, production is enhanced by introducing into the cell a RNA effector molecule that inhibits expression of viral proteins in host cells. More specifically, for example, latent DNA viruses (such as herpesviruses) and endogenous retroviruses (ERVs), or retroviral elements are likely present in all vertebrates. Endogenous retroviral sequences are an integral part of eukaryotic genomes, and although the majority of these sequences are defective, some can produce infectious virus, either spontaneously or upon long-term culture. ERV virus production can also be induced upon treatment with various chemical or other agents that can be part of the normal production system. Additionally, although many endogenous retroviruses do not readily re-infect their own cells, they can infect other species in vitro and in vivo. For example, two of three subgroups of pig ERVs (PERVs), can infect human cells in vitro.

[0381] There are at least twenty-six distinct groups of human endogenous retroviruses (HERVs); and bird, mouse, cat, and pig harbor replication-competent ERVs that are capable of interacting with related exogenous virus. Retrovirus-induced tumorigenesis can involve the generation of a novel pathogenic virus by recombination between replication-competent and -defective sequences and/or activation of a cellular oncogene by a long terminal repeat (LTR) due to upstream or downstream insertion of retrovirus sequences. Thus, the activation of an endogenous, infectious retrovirus in a cell substrate that is used for the production of biologics is an important safety concern, especially in the case of live, viral vaccines, where minimal purification and inactivation steps are used in order to preserve high vaccine potency.

[0382] Adventitious viruses represent a major risk associated with the use of cell-substrate derived biologicals, including vaccines for human use. The possibility for viral contamination exists in primary cultures and established cultures, as well as Master Cell Banks, end-of-production cells, and bulk harvest fluids. For example, this is a major obstacle to the use of neoplastic-immortalized cells for which the mechanism of transformation is unknown, because these could have a higher risk of containing oncogenic viruses. Extensive testing for the presence of potential extraneous agents is therefore required to ensure the safety of the vaccines. The most common scenarios for adventitious viral contamination of biologics include bovine viral diarrhoea virus in foetal bovine serum; porcine parvovirus in porcine substrates; and murine minute virus, reovirus, vesivirus and Cache Valley virus in CHO cell-derived bulk harvests. The three last-named viral entities are believed to be introduced via bovine serum used during the manufacturing process (during scale-up or during the entire process).

[0383] During the production of live attenuated viral vaccines, removal of contaminating viral particles, nucleic acid, or proteins is problematic because any antiviral approach must leave the viral product intact and immunogenic. Indeed, endogenous avian viral particles have been found in commercially released human measles and mumps vaccines derived from chicken embryo fibroblasts. Moreover, endogenous viral proteins, particularly envelop proteins, often inhibit the efficiency of recombinant viral vectors used in creating transformed cell lines. Further, endogenous virus can aggravate the immune response of the host cell, often triggered during viral production or retroviral transduction. Hence, there remains a need for techniques that inhibit adventitious, latent and endogenous viral activity, and thus increase purity and yield of immunogenic agents produced in cells.

[0384] The present invention provides for enhancing production of an immunogenic agent by introducing into the cell a RNA effector molecule to modulate expression of a target gene, optionally encoding a protein, that is involved with the expression of an adventitious, latent or endogenous virus. Thus, in some embodiments, the production of an immunogenic agent in a host cell is enhanced by introducing into the cell a RNA effector molecule that inhibits expression of a latent or endogenous viral protein such that the infectivity and/or load of the desired immunogenic agent in the cell is increased.

[0385] For example, a particular advantage of cell-culture based inactivated influenza virus or influenza viral antigens is the absence of egg-specific proteins that might trigger an allergic reaction against egg proteins. Therefore, the use according to the invention is especially suitable for the prophylaxis of influenza virus infections, particularly in populations that constitute higher-risk groups, such as asthmatics, those with allergies, and also people with suppressed immune systems and the elderly.

[0386] The cultivation conditions under which a virus strain is grown in cell culture also are of great significance with respect to achieving an acceptably high yield of the strain. In order to maximize the yield of a desired virus strain, both the host system and the cultivation conditions must be adapted specifically to provide an environment that is advantageous for the production of a desired virus strain. Many viruses are restricted to very specific host systems, some of which are very inefficient with regard to virus yields. Some of the mammalian cells which are used as viral host systems produce virus at high yields, but the tumorigenic nature of such cells invokes regulatory constraints against their use for vaccine production.

[0387] The problems arising from the use of serum in cell culture and/or protein additives derived from an animal or human source added to the culture medium, e.g., the varying quality and composition of different batches and the risk of contamination with mycoplasma, viruses or BSE-agent, are well-known. In general, serum or serum-derived substances like albumin, transferrin or insulin can contain unwanted agents that can contaminate the culture and the immunogenic agents produced therefrom. Furthermore, human serum derived additives have to be tested for all known viruses, like hepatitis or HIV, which can be transmitted by serum. Bovine serum and products derived therefrom, for example trypsin, bear the risk of bovine spongiform encephalitis-contamination. In addition, all serum-derived products can be contaminated by still unknown agents. Therefore, cells and culture conditions that do not require serum or other serum derived compounds are being pursued.

[0388] For example, the production of smallpox vaccine, modified vaccinia virus Ankara (MVA) is amplified in cell cultures of primary or secondary chicken embryo fibroblasts (CEF). The CEF are obtained from embryos of chicken eggs that have been incubated for 10 to 12 days, from which the cells are then dissociated and purified. These primary CEF cells can either be used directly or after one further cell passage as secondary CEF cells. Subsequently, the primary or secondary CEF cells are infected with the MVA. For the amplification of MVA the infected cells are incubated for 2 to 3 days at 37° C. See, e.g., Meyer et al., 72 J. Gen. Virol. 1031-38 (1991); Sutter et al., 12 Vaccine 1032-40 (1994). Many pox viruses replicate efficiently in CEF incubated at temperatures below 37° C., such as 30° C. See U.S. Pat. No. 6,924,137.

[0389] The use of established mammalian cell lines, such as Madin-Darby canine kidney (MDCK) line, has been successful in replicating some viral strains. Nevertheless, a number of virus strains will not replicate in the MDCK line. In addition, fears over possible adverse effects associated with employing cells with a tumorigenic potential for human vaccine production have precluded the use of MDCK, a highly transformed cell line, in this context.

[0390] Other attempts at developing alternative vaccine production methods have been undertaken. U.S. Pat. No. 4,783,411 discusses a method for preparing influenza vaccines in goldfish cell cultures. The virus particles for infecting the goldfish cell cultures, after their establishment, were obtained from chicken embryo cultures or from infected CD-I strain mice. The virus is passaged at least twice in the goldfish cell cultures, resulting in an attenuated influenza virus which can be used as a live vaccine. Additionally, African green monkey kidney epithelial cells (Vero) and chicken embryo cells (CEC) have been adapted to grow and produce influenza virus and recombinant influenza proteins in serum-free, protein-free media. See WO 96/015231.

[0391] Although the use of protein and serum free media limits the risk from adventitious virus contamination, it does not address the continued risk posed by latent viruses or endogenous retroviruses that exist in cell banks. The activation of an endogenous, infectious retrovirus in a cell substrate that is used for the production of biologics is an important safety concern, especially in the case of live, viral vaccines, where there are minimal purification and inactivation steps in order to preserve high vaccine potency.

[0392] In some embodiments, an RNA effector molecule targeting a vesivirus can be used with the methods and compositions described herein. Exemplary RNA effector molecules that target vesivirus are include, but are not limited to, those in Table 63 below:

TABLE 63
Duplexes targeting vesivirus with
modified nucleotides

| Duplex | Sense/ | |
|---|---|---|
| No | Antisense | Sequence |
| 1 | S | cuGuGGcAAGAcuAcucuudTsdT |
| | AS | AAGAGuAGUCUUGCcAcAGdTsdT |
| 2 | S | ccuAcAcAGGcAAcGAGGudTsdT |
| | AS | ACCUCGUUGCCUGUGuAGGdTsdT |
| 3 | S | GAAucAAAuuucAcAGAAudTsdT |
| | AS | AUUCUGUGAAAUUUGAUUCdTsdT |
| 4 | S | GAGuuGcGAccuGuGGAuAdTsdT |
| | AS | uAUCcAcAGGUCGcAACUCdTsdT |
| 5 | S | cAAGuGGGAuucAAcucAAdTsdT |
| | AS | UUGAGUUGAAUCCcACUUGdTsdT |
| 6 | S | GGAAcAucuAcGAuuAcAudTsdT |
| | AS | AUGuAAUCGuAGAUGUUCCdTsdT |
| 7 | S | GGcAAGAcuAcucuuGcuudTsdT |
| | AS | AAGcAAGAGuAGUCUUGCCdTsdT |
| 8 | S | cAGGcAAcGAGGuGuGcAudTsdT |
| | AS | AUGcAcACCUCGUUGCCUGdTsdT |
| 9 | S | GuuGAGAuGGuAAAuAcAAdTsdT |
| | AS | UUGuAUUuACcAUCUcAACdTsdT |
| 10 | S | GcuAAGAGAAGAcucAuuudTsdT |
| | AS | AAAUGAGUCUUCUCUuAGCdTsdT |
| 11 | S | cAAccAccAAAcGuAAcAAdTsdT |
| | AS | UUGUuACGUUUGGUGGUUGdTsdT |
| 12 | S | cAuGuucAccuAuGGuGAudTsdT |
| | AS | AUcACcAuAGGUGAAcAUGdTsdT |
| 13 | S | cAAGAcuAcucuuGcuuAudTsdT |
| | AS | AuAAGcAAGAGuAGUCUUGdTsdT |
| 14 | S | GcAucAuuGAuGAAuucGAdTsdT |
| | AS | UCGAAUUcAUcAAUGAUGCdTsdT |
| 15 | S | GGAAAGGuGuucuccuccAdTsdT |
| | AS | UGGAGGAGAAcACCUUUCCdTsdT |
| 16 | S | GAuGuuucuGAuGccAuuAdTsdT |
| | AS | uAAUGGcAUcAGAAAcAUCdTsdT |
| 17 | S | GcuGuuGcuAcGcuuucuudTsdT |
| | AS | AAGAAAGCGuAGcAAcAGCdTsdT |
| 18 | S | GuGAuGAuGGcGuGuAcAudTsdT |
| | AS | AUGuAcACGCcAUcAUcACdTsdT |
| 19 | S | cuAcucuuGcuuAuGccAudTsdT |
| | AS | AUGGcAuAAGcAAGAGuAGdTsdT |
| 20 | S | cGAcucuAAuccGGAAucAdTsdT |
| | AS | UGAUUCCGGAUuAGAGUCGdTsdT |
| 21 | S | ccuccAAAuAcGuGAuuAudTsdT |
| | AS | AuAAUcACGuAUUUGGAGGdTsdT |
| 22 | S | cuGAuGccAuuAuGucuAudTsdT |
| | AS | AuAGAcAuAAUGGcAUcAGdTsdT |
| 23 | S | GGuAuGccAcuAAccucuAdTsdT |
| | AS | uAGAGGUuAGUGGcAuACCdTsdT |
| 24 | S | GcGuGuAcAucGuAccAAAdTsdT |
| | AS | UUUGGuACGAUGuAcACGCdTsdT |
| 25 | S | cuucuGuucucAAucucAAdTsdT |
| | AS | UUGAGAUUGAGAAcAGAAGdTsdT |
| 26 | S | GAcucuAAuccGGAAucAAdTsdT |
| | AS | UUGAUUCCGGAUuAGAGUCdTsdT |
| 27 | S | cAAAuAcGuGAuuAuGAcAdTsdT |
| | AS | UGUcAuAAUcACGuAUUUGdTsdT |
| 28 | S | GcAuGAAuucGGcuucAuudTsdT |
| | AS | AAUGAAGCCGAAUUcAUGCdTsdT |
| 29 | S | cGuGuAcAucGuAccAAAudTsdT |
| | AS | AUUUGGuACGAUGuAcACGdTsdT |
| 30 | S | cuGuucucAAucucAAuAudTsdT |
| | AS | AuAUUGAGAUUGAGAAcAGdTsdT |
| 31 | S | cucuAAuccGGAAucAAAudTsdT |
| | AS | AUUUGAUUCCGGAUuAGAGdTsdT |
| 32 | S | cGuGAuuAuGAcAucAAAudTsdT |
| | AS | AUUUGAUGUcAuAAUcACGdTsdT |
| 33 | S | GuAccGcAAGGGAAuGcAudTsdT |
| | AS | AUGcAUUCCCUUGCGGuACdTsdT |
| 34 | S | cAAccAcuGccucuuAGuudTsdT |
| | AS | AACuAAGAGGcAGUGGUUGdTsdT |
| 35 | S | cuGuuAuGccuAAuGucuudTsdT |
| | AS | AAGAcAUuAGGcAuAAcAGdTsdT |
| 36 | S | cAAuAuuGAccAccAcGAudTsdT |
| | AS | AUCGUGGUGGUcAAuAUUGdTsdT |
| 37 | S | cGGAAucAAAuuucAcAGAdTsdT |
| | AS | UCUGUGAAAUUUGAUUCCGdTsdT |
| 38 | S | GuGAuuAuGAcAucAAAuAdTsdT |
| | AS | uAUUUGAUGUcAuAAUcACdTsdT |
| 39 | S | cAAGGGAAuGcAucGGuAudTsdT |
| | AS | AuACCGAUGcAUUCCCUUGdTsdT |
| 40 | S | GGGuGuGcAcucAuccAAudTsdT |
| | AS | AUUGGAUGAGUGcAcACCCdTsdT |
| 41 | S | cuuucuuccuAuGGAcuAAdTsdT |
| | AS | UuAGUCcAuAGGAAGAAAGdTsdT |
| 42 | S | cAcGAuGccuAcAcAGGcAdTsdT |
| | AS | UGCCUGUGuAGGcAUCGUGdTsdT |
| 43 | S | GGAAucAAAuuucAcAGAAdTsdT |
| | AS | UUCUGUGAAAUUUGAUUCCdTsdT |
| 44 | S | GAuuAuGAcAucAAAuAAudTsdT |
| | AS | AUuAUUUGAUGUcAuAAUCdTsdT |
| 45 | S | GcAucGGuAuuGcGuuGAudTsdT |
| | AS | AUcAACGcAAuACCGAUGCdTsdT |
| 46 | S | GGAGAAGGGuGuuGAuGuudTsdT |
| | AS | AAcAUcAAcACCCUUCUCCdTsdT |
| 47 | S | GcGcuucuuGAcAGAAAuudTsdT |
| | AS | AAUUUCUGUcAAGAAGCGCdTsdT |

[0393] Endogenous Retrovirus

[0394] Retroviruses replicate by reverse transcription, mediated by a RNA-dependent DNA polymerase (reverse transcriptase), encoded by the viral pol gene. Retroviruses also carry at least two additional genes: the gag gene encodes the proteins of the viral skeleton, matrix, nucleocapsid, and capsid; the env gene encodes the envelope glycoproteins. Additionally, retroviral transcription is regulated by promoter regions or “enhancers” situated in highly repeated regions (LTRs) which are present at both ends of the retroviral genome.

[0395] During the infection of a cell, reverse transcriptase makes a DNA copy of the RNA genome; this copy can then integrate into the host cell genome. Retroviruses can infect germ cells or embryos at an early stage and be transmitted by vertical Mendelian transmission. These endogenous retroviruses (ERVs) can degenerate during generations of the host organism and lose their initial properties. Some ERVs conserve all or part of their properties or of the properties of their constituent motifs, or acquire novel functional properties having an advantage for the host organism. These retroviral sequences can also undergo, over the generations, discrete modifications which will be able to trigger some of their potential and generate or promote pathological processes.

[0396] Human endogenous retroviral sequences (HERVs) represent a substantial part of the human genome. These retroviral regions exist in several forms: complete endogenous retroviral structures combining gag, pol and env motifs, flanked by repeat nucleic sequences which exhibit a significant analogy with the LTR-gag-pol-env-LTR structure of infectious retroviruses; truncated retroviral sequences, for example the retrotransposons lack their env domain; and the retroposons that lack the env and LTR regions. ERVs capable of shedding virus particles are often called type C ERVs.

[0397] Important ERVs include human teratocarcinoma retrovirus (HTDV), or HERV-K, an endogenous retrovirus known to produce viral particles from endogenous provirus. Lower et al., 68 J. Gen. Virol. 2807-15 (1987); Mold et al., 4 J. Biomed. Sci. 78082 (2005). HERV-R is another important ERV, because it has been found to be expressed in many tissues, including the adrenal cortex and various adrenal tumors such as cortical adenomas and pheochromocytomas. Katsumata et al., 66 Pathobiology 209-15 (1998). Murine leukemia virus (MLV) is another important ERV, that produces infective virus particles in rodent-derived cell culture upon induction. Khan & Sears, 106 Devel. Biol. 387-92 (2001). Indeed, cell culture changes that significantly alter the metabolic state of the cells and/or rates of protein expression (e.g., pH, temperature shifts, sodium butyrate addition) measurably increased the rate of endogenous retroviral synthesis in CHO cells. Brorson et al., 80 Biotech. Bioengin. 257-67 (2002).

[0398] An on-line database, called HERVd—Human Endogenous Retrovirus Database (NAR Molecular Biology Database Collection entry number 0495), has been compiled from the human genome nucleotide sequences, obtained mostly in the various ongoing Human Genome Projects. This provides a relatively simple and fast environment for screening HERVs, and makes it possible to continuously improve classification and characterization of retroviral families. The HERVd database now contains retroviruses from more than 90% of the human genome. Additionally, ERV sequences can be obtained readily through the National Institutes of Health's on-line “Entrez Gene” site.

[0399] Further regarding ERVs, embodiments of the present invention target at least one gene or LTR of primate/human Class I Gamma ERVs pt01-Chr10r-17119458, pt01-Chr5-53871501, BaEV, GaLV, HERV-T, HERV-R (HERV-3, ERV3 env gene, GeneID: 2086), HERV-E (ERVE1, GeneID: 85314), HERV-ADP, HERV-I, MER4like, HERV-FRD (ERVFRD1, Env protein, GeneID: 405754; P. troglodytes Env protein, GeneID: 471856; Rattus norvegicus Herv-frd Env polyprotein, GeneID: 290348), HERV-W (ERVWE2, ERV-W, env(C7), member 2, P. troglodytes, GeneID: 100190905; HERVWEL ERV-W, env(C7), member 1, GeneID: 30816), HERV-H(HHLA1, HERV-H LTR-associating protein 1, GeneID:10086, P. troglodytes GeneID: 736282; Hhla1, mouse GeneID: 654498; HHLA2, HERV-H LTR-associating protein 2, GeneID: 11148; HHLA3, HERV-H LTR-associating protein 3, GeneID: 11147; Xenopus hhla2, GeneID:734131), HERVH-RTVLH2, HERVH-RGH2, HERV-Hconsensus, HERV-Fcl; primate/human Epsilon endogenous retrovirus hg15-chr3-152465283; primate/human Intermediate (epsilon-like) HERVL66; primate/human Class III Spuma-like ERVs HSRV, HFV, HERV-S, HERV-L, HERVL40, HERVL74; primate/human Delta ERV HTLV-1, HTLV-2; primate/human Lenti ERV (lentivirus) HIV-1, HIV-2; primate/human Class II, Beta ERVs MPMV, MMTV, HML1, HML2, HML3, HML4, HML7, HML8, HML5, HML10, HML6, HML9, human teratocarcinoma-derived retrovirus (HTDV/HERV-K), or HERV-V (HERV-V1 Enyl, GeneID: 147664; HERV-V2, HSV2, GeneID: 100271846).

[0400] Additional primate ERV genes that can be targeted by the methods of the present invention include LOC471586 (similar to ERV-BabFcenv provirus ancestral Env polyprotein, P. troglodytes GeneID: 471586), LOC470639 (similar to ERV-BabFcenv provirus ancestral Env polyprotein, P. troglodytes GeneID: 470639); LOC100138322 (similar to HERV-K_{—}7p22.1 provirus ancestral Pol protein, Bos taurus GeneID: 10013822; LOC110138431 (similar to HERV-K_{—}1q22 provirus ancestral Pol protein, B. taurus GeneID: 100138431; LOC100137757 (similar to HERV-K_{—}6q14.1 provirus ancestral Gag-Pol polyprotein, B. taurus GeneID: 100137757); LOC100141085 (similar to HERV-K_{—}8p23.1 provirus ancestral Pol protein, B. taurus GeneID: 100141085); LOC100138106 (similar to HERV-F(c)1_Xq21.33 provirus ancestral Gag polyprotein, B. taurus GeneID: LOC100138106); LOC100140731 (similar to HERV-W_{—}3q26.32 provirus ancestral Gag polyprotein B. taurus, GeneID: 100140731); LOC100139657 (similar to HERV-W_{—}3q26.32 provirus ancestral Gag polyprotein B. taurus GeneID: 100139657).

[0401] In other embodiments of the present invention, the ERV is rodent Class II, Beta ERV mouse mammary tumor (MMTV, GeneID: 2828729; MMTVgp7, GeneID: 1491863; MMTV env GeneID: 1491862; MMTVgp1, GeneID: 1724724; MMTVgp2, GeneID: 1724723; MMTV pol GeneID: 1491865; MMTV pro, GeneID: 1491865; MMTV gag, GeneID: 1491864); rodent Class I Gamma ERV MLV (Mlv1, mouse GeneID: 108317); feline Class I Gamma ERV FLV; ungulate Class I Gamma ERV PERV; ungulate Delta ERV BLV; ungulate lentivirus Visna, EIAV; ungulate Class II, Beta ERV JSRV; avian Class III, Spuma-like ERVs gg01-chr7-7163462; gg01-chrU-52190725, gg01-Chr4-48130894; avian Alpha ERVs ALV (ALV pol GeneID: 1491910; ALV p2, GeneID: 1491909; ALV p10, GeneID: 1491908; ALV env, GeneID: 1491907; ALV transmembrane protein, tm, GeneID: 1491906; ALV trans-acting factor, GeneID: 1491911), gg01-chr1-15168845; avian Intermediate Beta-like ERVs gg01-chr4-77338201; gg01-ChrU-163504869, gg01-chr7-5733782; Reptilian Intermediate Beta-like ERV Python-molurus; Fish Epsilon ERV WDSV; fish Intermediate (epsilon-like) ERV SnRV; Amphibian Epsilon ERV Xen1; Insect Errantivirus ERV Gypsy; or Tyl in Saccharomyces cerevisiae, yeast ORF161 (ERV-1-like protein, Ectocarpus siliculosus virus 1, GeneID: 920716).

[0402] Further regarding ERVs, as noted herein the HERV-K ERVs are particularly relevant because they can be activated by a variety of stimuli. Hence, aspects of the present invention target genes of the HERV-K family, including HERV-K3, GeneID: 2088; HERV-K2, GeneID: 2087; HERV-K_{—}11q22.1 provirus ancestral Pol protein, GeneID: 100133495; HERV-K7, GeneID: 449619; HERV-K6, GeneID: 64006; HERV-K(1), ERVK4, GeneID: 60359; and HERV-K(II), ERVK5, GeneID: 60358; LOC100133495 (HERV-K_{—}11q22.1 provirus ancestral Pol protein, GeneID: 100133495).

[0403] As described herein, in particular aspects of the present invention the target gene is an ERV env gene, for example eERV family W, env(C7), member 1 (ERVWE1), GeneID: 30816; LOC147664 (HERV-V 1 or EnvV1), GeneID: 147664; HERV-FRD provirus Env polyprotein (ERVFRDE1), GeneID: 405754 and GeneID: 471856; ERV sequence K, 6 (ERVK6 or HERV-K108), GeneID: 64006; ERV sequence 3 envelope protein (ERV3), GeneID: 2086 and GeneID: 100190893; ALV Env protein, GeneID: 1491907, or the Env protein of HERV-K18.

[0404] In a particular embodiment, the expression of HERV-K Enyl can be modulated by use of a corresponding RNA effector molecule having an antisense strand comprising at least 16 contiguous nucleotides (e.g., at least 17, at least 18, at least 19 nucleotides) of an oligonucleotide nucleotide having a sequence selected from the group consisting of SEQ ID NOs:3287270-3287569 (sense) and SEQ ID NOs:3287570-3287869 (antisense).

[0405] In addition to targeting ERV genes and regulatory sequences, some embodiments of the present invention target ERV receptors. For example, human solute carrier family 1 (neutral amino acid transporter), member 5 (SLC1A5, GeneID: 6510) is a receptor for Simian type D retrovirus and feline endogenous RD-114 virus. Solute carrier family 1 (glutamate/neutral amino acid transporter), member 4 (Slc1a4, GeneID: 55963) and member 5 (Slc1a5, GeneID: 20514) are mouse versions of related proteins. Human solute carrier family 1 (glutamate/neutral amino acid transporter), member 4 (SLC1A4, GeneID: 6509), is used as receptor by HERV-W Env glycoprotein. Thus, inhibition of cellular viral receptors can decrease receptor interference, latent, endogenous or adventitious viral infection, and thus increase the production of immunogenic agent in the cell.

[0406] Latent Virus

[0407] Bornaviruses are genus of non-segmented, negative-sense, non-retroviral RNA viruses that establish persistent infection in the cell nucleus. Elements homologous to the bornavirus nucleoprotein (N) gene exist in the genomes of several mammalian species, and produce mRNA that encodes endogenous Borna-like N (EBLN) elements. Horie et al., 463 Nature 84-87 (2010). Hence, in some embodiments of the invention, the target gene is a bornaviral gene.

[0408] Latent DNA viruses that can be targeted by the methods of the present invention include adenoviruses. For example, species of C serotype adenovirus can establish latent infection in human tissues. See Garnett et al., 83 J. Virol. 2417-28 (2000). Avian adenovirus and adenovirus-associated virus (AAV) proteins have been produced by specific-pathogen-free chicks, indicating that avian AAV can exist as a latent infection in the germ line of chickens. Sadasiv et al., 33 Avian Dis. 125-33 (1989); see also Katano et al., 36 Biotechniq. 676-80 (2004). In some embodiments of the invention, the target gene is a latent DNA virus. For example, the target gene can be the latent membrane protein (LMP)-2A from HHV-4 (EBV), GeneID: 3783751, which protein also transactivates the Env protein of HERV-K18.

[0409] Circoviridae are DNA viruses that exhibit a latent phase. Porcine circoviridae type 1 (PCV 1) was found to have contaminated Vero cell banks from which rotavirus vaccine was made, causing a temporary FDA hold on administration of the vaccine. Assoc. Press, March 23 (2010). The genomes of PCV1 virus are provided herein are PCV1 AY193712.1 (SEQ ID NO:3154148), PCV1 EF533941.1 (SEQ ID NO:3154149), PCV1 FJ475129.2 (SEQ ID NO:3154150), PCV1 GU371908.1 (SEQ ID NO:3154151), and PCV1 GU722334.1 (SEQ ID NO:3154152).

[0410] An embodiment of the present invention provides for a RNA effector molecule that inhibits a PCV1 rep or cap gene. The rep gene of PCV1 is indispensable for replication of viral DNA. Mankertz & Hillenbrand, 279 Virol. 429-38 (2001). In a particular embodiment, the expression of PCV 1 Rep protein can be modulated by use of a corresponding RNA effector molecule having an antisense strand comprising at least 16 contiguous nucleotides (e.g., at least 17, at least 18, at least 19 nucleotides) of an oligonucleotide nucleotide having a sequence selected from the group consisting of SEQ ID NOs:3152824-3153485 (sense), SEQ ID NOs:3153486-3154147 (antisense), and the tables provided herein.

[0411] In another particular embodiment, the expression of PCV1 Cap protein can be modulated by use of a corresponding RNA effector molecule having an antisense strand comprising at least 16 contiguous nucleotides (e.g., at least 17, at least 18, at least 19 nucleotides) of an oligonucleotide nucleotide having a sequence selected from the group consisting of SEQ ID NOs:3154731-3154778 (sense), SEQ ID NOs:3154778-3154826 (antisense), and the tables provided herein.

[0412] Adventitious Virus

[0413] As used herein an “adventitious virus” or “adventitious viral agent” refers to a virus contaminant present within a immunogenic agent, including, for example, vaccines, cell lines and other cell-derived products. Regarding vaccine products, for example, exogenous, adventitious ALV was found in commercial Marek's Disease vaccines propagated in CEF or DEF cell cultures by different manufacturers. Moreover, some of these vaccines were also contaminated with endogenous ALV. Fadly et al., 50 Avian Diseases 380-85 (2006); Zavala & Cheng, 50 Avian Diseases 209-15 (2006).

[0414] Other embodiments of the present invention target the genes of adventitious animal viruses, including vesivirus, porcine circovirus, lymphocytic choriomeningitis virus, porcine parvovirus, adenoassociated viruses, reoviruses, rabies virus, papillomavirus, herpesviruses, leporipoxviruses, and leukosis virus (ALV), hantaan virus, Marburg virus, SV40, SV20, Semliki Forest virus (SFV), simian virus 5 (sv5), feline sarcoma virus, porcine parvovirus, adenoassociated viruses (AAV), mouse hepatitis virus (MHV), Moloney murine leukemia virus (MoMLV or MMLV, gag protein GeneID: 1491870), murine leukemia virus (MuLV), pneumonia virus of mice (PVM), Theiler's encephalomyelitis virus (THEMV), murine minute virus (MMV or MVM, GeneID: 2828495, vp1, GeneID: 148592; vp, GeneID: 1489591; ns1, GeneID: 1489590), mouse adenovirus (MAV), mouse cytomegalovirus (MCMV), mouse rotavirus (EDIM), Kilham rat virus (KRV), Toolan's H-1 virus, Sendai virus (SeV, also known as murine parainfluenza virus type 1 or hemagglutinating virus of Japan (HVJ)), rat coronavirus (RCV or sialodacryoadenitis virus (SDA)), pseudorabies virus (PRV), Cache Valley virus, bovine diarrhea virus, bovine parainfluenza virus type 3, bovine respiratory syncytial virus, bovine adenoviruses, bovine parvoviruses, bovine herpesvirus 1 (infectious bovine rhinotracheitis virus), other bovine herpesviruses, bovine reovirus, other bovine herpesviruses, bovine reovirus, bluetongue viruses, bovine polyoma virus, bovine circovirus, and orthopoxviruses other than vaccinia, pseudocowpox virus (a widespread parapoxvirus that can infect humans), papillomavirus, herpesviruses, leporipoxviruses, or exogenous retroviruses.

[0415] In a particular embodiment, the expression of MMLV Gag protein can be modulated by use of a corresponding RNA effector molecule having an antisense strand comprising at least 16 contiguous nucleotides (e.g., at least 17, at least 18, at least 19 nucleotides) of an oligonucleotide nucleotide having a sequence selected from the group consisting of SEQ ID NOs:3287870-3288118: (sense) and SEQ ID NOs:3288119-3288367 (antisense).

[0416] In a particular embodiment, the expression of vesivirus can be modulated by use of a corresponding RNA effector molecule having an antisense strand comprising at least 16 contiguous nucleotides (e.g., at least 17, at least 18, at least 19 nucleotides) of an oligonucleotide nucleotide having a sequence selected from the group consisting of SEQ ID NOs: 3152604-3152713 and the tables provided herein.

[0417] Other embodiments target human-origin adventitious agents including HIV-1 and HIV-2; human T cell lymphotropic virus type I (HTLV-I) and HTLV-II; human hepatitis A, B, and C viruses; human cytomegalovirus (CMV); EBV; HHV 6, 7, and 8; human parvovirus B19; reoviruses; polyoma (JC/BK) viruses; SV40 virus; human coronaviruses; human papillomaviruses; influenza A, B, and C viruses; various human enteroviruses; human parainfluenza viruses; and human respiratory syncytial virus.

[0418] Parvoviridae are single-stranded DNA viruses with genomes of about 4 to 5 kilobases. This family includes: Dependovirus such as human helper-dependent adeno-associated virus (AAV) serotypes 1 to 8, autonomous avian parvoviruse, and adeno associated viruses (AAV 1-8); Erythrovirus such as bovine, chipmunk, and autonomous primate parvoviruses, including human parvoviruses B19 (the cause of Fifth disease) and V9; and Parvovirus that includes parvoviruses of other animals and rodents, carnivores, and pigs, including MVM. These parvoviruses can infect several cell types and have been described in clinical samples. AAVs, in particular, have been implicated in decreased replication, propagation, and growth of other virus.

[0419] MVM gains cell entry by deploying a lipolytic enzyme, phospholipase A2 (PLA2), that is expressed at the N-terminus of virion protein 1 (VP1, also called MMVgp3), the MVM minor coat protein, GeneID: 1489592. Farr et al., 102 PNAS 17148-53 (2005). Other MVM targets can be chosen from MVM VP (also called MMVgp2), GeneID: 1489591; and MVM non-structural, initiator protein (NS1, also called MMVgp1), GeneID: 1489590. In a particular embodiment, the expression of MVM NS2 protein can be modulated by use of a corresponding RNA effector molecule having an antisense strand comprising at least 16 contiguous nucleotides (e.g., at least 17, at least 18, at least 19 nucleotides) of an oligonucleotide nucleotide having a sequence selected from the group consisting of SEQ ID NOs:3285524-3285827 (sense) and SEQ ID NOs:3285828-3286131 (antisense).

[0420] Polyomaviruses are double-stranded DNA viruses that can infect, for example, humans, primates, rodents, rabbits, and birds. Polyomaviruses (PyV) include SV40, JC and BK viruses, Murine pneumonotropic virus, hamster PyV, murine PyV virus, and Lymphotropic papovavirus (LPV, the African green monkey papovavirus). The sequences for these viruses are available via GenBank. See also U.S. Patent Pub. No. 2009/0220937. Because of their tumorigenic and oncogenic potential, it is important to eliminate these viruses in cell substrates used for vaccine production.

[0421] Papillomaviridae contains more that 150 known species representing varying host-specificity and sequence homology. They have been identified in mammals (humans, simians, bovines, canines, ovines) and in birds. Majority of the human Papillomaviruses (HPVs), including all HPV types traditionally called genital and mucosal HPVs belong to supergroup A. Within supergroup A, there are 11 groups; the most medically important of these are the human Papillomaviruses HPV 16, HPV 18, HPV 31, HPV 45, HPV 11, HPV 6 and HPV 2. Each of these has been reported as “high risk” viruses in the medical literature.

[0422] Exogenous retroviruses are known to cause various malignant and non-malignant diseases in animals over a wide range of species. These viruses infect most known animals and rodents. Examples include Deltaretroidvirus (HTLV-1, -2, -3, and -4, STLV-1, -2, and -3), Gammaretrovirus (MLV, PERV), Alpharetrovirus (Avian leucosis virus and Avian endogenous virus), and HIV 1 and 2.

[0423] Other viral families which are potential adventitious contaminants for which embodiments of the present invention are directed include: Bunyaviridae (LCMV, hantavirus), Herpesviridae (Human herpesviruses 1 through 8, Bovine herpesvirus, Canine herpesvirus and Simian cytomegalovirus), Hepadnaviridae (Hepatitis B virus), Hepeviridae (Hepatitis E virus), Deltavirus (Hepatitis delta virus), Adenoviridae (Human adenoviruses A-F and murine adenovirus), Coronaviridae, Flaviviridae (Bovine viral diarrhea virus, TBE, Yellow fever virus, Dengue viruses 1-4, WNV and hepatitis C virus), Orthomyxoviridae (influenza), Paramyxoviridae (parainfluenza, mumps, measles, RSV, Pneumonia virus of mice, Sendai virus, and Simian parainfluenza virus 5), Togaviridae (Western equine encephalomyelitis virus, rubella), Picornaviridae (Poliovirus types 1-13, coxsackie B, echovirus, rhinovirus, Human hepatitis A, Human coxsackievirus, Human cardiovirus, Human rhinovirus and Bovine rhinovirus), Reoviridae (Mouse rotavirus, reovirus type 3 and Colorado tick fever virus), and Rhabdoviridae (vesicular stomatitis virus).

[0424] For example, mouse and hamster cell banks used to make immunogenic agents can be infected with viruses known to be pathogenic to human. Mouse cell banks can carry lymphocytic choriomeningitis virus (LCM), sendai virus, hantaan virus, and/or lactic dehydrogenase virus; hampster cell banks can carry LCM, sendai virus, and/or reovirus type 3. Indeed, commercially available monoclonal antibodies produced from transgenic mouse-derived cells are tested for virus including LCM, Ectromelia (MEV), mouse encephalomyelitis virus (GDVII), Hantaan, MVM, mouse adenovirus (MAV), mouse hepatitis (MHV), pneumonia virus of mice (PVM), Polyoma, Reovirus type 3 (REO-3), Sendai (SeV), virus of epizootic diarrhea of infant mice (EDIM), mouse cytomegalovirus (MCMV), papovavirus K, and LDVH viruses; Thymic Agent virus; bovine virus diarrhea (BVD), infectious bovine rhinotracheitis (IBR), respiratory parainfluenza-3 (PI-3), papillomavirus (BPV) and adenovirus-3 (BAV-3) viruses; and caprine (goat) adenovirus (CAV), herpesvirus (CHV), and arthritis encephalitis virus (CAEV) viruses. See Geigert, CHALLENGE OF CMC REGULATORY COMPLIANCE FOR BIOPHARMACEUTICALS, 109-11 (Springer, New York, N.Y., 2004); BLA reference No. 98-9912, Centocor, Infliximab Detailed Product Review (1997); BioProcessing J. (Fall, 2009).

[0425] In some embodiments, the production of an immunogenic agent in a host cell is enhanced by introducing into the cell an additional RNA effector molecule that affects cell growth, cell division, cell viability, apoptosis, the immune response of the cells, nutrient handling, and/or other properties related to cell growth and/or division within the cell. In further embodiments, production is enhanced by introducing into the cell a RNA effector molecule that transiently inhibits expression of immunogenic agents during the growth phase.

### IV. TRANSCRIPTOME

[0426] Embodiments of the present invention also provide for a set of transcripts that are expressed in CHO cells, also called “the CHO cell transcriptome”, and further provides siRNA molecules designed to target any one of the transcripts of the CHO cell transcriptome. Uses of the transcriptome in a form of an organized CHO cell transcript sequence database for selecting and designing CHO cell modulating effector RNAs are also provided in the form or methods and systems. Other embodiments further provide a selection of siRNAs targeted against each of the transcripts in the CHO transcriptome, and uses thereof for engineering or modifying CHO cells, for example, for improved production of biomolecules. Accordingly, particular embodiments provide modified CHO cells.

[0427] A set of transcripts that were discovered in CHO cells pooled under different conditions, including early-, mid- and late-log phase cells, that were grown in standard conditions under chemically defined media at 37° C. The transcripts are set forth in the tables herein, and in the corresponding sequences (SEQ ID files).

[0428] The discovery of the CHO transcriptome is useful for specifically modifying one or more cellular processes in the CHO cell, for example, for the production of biomolecules in such cells. For example, based on the known expressed transcripts, one can modulate apoptosis regulating genes, cell cycle genes, DNA amplification (DHFR) regulating genes, virus gene production regulating genes, e.g., in the case of viral promoters that are used to drive biomolecule production in the cells, glycosylation-associated genes, carbon metabolism regulating genes, prooxidant enzyme encoding genes. By modulating the known expressed genes or transcripts one can further modulate protein folding, methionine oxidation, protein pyroglutamation, disulfide bond formation, protein secretion, cell viability, specific productivity of cell, nutrient requirements, internal cell pH.

[0429] Methods for modulating production of an immunogenic agent in a host cell, particularly in a CHO cell, are provided, the methods comprising the steps of contacting the cell with a RNA effector molecule, a portion of which is complementary to at least a portion of a target gene, maintaining the cell in a bioreactor for a time sufficient to modulate expression of the target gene, wherein the modulation enhances production of the immunogenic agent and recovering the immunogenic agent from the cell.

[0430] The present disclosure includes the nucleic acid sequences of the transcripts of the CHO transcriptome, the proteins the transcripts are translated into, and some of the pathways in which the transcribed proteins play a role. The description also sets forth a compilation of siRNA molecules as RNA effector molecules designed to target the sequences of the transcriptome. Systems, including computer assisted systems, and methods, including computer assisted methods, for selecting appropriate RNA effector molecules to modulate gene expression in a cell, particularly in a CHO cell, based on the known transcriptome transcript sequences are also described.

[0431] CHO Cell Transcriptome:

[0432] We have discovered a defined set of transcripts expressed in a CHO cell. The defined set of transcripts in referred to herein as a “transcriptome”. The transcript name, at least one pathway in which the transcript plays a role, an associated SEQ ID NO(s), and corresponding exemplary siRNA molecule SEQ ID NOs are set forth in any of the tables described herein including, for example, Tables 1-16, 21, 23, 24, 27-30, 52-61, 65 or 66. The sequences of the transcripts in the CHO cell transcriptome are set forth in the associated SEQ ID NOs:1-9771 and SEQ ID NOs:3157149-3158420.

[0433] Thus, in one embodiment, the invention provides a Chinese hamster ovary (CHO) cell transcriptome comprising a selection or a compilation of transcripts having SEQ ID NOs:1-9771. In some embodiments, the CHO transcriptome consists essentially of a selection or a compilation of transcripts having SEQ ID NOs:1-9771. In some embodiments, the CHO cell transcriptome consists of a selection or a compilation of transcripts having SEQ ID NOs:1-9771.

[0434] In some embodiments, the invention provides at least one siRNA directed to any one of the CHO cell transcriptome transcript set forth in any of the tables presented herein, see e.g., Tables 1-16, 21-25, 27-30, 52-61, 65 or 66. In some embodiments, the siRNA is selected from the group of siRNAs set forth in Tables 1-16, 21-31, 33, 35, 37, 39, 41, 43, 45, 47, 49, 50, 51-61, 63-65 or 66. In some embodiments, not all transcript SEQ ID NOs are present in the tables described herein. In some embodiments, the RNA effector molecule comprises an antisense strand comprising at least 16 contiguous nucleotides (e.g., at least 17, at least 18, at least 19 nucleotides) of the nucleotide sequence selected from the group consisting of SEQ ID NOs:9772-3152399 and SEQ ID NOs:3161121-3176783. Additional targets that can be modulated for improved quality/quantity of expression are set forth herein. Provided herein are CHO transcripts, i.e. SEQ ID NO's 1-9771 and SEQ ID NOs:3157149-3158420. These transcripts can be assigned to an encoded protein name and categorized into functional groups. One can readily determine functional groups to classify a transcript to by homology to sequences known to have a particular function. In one embodiment one uses a known functional domain and looks for homology of at least 40%, 50%, 60%, 70%, 75%, 80%, 85%, 90%, 95%. See for example Tables 10-16, which correlate the SEQ ID NO transcript with a description of encoded protein and function, e.g., cell cycle/cell division transcripts of Table 13. Exemplary categories that transcripts can be grouped are described throughout the application and include, e.g., transcripts (i.e., target genes) that encode for proteins involved in apoptosis, cell cycle genes, DNA amplification (DHFR), glycosylation, carbon metabolism, prooxidant enzymes, protein folding, methionine oxidation, protein pyroglutamation, disulfide bond formation, protein secretion, immune response, cell nutrient requirements, and shutting down RNA Interference. For the transcripts disclosed herein whose function is not specifically recited herein, one of skill in the art can easily compare (using known algorithms and programs) the transcript sequences of SEQ ID NOs:1-9771 and SEQ ID NOs:3157149-3158420 to sequence information of transcripts found in any of various organisms and assign function and/or protein encoded name as described above. For example, one of skill in the art can use the sequence information described herein to predict protein function using any prediction methods, algorithms, and/or resources and applications found on the world wide web, as reviewed in any of Freitas et al., 7 IEEE/ACM Transactions on Computational Biology and Bioinformatics (TCBB) 172-82 (2010); Rentzscha & Orengoa, 27 Trends in Biotech. 210-19 (2009); Lowenstein et al., 10 Genome Biol. 207 (2009) or Friedberg, 7 Briefings in Bioinformatics 225-42 (2006). Alternatively, the transcript sequences can be compared to a partial or entire genome of an organism (genome information), including protein coding and non-coding regions.

[0435] One can silence target transcripts using siRNA, such as set forth in SEQ ID NOs:9772-3152399 and SEQ ID NOs:3161121-3176783. The particular siRNA can readily be matched to its corresponding target by looking for a transcript containing a complimentary sequence that is at 90% complementary. Well known algorithms can be used to determine appropriate RNA effector molecules for targeting the transcripts identified herein. For example, one of skill in the art can use the sequence information described herein to determine appropriate RNA sequences for targeting the transcripts described herein, and for preventing/promoting an immune response to those RNA sequences, using any prediction methods, algorithms, and/or resources and applications found on the world wide web, as reviewed in, or as described in, Pappas et al., 12 Exp. Op. Therapeutic Targets 115-27 (2008); Kurreck et al., 2009, 48 Angewandte Chemie 1378-98 (2009); Gredell et al., 16 Engin. Cell Funct. by RNA Interference in Cell Engin. 175-94 (2009); PCT/US2005/044662 (Jun. 15, 2006); PCT/US2009/039937 (Oct. 15, 2009); or PCT/US2009/051648 (Jan. 28, 2010).

[0436] Thus, the system described herein (i.e., to select for a sequence of at least one RNA effector molecule that is suitable for modulating protein expression in a cell) can be used to identify both the CHO transcript sequence and the RNA effector molecules (e.g., siRNAs) that can be used to modulate any particular function in the host cell. A CHO transcript is assigned function and/or encoded protein name when the transcript sequence has at least 50%, at least 60%, at least 70%, at least 80%, or at least 90% sequence identity to a transcript of an organism whose function and protein name is known

### Systems and Methods for Selecting RNA Effector Molecules:

[0437] Based on the known CHO transcriptome, we have developed methods and systems for selecting RNA effector molecules to affect the cells through manipulating cellular processes, for example, to improve production of biomolecules in the cells.

[0438] Accordingly, the present embodiments provide databases and system comprising and using the CHO transcriptome sequences and optionally also an organized compilation of the CHO transcriptome outlining at least one functional aspect of each of the transcript, such as the transcripts role in a particular cellular process or pathway, and the corresponding siRNAs to allow design and selection of targets and effector RNA molecules for optimization of biological processes, particularly in the CHO cells.

[0439] Functional aspects of transcripts relate to their role in, for example apoptosis, cell cycle, DNA amplification (DHFR), virus gene production, e.g., in the case of viral promoters that are used to drive biomolecule production in the cells, glycosylation, carbon metabolism, prooxidant enzymes, protein folding, methionine oxidation, protein pyroglutamation, disulfide bond formation, protein secretion, cell viability, specific productivity of cell, nutrient requirements, internal cell pH. Other cellular processes are known to a skilled artisan, and can be found, for example, at the Gene Ontology database available through the world wide web.

[0440] Accordingly as shown in FIG. 16, the invention provides a system 100 for selecting a sequence of at least one RNA effector molecule suitable for modulating protein expression in a cell, the system comprising: a computing device 110, having a processor 112 and associated memory 114, and a database 120 comprising at least one cell transcriptome information, the information comprising, a sequence for each transcript of the transcriptome, and optionally, a name of the transcript, and a pathway the transcript plays a role; and at least one RNA effector molecule information, the information comprising at least the sequence of the RNA effector molecule and optionally target specificity of the RNA effector molecule, wherein each RNA effector molecule is designed to match at least one or more sequences in the at least one cell transcriptome; a computer program, stored in memory 114, executed by the computing device 110 and configured to receive from a user via a user input device 118, parameters comprising a cell type selection, a target organism selection, a cellular pathway selection, a cross-reactivity selection, a target gene name and/or sequence selection, and optionally a method of delivery selection comprising either in vivo or in vitro delivery options; and further optionally user address information; a first module configured to check the parameters against the sequences in the database for a matching combination of the parameters and transcriptome transcript sequences; and a second module to display a selected sequence of at least one RNA effector molecule suitable for modulating protein expression in the cell.

[0441] The computing device 110 and associated programs stored in memory 114 can be adapted and configured to provide a user interface, such as a graphical user interface which allows the user to input search target parameters, for example, using one or more drop down menus or structured or free form text input, and selects the appropriate parameters for finding an appropriate target in the desired cell. For example, if a user wishes to find a target for modulating carbon metabolism in a CHO cell, the user identifies the target cell as “CHO”, and pathway as “carbon metabolism”, and the server performs a search through the database that would identify, e.g., transcripts for Gluts, PTEN and LDH genes and matches them with the appropriate siRNA molecules from the siRNA database part. This output information can be presented to the user on a computer display 116 or other output device, such as a printer.

[0442] The system can be a stand-alone system or an internet-based system, wherein the computations and selection of effector RNA molecules is performed in same or different locations. As shown in FIG. 16, the transcriptome information can be stored in database 120 and accessed by computing device 110. As used herein, the term database includes any organization of data regardless of whether it is structured or unstructured that allows retrieval of the information requested. The database can be a flat file or set of flat files stored in memory, one or more tables stored in memory, a set of discrete data elements stored in memory. The database can also include any well known database program that allows a user to directly or indirectly (through another program) access the data. Examples of these include MICROSOFT® ACCESS®, and ORACLE® database and MYSQL® open source database.

[0443] In an alternative embodiment of the invention shown in FIG. 17, the system 200 can be a network based system. The system 200 can include a server system 210 and one or more client systems 240 and 250 connected to a network 230, such as a private user network or Ethernet, or the Internet. The server system 210 and client systems 240 and 250 can be computing devices as described herein. Server system 210 can include one or more processors 212 and associated memory 214 and one or more computer programs or software adapted and configured to control the operations and functions of the server system 210. The Server system 210 can include one or more network interfaces for connecting via wire or wirelessly to the network 230. Examples of server systems include computer servers based on INTEL® and AMD microprocessor architectures available from Hewlett-Packard Development Co., LP; DELL; and APPLE® Inc.

[0444] Client systems 240 and 250 can include one or more processors 242 and 252 and associated memory 244 and 254 and one or more computer programs or software adapted and configured to control the operations and functions of the client systems 240 and 250. The client systems 240 and 250 can include one or more network interfaces for connecting via wire or wirelessly to the network 230. Examples of client systems include desktop and portable computers based on INTEL® and AMD microprocessor architectures available from Hewlett-Packard Development Co., LP; DELL; and Apple Inc., and smaller network enabled, handheld devices such as a personal digital assistant (PDA) (e.g., DROID®, HTC Corp.) smartphone (e.g., BLACKBERRY® smartphone, Research In Motion, Ltd.), iPod®, iPad™ and iPhone® devices (APPLE® Inc.).

[0445] In accordance with one embodiment, the server system 210 is a web server, for example based in Internet Information Services (11S) for Windows® or .NET FRAMEWORK products (MICROSOFT® Corp.), or Apache open-source HTTP server (Apache Software Foundation), and uses a web-based application accessed by a remote client system via the Internet to search the database of transcriptome information to identify RNA effector molecules that can be suitable for modulating protein expression in a cell. The system can include or be connected to a fulfillment system that allows a user to select and purchase desired quantities of the identified RNA effector molecules to be delivered to the user.

[0446] One can also provide a system by selling a software to be run by a computer, wherein the databases and algorithms matching the parameters with sequence information and other information are provided to the user. The user can then either synthesize the effector RNA molecules or separately order them from a third party provider.

[0447] In some embodiments, the system further comprises a storage module for storing the at least one RNA effector molecule in a container, wherein if there are two or more RNA effector molecules, each RNA effector molecule is stored in a separate container, and a robotic handling module, which upon selection of the matching combination, selects a matching container, and optionally adds to the container additives based on a user selection for in vivo or in vitro delivery, and optionally further packages the container comprising the matching RNA effector molecule to be sent to the user address. Exemplary additives that can be added to the siRNA or a mixture of siRNAs are set forth herein.

[0448] The storage module can be a refrigerated module linked to the system components.

[0449] The system can also be linked to a nucleic acid or other biomolecule synthesizer.

[0450] The robotic handling module can be any system that can retrieve, and optionally mix components from the storage module, and or the biomolecule synthesizer, and optionally package the container(s). The robotic handling module can comprise one or more parts functioning based upon the commands from the system. The robotic handling module can be in the same or different location as where the computations are performed.

[0451] In some embodiments, the system further comprises genome information of the cell, wherein by a user selection, the RNA effector molecules can be matched to target genomic sequences, comprising promoters, enhancers, introns and exons present in the genome.

[0452] In some embodiments of the invention, the system can include hardware components or systems of hardware components and software components that carry out specific tasks (such as managing input and output of information, processing information, etc.) of the system and can be carried out by the execution of software applications on and across the one or more computing devices that make up the system. The present inventions can include any convenient type of computing device, e.g., such as a server, main-frame computer, a work station, etc. Where more than one computing device is present, each device can be connected via any convenient type of communications interconnect, herein referred to as a network, using well know interconnection technologies including, for example, Ethernet (wired or wireless—“WiFi”), BLUETOOTH® technology, ZIGBEE® wireless technology, AT&T™ 3 G network, or SPRINT™ 3 G or 3 G/4 G networks. Where more than one computing device is used, the devices can be co-located or they can be physically separated. Various operating systems can be employed on any of the computing devices, where representative operating systems include MICROSOFT® WINDOWS® operating system, MACOS™ operating system software (APPLE® Inc.), SOLARIS® operating system (Oracle Corp.), Linux (Linux Online, Inc.), UNIX® server systems and OS/400 software (IBM Corp.), ANDROID™ (Sprint), Chrome OS (Google Inc.), and others. The functional elements of system can also be implemented in accordance with a variety of software facilitators, platforms, or other convenient method.

[0453] Items of data can be “linked” to one another in a memory when the same data input (for example, filename or directory name or search term) retrieves the linked items (in a same file or not) or an input of one or more of the linked items retrieves one or more of the others.

[0454] FIG. 18 shows a diagrammatic view of the data structure according to one embodiment of the invention. In this embodiment, input field terms can be linked to Target RNA, such as by their associated sequence ID in the database and in accordance with the invention, executing a software module to search for one or more of the input field terms returns one or more sequence IDs of the Target. In addition, each Target RNA can be linked to one or more RNA effector molecules, such as by their associated sequence ID and in accordance with the invention, the for each Target identified, a software module can be executed to perform a subsequent search for some or all of Targets identified can return one or more sequence IDs for desired RNA effector molecules and return a listing of the RNA effector molecules and their sequence IDs.

[0455] Alternatively, for each target identified, a software module can be executed that implements one or more well known algorithms for determining the desired RNA effector molecules and return a listing of the RNA effector molecules and their sequence IDs.

[0456] FIG. 19 shows a flow chart of the method for identifying RNA effector molecules according to one embodiment of the invention. The method 400 includes presenting the user with an input screen 402 that allows the user to input the desired parameters for finding the Target in the desired cell. The input can be free form text or one or more drop-down boxes allowing the user to select predefined terms. At step 404, the user selects the appropriate user interface element, for example a “search” button and the system searches the database for Targets associated with the input parameters. At step 406, the user can be presented with a list of Targets, each associated with a check box and the user can select or unselect the check box associated with each target to further refine their search. At step 408, the user selects the appropriate user interface element, for example a “search” button and the system can search the database for RNA effector molecules associated with the input targets and/or use well know algorithms to determine RNA effector molecules associated with the input targets. The system can, for example, search for RNA effector molecules and if, none are found, use the well know algorithms to determine appropriate RNA effector molecules. Subsequently, the determined molecules can be added to the database and appear in subsequent searches. Alternatively, even where RNA effector molecules are found, the system can, in addition, use the well know algorithms to determine additional appropriate RNA effector molecules. At step 410, the user can be provided with optional functions such as ordering the reported RNA effector molecule from information found in the database. For example, online procurement can be provided as described in U.S. Patent Application Pub. No. 2005/0240352.

[0457] In one example of the system and the method of using the system, a person, such as a customer, is experiencing problems in protein production using a cell line. The problem can be, e.g., in post translational modification of the protein, such as in glycosylation, e.g., too much fucosylation, and/or another process, such as too much lactic acid buildup or too low yield.

[0458] The system of the invention allows the user to input parameters, such as the problem or multiple problems they are experiencing (too low cell growth rate or too much fucosylation) and/or a target gene, or transcript or multiple target genes or transcripts that they wish to modulate, such as FUT8, GMDS, and/or TSTA3, into the user interface.

[0459] The system takes the parameters and matches them with sequence data and RNA effector molecule data and delivers suggested RNA effector molecule(s) to the customer. For example, the system can match the problem to a cellular pathway, such as glycosylation, with transcripts known to play a role in glycosylation, and then matches the RNA effector molecules targeting these sequences and delivers, e.g. a list of siRNA sequences with which the customer can experiment.

[0460] If the customer wishes to receive one or more of the sequences, the customer can order or instruct the system to synthesize and/or send the appropriate nucleic acids to the customer-defined location. The system can also send instructions to a nucleotide synthesis system to make the sequences. The synthesizer can be in the same or in a remote location from the other system parts. The system can also select ready-made sequences from a storage location and provide packaging information so that the appropriate molecules can be sent to the customer-defined location. If the customer wishes to obtain different mixtures of the RNA effector molecules, such can be defined prior to submitting the final order and then the system will instruct the robotic component to mix the appropriate RNA effector molecules, such as siRNA duplexes, e.g, comprising an antisense and sense strand, in one vial or tube or other container.

[0461] We have further discovered a set of siRNA molecules that target at least one of the transcripts in the CHO cell transcriptome. Table 1 also sets forth a set of siRNA molecules that target the transcripts in the CHO cell transcriptome.

[0462] Thus, for example, methods are provided herein for enhancing production of a recombinant antibody or a portion or derivative thereof by contacting a cell, such as a CHO cell, with one or more RNA effector molecules that permit modulation of fucosylation of the recombinant antibody or portion or derivative thereof. For example, SEQ ID NOs:3152714-3152753, can be contacted with a cell to modulate expression of the fucosyltransferase (FUT8). In another embodiment, a cell is contacted with one or more RNA effector molecules wherein the contacting modulates expression of a GDP0mannose 4,6-dehydratase (GMDS) (encoded, for example, by SEQ ID NO:5069). A RNA effector molecule targeting GMDS can comprise an antisense strand comprising at least 16 contiguous nucleotides (e.g., at least 17, at least 18, at least 19 nucleotides) of the oligonucleotide having a nucleotide sequence selected from the group consisting of SEQ ID NOs:1688202-1688519.

[0463] In another embodiment, a cell is contacted with one or more RNA effector molecules wherein the contacting modulates expression of a gene encoding GDP-4-keto-6-deoxy-D-mannose epimerase-reductase (encoded by TSTA3), (encoded, for example, by SEQ ID NO:5505). A RNA effector molecule targeting TSTA3 can comprise an antisense strand comprising at least 16 contiguous nucleotides (e.g., at least 17, at least 18, at least 19 nucleotides) of an oligonucleotide molecule selected from the group consisting of SEQ ID NOs:1839578-1839937. In still another embodiment, a cell is contacted with a plurality of RNA effector molecules targeting the expression of more than one of FUT8, GMDS, and TSTA3.

[0464] Reduced sialic content of antibodies is believed to further increase ADCC. Therefore, in still another embodiment, a cell is contacted with one or more RNA effector molecules wherein the contacting modulates expression of a sialyltransferase. The sialyltransferase activity in a cell can be modulated by contacting the cell with a RNA effector molecule targeting at least one sialyltransferase gene. Table 7 lists some sialyltransferases that can be modulated, as well as the RNA effector molecules targeting sialyltransferases.

[0465] The RNA effector molecules targeting the sialyltransferases comprises an antisense strand comprising at least 16 contiguous nucleotides (e.g., at least 17, at least 18, at least 19 nucleotides) of the oligonucleotide having a nucleotide sequence of the SEQ ID NOs presented above (i.e., SEQ ID NOs:681105-681454, NOs:707535-707870, NOs:1131123-1131445, NOs:1155324-1155711, NOs:1391079-1391449, NOs:1435989-1436317).

[0466] In still another embodiment, a cell is contacted with at least one RNA effector molecule targeting one of FUT8, GMDS, and TSTA3, and another RNA effector molecule targeting one sialyltransferase. In a particular embodiment, a cell is contacted with RNA effector molecules targeting FUT8 and ST6 (α-N-acetyl-neuraminyl-2,3-β-galactosyl-1,3)-N-acetylgalactosaminide α-2,6-sialyltransferase 6.

[0467] Embodiments of the present invention modulated the activity of a transcript or a protein in a molecular pathway known to a skilled artisan or identified elsewhere in this specification. Such molecular pathways an cellular activities include, but are not limited to apoptosis, cell division, glycosylation, growth rate, a cellular productivity, a peak cell density, a sustained cell viability, a rate of ammonia production or consumption, or a rate of lactate production. Tables 10 to 16 identify example targets based on their function or role that they play in a cell:

TABLE 10
Lactate production (Chinese hamster)

| | | | Avg | siRNA |
|---|---|---|---|---|
| SEQ ID NO: | consL | Description | Cov | SEQ ID NOs: |
| 3905 | 1573 | lactate dehydrogenase A | 1,468.00 | 1297283-1297604 |
| 8572 | 481 | lactate dehydrogenase C | 0.619 | 2887819-2888178 |
| 9187 | 343 | lactate dehydrogenase A-like 6B | 0.235 | 3064087-3064357 |
| 9600 | 207 | lactate dehydrogenase B | 0.216 | 3140011-3140113 |

TABLE 11
Proteases and Proteolysis related (Chinese hamster)

| SEQ | | | Avg | siRNA SEQ |
|---|---|---|---|---|
| ID NO: | consL | Description | Cov | ID NOs: |
| 6 | 5005 | carboxypeptidase D | 5.679 | 11367-11661 |
| 23 | 4373 | insulin degrading enzyme | 24.134 | 16605-16843 |
| 151 | 3548 | disintegrin & metallopeptidase domain 10 | 14.497 | 57423-57713 |
| 282 | 3138 | YME1-like 1 (S. cerevisiae) | 5.064 | 96707-96922 |
| 351 | 3031 | SUMO/sentrin specific peptidase 6 | 10.532 | 116231-116447 |
| 360 | 3012 | bone morphogenetic protein 1 | 14.594 | 118879-119164 |
| 367 | 3002 | dipeptidylpeptidase 8 | 4.382 | 120799-121136 |
| 450 | 2894 | tripeptidyl peptidase II | 4.093 | 144491-144745 |
| 462 | 2883 | nardilysin, N-Arg dibasic convertase, | 23.889 | 147663-147880 |
| | | NRD convertase 1 | | |
| 483 | 2861 | calpain 2 | 35.121 | 153383-153617 |
| 544 | 2789 | N-ethylmaleimide sensitive fusion protein | 30.345 | 170769-171035 |
| 557 | 2776 | disintegrin & metallopeptidase domain 9 | 15.711 | 174168-174399 |
| | | (meltrin γ) | | |
| 582 | 2754 | Zn metallopeptidase, STE24 homolog | 5.717 | 181477-181863 |
| | | (S. cerevisiae) | | |
| 677 | 2678 | AE binding protein 1 | 54.178 | 210228-210444 |
| 816 | 2577 | disintegrin and metallopeptidase domain 23 | 0.593 | 252647-252954 |
| 821 | 2575 | a disintegrin and metallopeptidase domain | 11.757 | 254091-254472 |
| | | 15 (metargidin) | | |
| 940 | 2519 | SUMO/sentrin specific peptidase 2 | 3.997 | 292258-292589 |
| 1012 | 2474 | membrane-bound transcription factor | 14.435 | 316272-316622 |
| | | peptidase, site 1 | | |
| 1064 | 2446 | lon peptidase 1, mitochondrial | 39.647 | 333731-334048 |
| 1108 | 2423 | AFG3(ATPase family gene 3)-like 2 (yeast) | 17.55 | 348153-348484 |
| 1137 | 2407 | acylpeptide hydrolase | 16.618 | 358347-358692 |
| 1153 | 2401 | calpain 10 | 2.795 | 363875-364249 |
| 1194 | 2384 | disintegrin-like & metallopeptidase (reprolysin | 8.75 | 377552-377859 |
| | | type) with thrombospondin type 1 motif, 7 | | |
| 1330 | 2323 | complement component 1, r subcomponent | 62.586 | 422509-422751 |
| 1331 | 2323 | pitrilysin metallepetidase 1 | 16.737 | 422752-423147 |
| 1365 | 2304 | X-prolyl aminopeptidase (aminopeptidase P) 1 | 34.448 | 434820-435212 |
| 1367 | 2303 | neurolysin (metallopeptidase M3 family) | 4.852 | 435611-435974 |
| 1423 | 2276 | plasminogen activator, tissue | 2.837 | 454515-454869 |
| 1462 | 2261 | SUMO/sentrin specific peptidase 3 | 7.248 | 467735-468057 |
| 1488 | 2250 | furin (paired basic aa cleaving enzyme) | 14.282 | 476518-476914 |
| 1554 | 2228 | SUMO/sentrin specific peptidase 5 | 1.726 | 498550-498878 |
| 1597 | 2208 | aminopeptidase puromycin sensitive | 4.993 | 513207-513606 |
| 1601 | 2208 | complement component 1, s subcomponent | 7.355 | 514675-514999 |
| 1703 | 2174 | endoplasmic reticulum aminopeptidase 1 | 16.062 | 550016-550337 |
| 1828 | 2136 | matrix metallopeptidase 9 | 16.328 | 593202-593492 |
| 1832 | 2133 | endoplasmic reticulum metallopeptidase 1 | 3.502 | 594506-594744 |
| 1861 | 2124 | spastic paraplegia 7 homolog (human) | 8.718 | 604347-604631 |
| 1980 | 2085 | complement component 1, r subcomponent B | 28.837 | 644971-645023 |
| 1989 | 2082 | thimet oligopeptidase 1 | 27.953 | 647877-648172 |
| 2005 | 2076 | beta-site APP cleaving enzyme 1 | 3.234 | 653217-653567 |
| 2034 | 2066 | intraflagellar transport 52 homolog | 44.311 | 662569-662878 |
| | | (Chlamydomonas) | | |
| 2060 | 2056 | dihydrolipoamide dehydrogenase | 39.837 | 671424-671769 |
| 2086 | 2048 | methionyl aminopeptidase 1 | 16.104 | 680457-680813 |
| 2093 | 2046 | cathepsin A | 183.096 | 682818-683174 |
| 2109 | 2041 | disintegrin-like & metallopeptidase (reprolysin | 0.788 | 687923-688239 |
| | | type) with thrombospondin type 1 motif, 1 | | |
| 2352 | 1970 | ATP/GTP binding protein-like 5 | 1.205 | 770448-770765 |
| 2369 | 1965 | cathepsin D | 167.968 | 776029-776328 |
| 2370 | 1965 | methionine aminopeptidase 2 | 19.432 | 776329-776680 |
| 2440 | 1946 | arginyl aminopeptidase (aminopeptidase B) | 9.264 | 800159-800460 |
| 2473 | 1940 | prolyl endopeptidase-like | 2.435 | 811154-811532 |
| 2521 | 1929 | dipeptidylpeptidase 9 | 4.703 | 827728-828118 |
| 2529 | 1926 | AFG3 (ATPase family gene 3)-like 1 (yeast) | 8.094 | 830536-830879 |
| 2549 | 1920 | leukotriene A4 hydrolase | 13.262 | 837346-837737 |
| 2627 | 1901 | tubulointerstitial nephritis antigen-like 1 | 471.915 | 863337-863698 |
| 2688 | 1887 | prolylcarboxypeptidase (angiotensinase C) | 4.268 | 884238-884577 |
| 2726 | 1875 | CNDP dipeptidase 2 (metallopeptidase | 17.92 | 897182-897473 |
| | | M20 family) | | |
| 2802 | 1857 | legumain | 105.23 | 923229-923566 |
| 2867 | 1840 | cereblon | 1.831 | 945414-945728 |
| 2888 | 1834 | cathepsin F | 27.16 | 952584-952981 |
| 2902 | 1830 | proprotein convertase subtilisin/kexin type 7 | 5.151 | 957525-957819 |
| 2940 | 1818 | OMA1 homolog, zinc metallopeptidase | 10.717 | 970455-970848 |
| | | (S. cerevisiae) | | |
| 2957 | 1814 | disintegrin & metallopeptidase domain 22 | 6.245 | 976428-976826 |
| 2962 | 1812 | bleomycin hydrolase | 21.221 | 978233-978617 |
| 3044 | 1781 | leucine aminopeptidase 3 | 53.967 | 1005879-1006172 |
| 3119 | 1765 | prolyl endopeptidase | 20.21 | 1031521-1031842 |
| 3129 | 1763 | matrix metallopeptidase 3 | 44.776 | 1034832-1035193 |
| 3175 | 1751 | disintegrin & metallopeptidase domain 8 | 3.157 | 1051064-1051435 |
| 3296 | 1720 | suppression of tumorigenicity 14 | 2.378 | 1092011-1092357 |
| | | (colon carcinoma) | | |
| 3347 | 1706 | LON peptidase N-terminal domain & ring | 1.265 | 1109135-1109435 |
| | | finger 3 | | |
| 3515 | 1666 | calpain 7 | 1.488 | 1165709-1166037 |
| 3553 | 1656 | peptidase (mitochondrial processing) | 16.51 | 1178516-1178823 |
| 3565 | 1652 | HtrA serine peptidase 1 | 42.699 | 1182505-1182824 |
| 3660 | 1631 | aspartyl aminopeptidase | 12.181 | 1214496-1214794 |
| 3685 | 1627 | HtrA serine peptidase 2 | 11.095 | 1222907-1223252 |
| 3696 | 1623 | intraflagellar transport 88 homolog | 1.53 | 1226651-1227010 |
| | | (Chlamydomonas) | | |
| 3770 | 1607 | a disintegrin and metallopeptidase | 0.371 | 1251949-1252245 |
| | | domain 12 (meltrin) | | |
| 3795 | 1599 | ubiquinol-cytochrome c reductase core | 109.161 | 1260523-1260890 |
| | | protein 1 | | |
| 3809 | 1594 | matrix metallopeptidase 10 | 43.632 | 1265238-1265630 |
| 3832 | 1589 | matrix metallopeptidase 14 | 5.689 | 1272953-1273286 |
| | | (membrane-inserted) | | |
| 3875 | 1579 | peptidase (mitochondrial processing) β | 37.799 | 1287161-1287545 |
| 3936 | 1565 | predicted gene 5077 | 4.951 | 1307451-1307521 |
| 3940 | 1564 | dipeptidylpeptidase 7 | 40.962 | 1308543-1308899 |
| 3951 | 1562 | phosphatidylinositol glycan anchor | 26.236 | 1312259-1312656 |
| | | biosynthesis, class K | | |
| 4040 | 1540 | cathepsin B | 122.173 | 1342187-1342544 |
| 4112 | 1521 | leucyl/cystinyl aminopeptidase | 0.363 | 1366088-1366414 |
| 4134 | 1516 | mitochondrial intermediate peptidase | 1.762 | 1373601-1373949 |
| 4136 | 1515 | calpain 1 | 1.667 | 1374276-1374636 |
| 4234 | 1494 | WAP, FS, Ig, KU, and NTR- | 1.307 | 1407418-1407713 |
| | | containing protein 1 | | |
| 4250 | 1492 | caspase 9 | 1.769 | 1412589-1412860 |
| 4282 | 1485 | matrix metallopeptidase 12 | 15.393 | 1423446-1423812 |
| 4320 | 1476 | peptidase D | 6.708 | 1436318-1436664 |
| 4345 | 1471 | procollagen C-endopeptidase | 38.334 | 1444649-1444973 |
| | | enhancer protein | | |
| 4515 | 1433 | ceroid lipofuscinosis, neuronal 3, juvenile | 2.904 | 1500552-1500853 |
| | | (Batten, Spielmeyer-Vogt disease) | | |
| 4548 | 1426 | ubiquinol cytochrome c reductase core protein 2 | 74.045 | 1511637-1511998 |
| 4736 | 1385 | cathepsin L | 394.561 | 1574335-1574708 |
| 4999 | 1324 | aminoacylase 1 | 16.465 | 1664426-1664734 |
| 5080 | 1303 | protease, serine, 36 | 0.737 | 1691971-1692344 |
| 5266 | 1267 | tripeptidyl peptidase I | 0.706 | 1755385-1755682 |
| 5334 | 1251 | O-sialoglycoprotein endopeptidase-like 1 | 1.425 | 1778801-1779170 |
| 5395 | 1238 | SUMO/sentrin specific peptidase 8 | 1.488 | 1800688-1801060 |
| 5486 | 1216 | glutaminyl-peptide cyclotransferase-like | 2.05 | 1832626-1832993 |
| 5520 | 1207 | carboxypeptidase X 1 (M14 family) | 0.795 | 1844883-1845160 |
| 5529 | 1205 | glutamyl aminopeptidase | 0.69 | 1847806-1848189 |
| 5550 | 1200 | disintegrin & metallopeptidase domain 17 | 1.374 | 1855220-1855596 |
| 5578 | 1195 | proteasome (prosome, macropain) type 1 | 94.105 | 1864684-1865015 |
| 5608 | 1188 | caspase 12 | 0.856 | 1875252-1875646 |
| 5663 | 1175 | CASP8 and FADD-like apoptosis regulator | 4.448 | 1894743-1895132 |
| 5712 | 1164 | ATP/GTP binding protein 1 | 0.455 | 1912461-1912860 |
| 5746 | 1157 | caspase 3 | 11.813 | 1924836-1925195 |
| 5760 | 1154 | archaelysin family metallopeptidase 2 | 3.826 | 1930073-1930404 |
| 5792 | 1147 | matrix metallopeptidase 13 | 0.724 | 1941794-1942151 |
| 5854 | 1136 | caspase 1 | 2.306 | 1964106-1964500 |
| 5905 | 1123 | RAB23, member RAS oncogene family | 1.099 | 1982920-1983307 |
| 5940 | 1116 | cathepsin H | 23.003 | 1995676-1996039 |
| 5976 | 1108 | SEC11 homolog A (S. cerevisiae) | 44.235 | 2008739-2009125 |
| 6015 | 1099 | proteasome (prosome, macropain) 26S | 63.204 | 2022843-2023145 |
| | | subunit, non-ATPase, 8 | | |
| 6033 | 1095 | protease, serine 27 | 3.375 | 2029351-2029692 |
| 6044 | 1093 | proteasome (prosome, macropain) type 4 | 77.041 | 2033365-2033746 |
| 6101 | 1080 | matrix metallopeptidase 23 | 2.487 | 2053947-2054295 |
| 6154 | 1068 | cathepsin Z | 400.641 | 2073581-2073970 |
| 6247 | 1047 | ceroid-lipofuscinosis, neuronal 6 | 3.41 | 2107037-2107394 |
| 6327 | 1029 | calpain 5 | 2.411 | 2135026-2135381 |
| 6344 | 1025 | C2 calcium-dependent domain containing 3 | 0.136 | 2141185-2141522 |
| 6512 | 985 | proteasome (prosome, macropain) type 5 | 77.333 | 2200953-2201317 |
| 6552 | 976 | endothelin converting enzyme 2 | 2.313 | 2215190-2215580 |
| 6611 | 966 | proteasome (prosome, macropain) type 3 | 3.156 | 2236096-2236486 |
| 6656 | 957 | proteasome (prosome, macropain) type 6 | 42.616 | 2251849-2252237 |
| 6686 | 950 | apoptotic peptidase activating factor 1 | 0.325 | 2262408-2262743 |
| 6745 | 936 | proteasome (prosome, macropain) β type 8 | 32.531 | 2282619-2282981 |
| | | (large multifunctional peptidase 7) | | |
| 6769 | 933 | proteasome (prosome, macropain) β type 10 | 3.428 | 2291135-2291518 |
| 6798 | 926 | caspase 7 | 0.436 | 2301618-2301960 |
| 6818 | 920 | proteasome (prosome, macropain) β type 7 | 44.299 | 2308285-2308647 |
| 6848 | 914 | proteasome (prosome, macropain) β type 4 | 25.753 | 2318721-2319092 |
| 6967 | 888 | proteasome (prosome, macropain) β type 1 | 101.582 | 2357085-2357484 |
| 6999 | 880 | caseinolytic peptidase, ATP-dependent, | 23.993 | 2368027-2368394 |
| | | proteolytic subunit homolog (E. coli) | | |
| 7109 | 858 | matrix metallopeptidase 19 | 0.305 | 2404764-2405144 |
| 7120 | 855 | caspase 6 | 4.965 | 2408466-2408843 |
| 7300 | 811 | proteasome (prosome, macropain) type 7 | 52.239 | 2467566-2467883 |
| 7433 | 780 | proteasome (prosome, macropain) β type 5 | 25.65 | 2511900-2512253 |
| 7532 | 756 | cathepsin O | 0.321 | 2544359-2544680 |
| 7563 | 747 | proteasome (prosome, macropain) type 2 | 6.117 | 2554532-2554886 |
| 7620 | 734 | proteasome (prosome, macropain) β type 3 | 8.915 | 2572635-2572964 |
| 7721 | 709 | aurora kinase A interacting protein 1 | 9.974 | 2606127-2606501 |
| 7782 | 693 | ATP/GTP binding protein-like 3 | 0.407 | 2627002-2627350 |
| 7940 | 648 | matrix metallopeptidase 17 | 0.224 | 2680510-2680844 |
| 7948 | 646 | pyroglutamyl-peptidase I | 0.831 | 2683195-2683515 |
| 7979 | 638 | protease, serine, 8 (prostasin) | 0.479 | 2693206-2693562 |
| 8026 | 624 | CASP2 and RIPK1 domain containing | 1.176 | 2709036-2709355 |
| | | adaptor with death domain | | |
| 8056 | 612 | caspase 2 | 1.166 | 2718675-2719039 |
| 8255 | 558 | matrix metallopeptidase 24 | 6.978 | 2781318-2781710 |
| 8290 | 549 | proteasome (prosome, macropain) β type 2 | 3.953 | 2793443-2793832 |
| 8352 | 535 | IMP1 inner mitochondrial membrane | 6.039 | 2814696-2815033 |
| | | peptidase-like (S. cerevisiae) | | |
| 8440 | 510 | disintegrin-like & metallopeptidase (reprolysin | 0.139 | 2845165-2845528 |
| | | type) with thrombospondin type 1 motif, 4 | | |
| 8466 | 504 | proteasome (prosome, macropain) β type 6 | 1.2 | 2853165-2853489 |
| 8547 | 487 | small optic lobes homolog (Drosophila) | 0.173 | 2879932-2880319 |
| 8577 | 481 | calpain 11 | 0.187 | 2889008-2889328 |
| 8597 | 477 | mannan-binding lectin serine peptidase 2 | 0.156 | 2896069-2896411 |
| 8653 | 465 | membrane-bound transcription factor | 0.105 | 2915060-2915410 |
| | | peptidase, site 2 | | |
| 8917 | 414 | caspase 8 | 0.2 | 2995593-2995870 |
| 8935 | 409 | carboxypeptidase N, polypeptide 1 | 0.233 | 3000705-3001032 |
| 8980 | 398 | disintegrin & metallopeptidase domain 19 | 0.707 | 3012906-3013172 |
| | | (meltrin β) | | |
| 9067 | 373 | proteasome (prosome, macropain) subunit, β | 0.464 | 3035689-3035987 |
| | | type 9 (large multifunctional peptidase 2) | | |
| 9119 | 360 | SUMO1/sentrin specific peptidase 1 | 0.104 | 3048694-3048900 |
| 9253 | 329 | phosphate regulating gene with homologies to | 0.053 | 3078631-3078850 |
| | | endopeptidases on the X chromosome | | |
| | | (hypophosphatemia, vitamin D resistant rickets) | | |
| 9290 | 319 | carboxypeptidase B2 (plasma) | 0.216 | 3086591-3086854 |
| 9365 | 296 | cathepsin W | 0.241 | 3102885-3103082 |
| 9403 | 282 | RIKEN cDNA 4930486L24 gene | 0.203 | 3109975-3110173 |
| 9412 | 278 | cDNA sequence BC039632 | 0.114 | 3111726-3111929 |
| 9418 | 275 | IMP2 inner mitochondrial membrane | 0.242 | 3112815-3113006 |
| | | peptidase-like (S. cerevisiae) | | |
| 9498 | 244 | calpain 12 | 0.103 | 3126461-3126617 |
| 9517 | 238 | mucosa associated lymphoid tissue | 0.359 | 3129264-3129311 |
| | | lymphoma translocation gene 1 | | |
| 9529 | 234 | disintegrin & metallopeptidase domain 1a | 0.077 | 3130955-3131114 |
| 9574 | 215 | SUMO1/sentrin specific peptidase 7 | 0.045 | 3137116-3137276 |
| 9627 | 195 | cathepsin 8 | 0.092 | 3142354-3142386 |
| 9644 | 188 | proteasome (prosome, macropain) β type, 11 | 0.052 | 3143952-3143972 |
| 9647 | 187 | disintegrin & metallopeptidase domain 28 | 0.137 | 3144200-3144221 |
| 9669 | 175 | methionine aminopeptidase-like 1 | 0.139 | 3146223-3146337 |
| 3157186 | 770 | SEC11 homolog C (S. cerevisiae) | 22.702 | 3178484-3178583 |
| 3157231 | 468 | macrophage stimulating 1 (hepatocyte | 0.205 | 3240817-3240916 |
| | | growth factor-like) | | |
| 3157254 | 428 | transferrin receptor 2 | 0.148 | 3252917-3253016 |
| 3157343 | 370 | predicted gene 1019 | 0.391 | 3193971-3194070 |
| 3157354 | 430 | cathepsin K | 0.29 | 3278249-3278348 |
| 3157355 | 419 | calpain 8 | 0.461 | 3258905-3259004 |
| 3157374 | 287 | carnosine dipeptidase 1 (metallopeptidase | 0.102 | 3245017-3245116 |
| | | M20 family) | | |
| 3157412 | 788 | dipeptidylpeptidase 10 | 0.189 | 3248617-3248716 |
| 3157448 | 1697 | folate hydrolase | 1.451 | 3185871-3185970 |
| 3157520 | 492 | complement component 1, r subcomponent-like | 0.264 | 3224791-3224890 |
| 3157628 | 194 | disintegrin & metallopeptidase domain 33 | 0.061 | 3206058-3206157 |
| 3157660 | 369 | echinoderm microtubule associated protein | 0.16 | 3266705-3266804 |
| | | like 2 | | |
| 3157845 | 837 | mast cell protease 8 | 4.869 | 3206558-3206657 |
| 3157898 | 422 | disintegrin-like & metallopeptidase | 0.115 | 3193471-3193570 |
| | | (reprolysin type) with thrombospondin | | |
| | | type 1 motif, 15 | | |
| 3157899 | 306 | napsin A aspartic peptidase | 0.207 | 3240917-3241016 |
| 3157906 | 387 | cathepsin S | 0.283 | 3272096-3272195 |
| 3157949 | 477 | protein C | 0.42 | 3271796-3271895 |
| 3158015 | 396 | mast cell protease 4 | 0.405 | 3210058-3210157 |
| 3158034 | 923 | HtrA serine peptidase 3 | 0.583 | 3258505-3258604 |
| 3158065 | 1746 | WD repeat domain 7 | 1.717 | 3273496-3273595 |
| 3158090 | 371 | secernin 2 | 0.243 | 3163021-3163120 |
| 3158135 | 418 | mannan-binding lectin serine peptidase 1 | 0.152 | 3282249-3282348 |
| 3158156 | 463 | NA | 0.451 | 3181384-3181483 |
| 3158177 | 415 | NA | 0.13 | 3231817-3231916 |
| 3158199 | 521 | hepatocyte growth factor | 0.226 | 3253417-3253516 |
| 3158201 | 416 | matrix metallopeptidase 21 | 0.224 | 3195471-3195570 |
| 3158231 | 385 | matrix metallopeptidase 16 | 0.085 | 3174184-3174283 |
| 3158246 | 338 | coagulation factor VII | 0.181 | 3207558-3207657 |
| 3158294 | 648 | matrix metallopeptidase 2 | 0.413 | 3214291-3214390 |
| 3158365 | 431 | complement component factor i | 0.209 | 3178584-3178683 |
| 3158378 | 492 | alanyl (membrane) aminopeptidase | 0.144 | 3228717-3228816 |

TABLE 12
Extracellular Space; External Region (Chinese hamster)

| SEQ | | | Avg | siRNA SEQ |
|---|---|---|---|---|
| ID NO: | consL | Description | Cov | ID NOs: |
| 7 | 4892 | collagen, type IV, 2 | 29.59 | 11662-12024 |
| 10 | 4667 | collagen, type V, 1 | 22.034 | 12499-12766 |
| 40 | 4217 | collagen, type IV, 1 | 71.884 | 22106-22419 |
| 53 | 4076 | laminin B1 subunit 1 | 72.723 | 26303-26608 |
| 68 | 3989 | laminin, γ 1 | 8.547 | 31249-31602 |
| 72 | 3984 | nidogen 1 | 31.556 | 32592-32943 |
| 98 | 3777 | neural cell adhesion molecule 1 | 1.452 | 41193-41507 |
| 99 | 3776 | inter-(globulin) inhibitor H5 | 3.94 | 41508-41833 |
| 106 | 3741 | latent TGF β binding protein 1 | 15.581 | 43659-44014 |
| 122 | 3653 | laminin, 5 | 10.318 | 48814-49139 |
| 150 | 3549 | UDP-N-acetyl--D-galactosamine:polypeptide | 11.757 | 57147-57422 |
| | | N-acetylgalactosaminyl transferase 1 | | |
| 168 | 3455 | activated leukocyte cell adhesion molecule | 11.813 | 62634-62891 |
| 178 | 3411 | UDP-N-acetyl--D-galactosamine:polypeptide | 22.835 | 65737-65999 |
| | | N-acetylgalactosaminyl transferase 2 | | |
| 188 | 3385 | fibronectin 1 | 39.064 | 68761-69090 |
| 228 | 3262 | collagen, type XII, 1 | 0.842 | 80671-81033 |
| 266 | 3179 | vascular endothelial growth factor A | 18.713 | 92246-92594 |
| 296 | 3122 | calumenin | 31.456 | 101047-101312 |
| 331 | 3068 | collagen, type XVI, 1 | 16.307 | 110363-110636 |
| 373 | 2991 | CD44 antigen | 11.502 | 122703-122982 |
| 374 | 2990 | ring finger and SPRY domain containing 1 | 5.312 | 122983-123259 |
| 392 | 2965 | lysyl oxidase-like 4 | 3.371 | 128072-128461 |
| 428 | 2922 | coiled-coil domain containing 80 | 7.726 | 138093-138362 |
| 435 | 2913 | low density lipoprotein receptor-related protein | 3.732 | 140196-140578 |
| | | 8, apolipoprotein e receptor | | |
| 546 | 2787 | DnaJ (Hsp40) homolog, subfamily C, member 10 | 22.023 | 171304-171555 |
| 557 | 2776 | disintegrin & metallopeptidase domain 9 | 15.711 | 174168-174399 |
| | | (meltrin γ) | | |
| 602 | 2739 | lysyl oxidase-like 3 | 1.964 | 187446-187711 |
| 655 | 2695 | perlecan (heparan sulfate proteoglycan 2) | 13.274 | 203335-203554 |
| 677 | 2678 | AE binding protein 1 | 54.178 | 210228-210444 |
| 679 | 2677 | collagen, type VI, 1 | 34.848 | 210698-211081 |
| 703 | 2663 | RIKEN cDNA 2610507B11 gene | 20.912 | 217294-217526 |
| 704 | 2662 | serine (or cysteine) peptidase inhibitor, | 33.405 | 217527-217924 |
| | | clade E, member 1 | | |
| 726 | 2641 | collagen, type VI, 2 | 42.145 | 224615-225009 |
| 798 | 2590 | collagen & calcium binding EGF domains 1 | 2.683 | 246931-247299 |
| 816 | 2577 | disintegrin & metallopeptidase domain 23 | 0.593 | 252647-252954 |
| 885 | 2543 | platelet-derived growth factor, C polypeptide | 3.586 | 273882-274243 |
| 941 | 2519 | heat shock protein 5 | 729.81 | 292590-292837 |
| 956 | 2506 | integrin 5 (fibronectin receptor) | 13.308 | 297403-297671 |
| 968 | 2500 | acid phosphatase-like 2 | 10.599 | 301329-301569 |
| 971 | 2499 | WNT1 inducible signaling pathway protein 1 | 3.327 | 302229-302482 |
| 986 | 2492 | thrombospondin 1 | 2.743 | 307445-307775 |
| 1014 | 2473 | tissue inhibitor of metalloproteinase 2 | 22.337 | 317000-317395 |
| 1034 | 2463 | sema domain, immunoglobulin domain (Ig), | 15.39 | 323916-324170 |
| | | short basic domain, secreted, (semaphorin) 3B | | |
| 1059 | 2448 | glypican 6 | 2.853 | 332251-332483 |
| 1079 | 2437 | thrombospondin 3 | 16.07 | 338433-338822 |
| 1149 | 2404 | MAM domain containing 2 | 23.86 | 362422-362815 |
| 1194 | 2384 | disintegrin-like & metallopeptidase (reprolysin | 8.75 | 377552-377859 |
| | | type) with thrombospondin type 1 motif, 7 | | |
| 1216 | 2374 | integrin V | 0.85 | 384630-384864 |
| 1274 | 2346 | quiescin Q6 sulfhydryl oxidase 1 | 17.49 | 403798-404029 |
| 1307 | 2332 | laminin, β 2 | 3.856 | 414909-415222 |
| 1382 | 2293 | CD276 antigen | 2.822 | 440554-440858 |
| 1408 | 2285 | TBC1 domain family, member 15 | 5.501 | 449214-449575 |
| 1423 | 2276 | plasminogen activator, tissue | 2.837 | 454515-454869 |
| 1424 | 2276 | connective tissue growth factor | 6.301 | 454870-455117 |
| 1529 | 2238 | interleukin 6 signal transducer | 1.155 | 490131-490451 |
| 1583 | 2214 | cleft lip & palate associated transmembrane | 6.218 | 508317-508686 |
| | | protein 1 | | |
| 1587 | 2213 | collagen, type XXVII, 1 | 0.476 | 509761-510121 |
| 1662 | 2187 | ecto-NOX disulfide-thiol exchanger 2 | 1.262 | 536177-536522 |
| 1681 | 2181 | brain derived neurotrophic factor | 1.421 | 542519-542783 |
| 1694 | 2176 | toll-like receptor 2 | 12.95 | 547130-547467 |
| 1700 | 2175 | transforming growth factor, β receptor II | 17.68 | 549106-549395 |
| 1713 | 2171 | lysyl oxidase-like 1 | 27.43 | 553603-553837 |
| 1723 | 2167 | prosaposin | 159.42 | 556999-557313 |
| 1728 | 2165 | leprecan 1 | 29.15 | 558793-559105 |
| 1785 | 2150 | tuftelin 1 | 6.024 | 578466-578777 |
| 1792 | 2147 | family with sequence similarity 108, member B | 12.36 | 580929-581285 |
| 1801 | 2142 | biglycan | 335.92 | 584020-584336 |
| 1828 | 2136 | matrix metallopeptidase 9 | 16.328 | 593202-593492 |
| 1831 | 2134 | dystroglycan 1 | 3.205 | 594147-594505 |
| 1841 | 2131 | glypican 1 | 9.404 | 597502-597879 |
| 1843 | 2130 | lysosomal-associated membrane protein 1 | 239.94 | 598208-598530 |
| 1865 | 2124 | secreted acidic cysteine rich glycoprotein | 240.27 | 605640-606011 |
| 1902 | 2112 | olfactomedin-like 2B | 15.33 | 618054-618379 |
| 1934 | 2100 | heparin-binding EGF-like growth factor | 10.18 | 629091-629425 |
| 1990 | 2082 | protein S ( ) | 10.73 | 648173-648463 |
| 2065 | 2055 | integrin FG-GAP repeat containing 1 | 7.636 | 673176-673566 |
| 2088 | 2048 | ST3 β-galactoside-2,3-sialyltransferase 1 | 5.651 | 681105-681454 |
| 2109 | 2041 | disintegrin-like & metallopeptidase (reprolysin | 0.788 | 687923-688239 |
| | | type) with thrombospondin type 1 motif, 1 | | |
| 2140 | 2029 | colony stimulating factor 1 (macrophage) | 2.182 | 698431-698749 |
| 2440 | 1946 | arginyl aminopeptidase (aminopeptidase B) | 9.264 | 800159-800460 |
| 2474 | 1940 | epiregulin | 9.501 | 811533-811821 |
| 2477 | 1938 | complement component factor h | 1.484 | 812520-812875 |
| 2542 | 1922 | selenoprotein P, plasma, 1 | 49.03 | 835040-835364 |
| 2618 | 1903 | granulin | 165.89 | 860464-860761 |
| 2627 | 1901 | tubulointerstitial nephritis antigen-like 1 | 471.92 | 863337-863698 |
| 2667 | 1890 | family with sequence similarity 20, member C | 2.956 | 876909-877243 |
| 2698 | 1885 | insulin-like growth factor binding protein 4 | 45.48 | 887505-887820 |
| 2719 | 1879 | extracellular matrix protein 1 | 8.456 | 894665-894972 |
| 2722 | 1877 | calreticulin | 630.60 | 895691-896051 |
| 2724 | 1876 | cysteine rich protein 61 | 28.82 | 896415-896793 |
| 2755 | 1869 | tenascin XB | 0.354 | 907253-907581 |
| 2774 | 1862 | glucose-fructose oxidoreductase domain | 4.766 | 913662-913993 |
| | | containing 2 | | |
| 2782 | 1861 | procollagen C-endopeptidase enhancer 2 | 46.63 | 916348-916725 |
| 2820 | 1853 | biotinidase | 6.907 | 929397-929702 |
| 2866 | 1840 | milk fat globule-EGF factor 8 protein | 184.99 | 945014-945413 |
| 2890 | 1833 | coiled-coil domain containing 126 | 9.438 | 953382-953706 |
| 2960 | 1813 | elastin microfibril interfacer 1 | 5.563 | 977509-977878 |
| 2980 | 1806 | galactoside-binding lectin soluble 3 | 90.44 | 984430-984814 |
| 3067 | 1775 | fibroblast growth factor 7 | 1.663 | 1013719-1014044 |
| 3118 | 1765 | glucose phosphate isomerase 1 | 16.66 | 1031173-1031520 |
| 3129 | 1763 | matrix metallopeptidase 3 | 44.78 | 1034832-1035193 |
| 3242 | 1737 | arylsulfatase J | 2.374 | 1073837-1074138 |
| 3284 | 1723 | sushi-repeat-containing protein, X-linked 2 | 13.969 | 1087870-1088253 |
| 3296 | 1720 | suppression of tumorigenicity 14 | 2.378 | 1092011-1092357 |
| | | (colon carcinoma) | | |
| 3297 | 1719 | four jointed box 1 (Drosophila) | 3.328 | 1092358-1092750 |
| 3318 | 1714 | ependymin related protein 1 (zebrafish) | 16.418 | 1099390-1099766 |
| 3349 | 1706 | RIKEN cDNA 4930503L19 gene | 2.085 | 1109779-1110086 |
| 3370 | 1701 | mannosidase 2, B2 | 6.356 | 1116936-1117323 |
| 3410 | 1689 | neuroblastoma, suppression of tumorigenicity 1 | 73.672 | 1130855-1131122 |
| 3509 | 1667 | heparanase | 5.741 | 1163608-1163901 |
| 3517 | 1666 | aarF domain containing kinase 1 | 1.499 | 1166401-1166741 |
| 3565 | 1652 | HtrA serine peptidase 1 | 42.699 | 1182505-1182824 |
| 3639 | 1636 | chitinase domain containing 1 | 16.866 | 1207474-1207818 |
| 3673 | 1628 | corneodesmosin | 3.545 | 1218944-1219310 |
| 3727 | 1618 | vascular endothelial growth factor C | 10.284 | 1237351-1237686 |
| 3749 | 1612 | ADAMTS-like 4 | 2.67 | 1244700-1245081 |
| 3783 | 1602 | epidermal growth factor-containing fibulin-like | 6.911 | 1256425-1256734 |
| | | extracellular matrix protein 1 | | |
| 3809 | 1594 | matrix metallopeptidase 10 | 43.632 | 1265238-1265630 |
| 3879 | 1578 | aldolase A, fructose-bisphosphate | 476.31 | 1288654-1288987 |
| 3926 | 1567 | clusterin | 40.878 | 1304084-1304407 |
| 4064 | 1533 | phospholipid transfer protein | 39.57 | 1350158-1350474 |
| 4109 | 1521 | glycosylphosphatidylinositol specific | 0.591 | 1365026-1365348 |
| | | phospholipase D1 | | |
| 4177 | 1507 | RIKEN cDNA A130022J15 gene | 1.007 | 1387950-1388266 |
| 4188 | 1504 | EGF-containing fibulin-like extracellular | 45.43 | 1391741-1392104 |
| | | matrix protein 2 | | |
| 4234 | 1494 | WAP, FS, Ig, KU, & NTR-containing protein 1 | 1.307 | 1407418-1407713 |
| 4240 | 1493 | complement factor properdin | 2.075 | 1409395-1409692 |
| 4245 | 1492 | Ser (or Cys) peptidase inhibitor, clade I, member 1 | 0.687 | 1410934-1411281 |
| 4280 | 1485 | glutathione reductase | 6.516 | 1422793-1423122 |
| 4282 | 1485 | matrix metallopeptidase 12 | 15.393 | 1423446-1423812 |
| 4319 | 1476 | ST3 beta-galactoside-2,3-sialyltransferase 2 | 1.043 | 1435989-1436317 |
| 4345 | 1471 | procollagen C-endopeptidase enhancer protein | 38.334 | 1444649-1444973 |
| 4362 | 1468 | serum amyloid A-like 1 | 2.535 | 1450214-1450482 |
| 4405 | 1458 | tsukushin | 2.692 | 1464641-1464971 |
| 4410 | 1457 | sodium channel, nonvoltage-gated 1 | 0.749 | 1466293-1466624 |
| 4417 | 1456 | ADP-dependent glucokinase | 1.872 | 1468606-1468902 |
| 4513 | 1433 | leukemia inhibitory factor | 2.095 | 1499872-1500182 |
| 4538 | 1428 | RIKEN cDNA 3110057O12 gene | 0.612 | 1508213-1508566 |
| 4576 | 1420 | CD109 antigen | 0.579 | 1521122-1521452 |
| 4614 | 1413 | family with sequence similarity 3, member A | 24.923 | 1533979-1534266 |
| 4627 | 1408 | parathyroid hormone-like peptide | 4.769 | 1537818-1538138 |
| 4767 | 1376 | serine (or cysteine) peptidase inhibitor, | 20.015 | 1584786-1585074 |
| | | clade F, member 1 | | |
| 4772 | 1374 | annexin A2 | 701.66 | 1586334-1586631 |
| 4801 | 1368 | cysteine-rich with EGF-like domains 2 | 53.263 | 1596381-1596717 |
| 4834 | 1362 | hedgehog interacting protein-like 1 | 1.94 | 1607854-1608237 |
| 4843 | 1359 | laminin, γ 2 | 0.673 | 1610932-1611257 |
| 4846 | 1358 | family with sequence similarity 108, member A | 22.48 | 1611921-1612236 |
| 4847 | 1358 | secreted phosphoprotein 1 | 200.26 | 1612237-1612512 |
| 4878 | 1352 | C1q and tumor necrosis factor related protein 4 | 48.396 | 1622523-1622869 |
| 4923 | 1344 | Von Willebrand factor homolog | 0.168 | 1638235-1638612 |
| 4959 | 1336 | paraoxonase 2 | 17.99 | 1650552-1650935 |
| 4965 | 1332 | collagen, type III, 1 | 0.44 | 1652715-1653073 |
| 4993 | 1326 | collagen, type XVIII, 1 | 0.529 | 1662476-1662775 |
| 4995 | 1325 | Norrie disease (pseudoglioma) (human) | 2.955 | 1663144-1663508 |
| 5017 | 1320 | olfactomedin-like 3 | 1.465 | 1670554-1670828 |
| 5071 | 1308 | endonuclease domain containing 1 | 1.415 | 1688826-1689139 |
| 5100 | 1301 | sema domain, immunoglobulin domain (Ig), | 0.608 | 1698838-1699148 |
| | | short basic domain, secreted, (semaphorin) 3E | | |
| 5102 | 1300 | complement component (3b/4b) receptor 1-like | 36.058 | 1699537-1699891 |
| 5103 | 1300 | histocompatibility 2, D region locus 1 | 14.507 | 1699892-1699970 |
| 5145 | 1290 | dehydrogenase/reductase (SDR family) | 3.209 | 1714013-1714298 |
| | | member 13 | | |
| 5151 | 1288 | cytokine receptor-like factor 1 | 35.42 | 1715952-1716278 |
| 5183 | 1283 | acid phosphatase 6, lysophosphatidic | 4.044 | 1727109-1727397 |
| 5231 | 1274 | latent transforming growth factor β binding | 0.288 | 1743609-1743996 |
| | | protein 2 | | |
| 5233 | 1274 | histocompatibility 2, K1, K region | 12.62 | 1744314-1744510 |
| 5244 | 1272 | interleukin 4 receptor, | 1.087 | 1748021-1748398 |
| 5265 | 1268 | interleukin 33 | 27.994 | 1755091-1755384 |
| 5270 | 1267 | zona pellucida binding protein 2 | 8.813 | 1756658-1757006 |
| 5275 | 1265 | family with sequence similarity 3, member C | 6.069 | 1758518-1758803 |
| 5357 | 1245 | transforming growth factor, β 1 | 13.689 | 1787146-1787456 |
| 5390 | 1239 | N-acetylglucosamine-1-phosphotransferase, | 11.34 | 1799084-1799470 |
| | | γ subunit | | |
| 5400 | 1237 | cartilage associated protein | 24.359 | 1802419-1802805 |
| 5421 | 1232 | intercellular adhesion molecule 1 | 3.334 | 1809854-1810180 |
| 5428 | 1230 | calsyntenin 1 | 0.828 | 1812199-1812578 |
| 5435 | 1229 | meteorin, glial cell differentiation regulator-like | 5.487 | 1814631-1814930 |
| 5450 | 1225 | wingless-related MMTV integration site 7B | 0.932 | 1819882-1820264 |
| 5519 | 1207 | glucose-fructose oxidoreductase domain | 0.479 | 1844526-1844882 |
| | | containing 1 | | |
| 5520 | 1207 | carboxypeptidase X 1 (M14 family) | 0.795 | 1844883-1845160 |
| 5529 | 1205 | glutamyl aminopeptidase | 0.69 | 1847806-1848189 |
| 5537 | 1202 | angiopoietin-like 4 | 0.987 | 1850651-1851035 |
| 5550 | 1200 | a disintegrin and metallopeptidase domain 17 | 1.374 | 1855220-1855596 |
| 5556 | 1199 | dickkopf homolog 3 (Xenopus laevis) | 1.782 | 1857147-1857502 |
| 5644 | 1179 | complement component 3 | 0.472 | 1888266-1888655 |
| 5682 | 1170 | transforming growth factor, β receptor III | 6.658 | 1901807-1902171 |
| 5694 | 1168 | vascular endothelial growth factor B | 11.401 | 1906017-1906367 |
| 5710 | 1164 | decorin | 1.4 | 1911705-1912079 |
| 5716 | 1164 | cofilin 1, non-muscle | 107.83 | 1914036-1914356 |
| 5718 | 1163 | lysyl oxidase-like 2 | 0.322 | 1914742-1915076 |
| 5735 | 1160 | thioredoxin domain containing 16 | 0.533 | 1920932-1921309 |
| 5752 | 1156 | capping protein (actin filament), gelsolin-like | 62.723 | 1927144-1927507 |
| 5783 | 1148 | lectin, galactose binding, soluble 9 | 12.269 | 1938395-1938769 |
| 5792 | 1147 | matrix metallopeptidase 13 | 0.724 | 1941794-1942151 |
| 5800 | 1145 | multiple coagulation factor deficiency 2 | 5.202 | 1944542-1944919 |
| 5810 | 1144 | Kazal-type serine peptidase inhibitor domain 1 | 37.259 | 1948146-1948458 |
| 5841 | 1138 | collagen, type V, 2 | 0.225 | 1959286-1959679 |
| 5854 | 1136 | caspase 1 | 2.306 | 1964106-1964500 |
| 5872 | 1132 | γ-glutamyl hydrolase | 9.842 | 1970781-1971062 |
| 5964 | 1111 | colony stimulating factor 3 (granulocyte) | 2.413 | 2004485-2004820 |
| 5967 | 1110 | cellular repressor of E1A-stimulated genes 1 | 3.396 | 2005583-2005881 |
| 6004 | 1100 | RIKEN cDNA 1600012H06 gene | 1.469 | 2018789-2019169 |
| 6033 | 1095 | protease, serine 27 | 3.375 | 2029351-2029692 |
| 6059 | 1090 | torsin family 2, member A | 4.118 | 2038737-2039067 |
| 6069 | 1087 | DDRGK domain containing 1 | 25.9 | 2042411-2042776 |
| 6177 | 1063 | dehydrogenase/reductase (SDR family) member 11 | 3.811 | 2081334-2081729 |
| 6185 | 1062 | aminoacyl tRNA synthetase complex- | 33.092 | 2084323-2084687 |
| | | interacting multifunctional protein 1 | | |
| 6208 | 1056 | coiled-coil domain containing 134 | 4.556 | 2092810-2093167 |
| 6234 | 1050 | plasminogen activator, urokinase receptor | 78.786 | 2102477-2102872 |
| 6237 | 1049 | phospholipase A2, group XV | 1.496 | 2103576-2103969 |
| 6273 | 1039 | nerve growth factor | 9.393 | 2115896-2116286 |
| 6276 | 1038 | wingless-related MMTV integration site 4 | 32.674 | 2116955-2117340 |
| 6296 | 1034 | kelch-like 11 (Drosophila) | 0.425 | 2124257-2124635 |
| 6328 | 1028 | hydroxysteroid (17-β) dehydrogenase 11 | 4.421 | 2135382-2135767 |
| 6334 | 1028 | chemokine (C—X—C motif) ligand 12 | 0.641 | 2137589-2137972 |
| 6363 | 1021 | netrin 4 | 3.366 | 2148005-2148402 |
| 6385 | 1017 | follistatin | 0.853 | 2155919-2156270 |
| 6412 | 1009 | GLI pathogenesis-related 2 | 2.074 | 2165641-2165996 |
| 6457 | 998 | ecto-NOX disulfide-thiol exchanger 1 | 3.002 | 2181525-2181862 |
| 6493 | 989 | collagen, type VII, 1 | 0.344 | 2194670-2194969 |
| 6627 | 964 | meteorin, glial cell differentiation regulator | 3.641 | 2241580-2241948 |
| 6665 | 955 | hyaluronic acid binding protein 4 | 2.739 | 2255107-2255429 |
| 6773 | 932 | inhibin β-B | 1.597 | 2292605-2292959 |
| 6787 | 928 | wingless-related MMTV integration site 5B | 0.458 | 2297590-2297892 |
| 6816 | 921 | peroxidasin homolog (Drosophila) | 0.334 | 2307638-2308007 |
| 6819 | 920 | integrin 2b | 0.686 | 2308648-2308928 |
| 6830 | 918 | interleukin 19 | 4.282 | 2312386-2312719 |
| 6900 | 903 | phospholipase A2, group XIIA | 11.576 | 2335117-2335473 |
| 6950 | 893 | angiogenic factor with G patch and FHA | 0.281 | 2351743-2352058 |
| | | domains 1 | | |
| 6964 | 889 | Niemann Pick type C2 | 40.486 | 2356243-2356636 |
| 6974 | 887 | apolipoprotein A-I binding protein | 13.178 | 2359569-2359941 |
| 7015 | 877 | TNF (ligand) superfamily, member 12 | 4.328 | 2373485-2373776 |
| 7019 | 876 | Cys rich transmembrane BMP regulator 1 | 0.287 | 2374809-2375187 |
| | | (chordin like) | | |
| 7021 | 875 | matrilin 4 | 7.832 | 2375566-2375930 |
| 7022 | 875 | artemin | 2.794 | 2375931-2376296 |
| 7109 | 858 | matrix metallopeptidase 19 | 0.305 | 2404764-2405144 |
| 7125 | 853 | profilin 1 | 11.177 | 2410108-2410492 |
| 7126 | 852 | vasohibin 1 | 0.138 | 2410493-2410795 |
| 7142 | 849 | Parkinson disease 7 domain containing 1 | 1.935 | 2415737-2416107 |
| 7156 | 846 | intercellular adhesion molecule 4, Landsteiner- | 5.958 | 2420123-2420515 |
| | | Wiener blood group | | |
| 7158 | 845 | c-fos induced growth factor | 3.445 | 2420809-2421101 |
| 7185 | 839 | leucine-rich repeats and calponin homology | 0.206 | 2429731-2430059 |
| | | (CH) domain containing 3 | | |
| 7192 | 839 | VGF nerve growth factor inducible | 0.371 | 2432094-2432431 |
| 7199 | 838 | transforming growth factor, β 3 | 1.124 | 2434410-2434754 |
| 7223 | 833 | chemokine (C—X—C motif) ligand 1 | 3.826 | 2442608-2443003 |
| 7234 | 830 | WNT1 inducible signaling pathway protein 2 | 1.032 | 2446311-2446606 |
| 7259 | 824 | leucine-rich repeat LGI family, member 4 | 0.356 | 2454637-2454993 |
| 7279 | 817 | follistatin-like 1 | 0.406 | 2460885-2461283 |
| 7305 | 810 | tissue factor pathway inhibitor | 4.848 | 2469295-2469576 |
| 7328 | 804 | inhibin | 0.548 | 2477026-2477404 |
| 7360 | 796 | placental specific protein 1 | 2.395 | 2487553-2487920 |
| 7380 | 793 | stromal cell derived factor 2 | 6.558 | 2494318-2494652 |
| 7450 | 775 | FMS-like tyrosine kinase 3 ligand | 4.868 | 2517516-2517899 |
| 7454 | 774 | platelet derived growth factor, | 4.859 | 2518844-2519200 |
| 7469 | 770 | CD1d1 antigen | 0.505 | 2523514-2523656 |
| 7475 | 769 | tissue inhibitor of metalloproteinase 1 | 42.275 | 2525246-2525550 |
| 7484 | 767 | UDP-Gal:betaGlcNAc β 1,4- | 0.387 | 2528454-2528763 |
| | | galactosyltransferase, polypeptide 1 | | |
| 7624 | 733 | sodium channel, nonvoltage-gated 1 β | 0.301 | 2574019-2574393 |
| 7628 | 732 | proline-rich Gla (G-carboxyglutamic acid) | 1.115 | 2575046-2575364 |
| | | polypeptide 2 | | |
| 7658 | 724 | hyaluronan and proteoglycan link protein 4 | 0.319 | 2584861-2585169 |
| 7676 | 720 | chemokine (C-C motif) ligand 2 | 14.55 | 2590794-2591157 |
| 7707 | 713 | intelectin 1 (galactofuranose binding) | 1.888 | 2601763-2602070 |
| 7726 | 708 | interleukin 17F | 3.058 | 2607930-2608234 |
| 7758 | 700 | bone morphogenetic protein 2 | 0.343 | 2618776-2619161 |
| 7770 | 697 | olfactomedin 2 | 0.593 | 2622919-2623236 |
| 7789 | 692 | collagen, type VIII, 1 | 0.136 | 2629576-2629946 |
| 7810 | 688 | mesencephalic astrocyte-derived | 3.849 | 2636612-2636951 |
| | | neurotrophic factor | | |
| 7820 | 685 | integrin X | 0.229 | 2639993-2640227 |
| 7827 | 683 | versican | 0.055 | 2642303-2642596 |
| 7874 | 666 | CD1d2 antigen | 0.935 | 2658252-2658336 |
| 7903 | 658 | interleukin 1 receptor accessory protein | 0.254 | 2667913-2668256 |
| 7929 | 651 | interleukin 23, subunit p19 | 0.852 | 2676772-2677097 |
| 7935 | 649 | follistatin-like 3 | 0.427 | 2678648-2679041 |
| 7938 | 649 | stanniocalcin 2 | 0.821 | 2679803-2680201 |
| 7940 | 648 | matrix metallopeptidase 17 | 0.224 | 2680510-2680844 |
| 7947 | 646 | wingless-type MMTV integration site 9A | 0.20 | 2682871-2683194 |
| 7979 | 638 | protease, serine, 8 (prostasin) | 0.479 | 2693206-2693562 |
| 8062 | 610 | fibroblast growth factor 18 | 1.273 | 2720721-2721030 |
| 8066 | 610 | ribonuclease, RNase A family 4 | 9.649 | 2721991-2722365 |
| 8108 | 598 | thymosin, β 4, X chromosome | 24.043 | 2734875-2735269 |
| 8119 | 595 | serglycin | 9.946 | 2738723-2739031 |
| 8138 | 590 | RIKEN cDNA 1700040I03 gene | 2.322 | 2744620-2744956 |
| 8146 | 588 | cardiotrophin-like cytokine factor 1 | 1.757 | 2747178-2747573 |
| 8167 | 584 | agouti related protein | 1.444 | 2753704-2754040 |
| 8218 | 570 | interleukin 18 | 2.856 | 2769797-2770097 |
| 8226 | 568 | DNA segment, Chr 17, Wayne State | 3.239 | 2772236-2772535 |
| | | University 104, expressed | | |
| 8244 | 562 | interleukin 1 receptor-like 1 | 0.299 | 2777898-2778255 |
| 8255 | 558 | matrix metallopeptidase 24 | 6.978 | 2781318-2781710 |
| 8257 | 558 | elastin microfibril interfacer 3 | 0.17 | 2782095-2782379 |
| 8303 | 547 | C1q and tumor necrosis factor related protein 1 | 0.218 | 2797989-2798315 |
| 8304 | 546 | macrophage migration inhibitory factor | 43.469 | 2798316-2798434 |
| 8332 | 540 | twisted gastrulation homolog 1 (Drosophila) | 0.318 | 2807636-2808031 |
| 8345 | 536 | Fas (TNF receptor superfamily member 6) | 0.501 | 2812206-2812506 |
| 8385 | 524 | natriuretic peptide precursor type B | 2.217 | 2825789-2826134 |
| 8387 | 523 | suprabasin | 2.479 | 2826504-2826901 |
| 8394 | 521 | cystatin C | 17.163 | 2828994-2829393 |
| 8410 | 516 | sema domain, immunoglobulin domain (Ig), | 0.212 | 2834784-2835155 |
| | | short basic domain, secreted, (semaphorin) 3C | | |
| 8440 | 510 | a disintegrin-like and metallopeptidase | 0.139 | 2845165-2845528 |
| | | (reprolysin type) with thrombospondin type 1 | | |
| | | motif, 4 | | |
| 8500 | 495 | natriuretic peptide precursor type A | 1.563 | 2864212-2864568 |
| 8504 | 494 | chemokine (C—X—C motif) ligand 10 | 1.586 | 2865648-2866015 |
| 8531 | 490 | interleukin 15 | 1.901 | 2874576-2874952 |
| 8553 | 485 | interleukin 11 | 0.384 | 2881854-2882091 |
| 8560 | 485 | retinoic acid receptor responder (tazarotene | 0.687 | 2883778-2884132 |
| | | induced) 2 | | |
| 8581 | 480 | lectin, galactose binding, soluble 1 | 282.39 | 2890379-2890745 |
| 8597 | 477 | mannan-binding lectin serine peptidase 2 | 0.156 | 2896069-2896411 |
| 8647 | 467 | RIKEN cDNA 2300009A05 gene | 0.768 | 2912945-2913330 |
| 8696 | 459 | CSF 2 (granulocyte-macrophage) | 1.109 | 2928757-2929061 |
| 8697 | 459 | interleukin 18 binding protein | 1.553 | 2929062-2929418 |
| 8698 | 459 | prenylcysteine oxidase 1 like | 0.228 | 2929419-2929743 |
| 8708 | 456 | apolipoprotein O-like | 0.456 | 2932503-2932836 |
| 8713 | 455 | neuron derived neurotrophic factor | 1.137 | 2933997-2934318 |
| 8746 | 450 | TNF receptor superfamily, member 4 | 0.392 | 2944708-2945036 |
| 8753 | 449 | sparc/osteonectin, cwcv & kazal-like domains | 0.172 | 2946657-2946988 |
| | | proteoglycan 1 | | |
| 8756 | 449 | integrin 1 | 0.15 | 2947656-2948022 |
| 8777 | 444 | laminin, 2 | 0.046 | 2954307-2954650 |
| 8784 | 443 | thyroglobulin | 0.076 | 2956549-2956869 |
| 8821 | 437 | apolipoprotein M | 0.598 | 2967624-2967944 |
| 8871 | 423 | spondin 2, extracellular matrix protein | 0.189 | 2982359-2982686 |
| 8876 | 422 | elastin microfibril interfacer 2 | 0.11 | 2983901-2984203 |
| 8916 | 414 | anti-Mullerian hormone | 0.248 | 2995308-2995592 |
| 8935 | 409 | carboxypeptidase N, polypeptide 1 | 0.233 | 3000705-3001032 |
| 8945 | 407 | insulin-like growth factor binding protein 6 | 0.548 | 3003421-3003704 |
| 9021 | 387 | hemopexin | 0.262 | 3023816-3024122 |
| 9063 | 374 | periostin, osteoblast specific factor | 0.118 | 3034618-3034877 |
| 9064 | 373 | complement component 8, γ polypeptide | 0.685 | 3034878-3035143 |
| 9079 | 370 | neuregulin 3 | 0.146 | 3038641-3038935 |
| 9116 | 361 | RIKEN cDNA 1190002N15 gene | 0.094 | 3047961-3048223 |
| 9120 | 360 | adrenomedullin | 0.331 | 3048901-3049164 |
| 9131 | 357 | apolipoprotein A-II | 1.494 | 3051648-3051933 |
| 9136 | 356 | nonagouti | 0.963 | 3052970-3053198 |
| 9151 | 352 | TNF receptor superfamily, member 22 | 0.691 | 3056380-3056639 |
| 9164 | 348 | TNF (ligand) superfamily, member 11 | 0.157 | 3058993-3059213 |
| 9185 | 344 | Serine (or Cys) peptidase inhibitor, clade C | 0.158 | 3063585-3063840 |
| | | (antithrombin), member 1 | | |
| 9207 | 339 | RIKEN cDNA A430110N23 gene | 0.132 | 3068647-3068843 |
| 9212 | 339 | canopy 4 homolog (zebrafish) | 0.335 | 3069460-3069696 |
| 9230 | 335 | regenerating islet-derived 3 γ | 0.43 | 3073532-3073815 |
| 9244 | 331 | arylsulfatase K | 0.177 | 3076784-3077031 |
| 9267 | 324 | cerebral dopamine neurotrophic factor | 0.109 | 3081521-3081786 |
| 9274 | 322 | bone morphogenetic protein 6 | 0.219 | 3083187-3083415 |
| 9290 | 319 | carboxypeptidase B2 (plasma) | 0.216 | 3086591-3086854 |
| 9293 | 318 | deoxyribonuclease 1-like 2 | 0.409 | 3087405-3087662 |
| 9295 | 318 | apolipoprotein H | 0.493 | 3087876-3088127 |
| 9307 | 312 | growth hormone receptor | 0.289 | 3090523-3090733 |
| 9325 | 307 | transglutaminase 4 (prostate) | 0.112 | 3094562-3094802 |
| 9363 | 296 | oncostatin M | 0.135 | 3102482-3102721 |
| 9366 | 295 | osteomodulin | 0.169 | 3103083-3103312 |
| 9367 | 295 | Fc receptor, IgG, low affinity IIb | 0.189 | 3103313-3103351 |
| 9368 | 295 | DAN domain family, member 5 | 0.189 | 3103352-3103518 |
| 9375 | 293 | antigen p97 (melanoma associated) identified | 0.073 | 3104582-3104752 |
| | | by mAbs 133.2 and 96.5 | | |
| 9394 | 285 | carboxylesterase 7 | 0.166 | 3108135-3108339 |
| 9402 | 282 | ISG15 ubiquitin-like modifier | 1.263 | 3109784-3109974 |
| 9403 | 282 | RIKEN cDNA 4930486L24 gene | 0.203 | 3109975-3110173 |
| 9404 | 281 | transmembrane protein 25 | 0.122 | 3110174-3110389 |
| 9412 | 278 | cDNA sequence BC039632 | 0.114 | 3111726-3111929 |
| 9431 | 270 | GLI pathogenesis-related 1 (glioma) | 0.512 | 3115200-3115432 |
| 9461 | 260 | carbonic anhydrase 15 | 0.231 | 3120401-3120588 |
| 9518 | 237 | cytotoxic T lymphocyte-associated protein 2 | 0.174 | 3129312-3129456 |
| 9536 | 233 | laminin γ 3 | 0.04 | 3131997-3132159 |
| 9560 | 222 | RIKEN cDNA 1110058L19 gene | 0.33 | 3135368-3135519 |
| 9593 | 210 | family with sequence similarity 20, member B | 0.05 | 3139182-3139331 |
| 9604 | 205 | sparc/osteonectin, cwcv and kazal-like | 0.313 | 3140413-3140532 |
| | | domains proteoglycan 2 | | |
| 9611 | 202 | chemokine (C-C motif) ligand 9 | 0.268 | 3141032-3141071 |
| 9654 | 185 | cerebellin 3 precursor protein | 0.051 | 3144853-3144886 |
| 9673 | 174 | cellular repressor of E1A-stimulated genes 2 | 0.11 | 3146685-3146736 |
| 9694 | 166 | histocompatibility 2, M region locus 3 | 0.309 | NA-NA |
| 9720 | 149 | chemokine (C—X—C motif) ligand 3 | 0.148 | 3149776-3149850 |
| 9740 | 139 | β cellulin, epidermal growth factor family | 0.073 | 3150839-3150877 |
| | | member | | |
| 9742 | 139 | hyaluronoglucosaminidase 1 | 0.064 | 3150976-3151021 |
| 9756 | 131 | glutathione peroxidase 3 | 0.087 | 3151589-3151685 |
| 3157149 | 488 | tectorin β | 0.18 | 3161121-3161220 |
| 3157152 | 479 | angiogenin, ribonuclease, RNase A family, 5 | 0.895 | 3217891-3217990 |
| 3157165 | 234 | surfactant associated protein D | 0.176 | 3266005-3266104 |
| 3157173 | 1664 | transcobalamin 2 | 5.78 | 3266205-3266304 |
| 3157204 | 1498 | NA | 0.661 | 3239917-3240016 |
| 3157207 | 463 | epiphycan | 0.269 | 3166484-3166583 |
| 3157217 | 384 | thrombospondin, type I, domain containing 4 | 0.044 | 3224191-3224290 |
| 3157225 | 705 | renalase, FAD-dependent amine oxidase | 2.03 | 3245517-3245616 |
| 3157231 | 468 | macrophage stimulating 1 (hepatocyte growth | 0.205 | 3240817-3240916 |
| | | factor-like) | | |
| 3157234 | 711 | neuregulin 4 | 1.009 | 3219591-3219690 |
| 3157276 | 1883 | cell adhesion molecule w/ homology to L1CAM | 0.289 | 3252517-3252616 |
| 3157279 | 427 | ectonucleotide pyrophosphatase/ | 0.153 | 3182184-3182283 |
| | | phosphodiesterase 3 | | |
| 3157283 | 323 | NA | 0.115 | 3279349-3279448 |
| 3157286 | 416 | C1q-like 3 | 0.132 | 3208858-3208957 |
| 3157290 | 388 | carbonic anhydrase 11 | 0.267 | 3238117-3238216 |
| 3157305 | 665 | angiomotin | 0.309 | 3173084-3173183 |
| 3157331 | 711 | isthmin 1 homolog (zebrafish) | 0.244 | 3172584-3172683 |
| 3157343 | 370 | predicted gene 1019 | 0.391 | 3193971-3194070 |
| 3157352 | 311 | killer cell lectin-like receptor, subfamily D, | 0.43 | 3221191-3221290 |
| | | member 1 | | |
| 3157362 | 1350 | immunoglobulin superfamily containing | 2.61 | 3279049-3279148 |
| | | leucine-rich repeat | | |
| 3157366 | 450 | angiotensinogen (serpin peptidase inhibitor, | 0.242 | 3260305-3260404 |
| | | clade A, member 8) | | |
| 3157368 | 373 | interleukin 16 | 0.075 | 3232717-3232816 |
| 3157372 | 584 | lipase, family member N | 0.389 | 3192971-3193070 |
| 3157373 | 339 | angiopoietin 4 | 0.222 | 3239317-3239416 |
| 3157414 | 285 | glycine receptor, β subunit | 0.096 | 3187971-3188070 |
| 3157415 | 568 | integrin 6 | 0.213 | 3201597-3201696 |
| 3157422 | 1431 | G protein-coupled receptor 125 | 1.185 | 3236817-3236916 |
| 3157455 | 494 | dehydrogenase/reductase (SDR family) member 7C | 0.832 | 3255005-3255104 |
| 3157459 | 250 | chemokine (C-C motif) ligand 11 | 0.299 | 3199071-3199170 |
| 3157475 | 403 | paraoxonase 3 | 0.226 | 3268005-3268104 |
| 3157481 | 804 | follistatin-like 4 | 0.303 | 3183884-3183983 |
| 3157491 | 639 | G protein-coupled receptor 98 | 0.033 | 3188771-3188870 |
| 3157500 | 458 | seizure related gene 6 | 0.114 | 3189371-3189470 |
| 3157503 | 787 | pentraxin related gene | 1.801 | 3175884-3175983 |
| 3157510 | 700 | secretory leukocyte peptidase inhibitor | 7.778 | 3248817-3248916 |
| 3157516 | 361 | roundabout homolog 4 (Drosophila) | 0.098 | 3164884-3164983 |
| 3157520 | 492 | complement component 1, r subcomponent-like | 0.264 | 3224791-3224890 |
| 3157537 | 234 | mucin 13, epithelial transmembrane | 0.08 | 3203297-3203396 |
| 3157558 | 742 | chemokine (C-C motif) ligand 7 | 6.395 | 3279849-3279948 |
| 3157590 | 520 | interleukin 13 receptor, 2 | 0.336 | 3213558-3213657 |
| 3157601 | 267 | fukutin related protein | 0.095 | 3212358-3212457 |
| 3157619 | 289 | fin bud initiation factor homolog (zebrafish) | 0.14 | 3185471-3185570 |
| 3157676 | 961 | extracellular matrix protein 2, female organ | 0.343 | 3256205-3256304 |
| | | and adipocyte specific | | |
| 3157717 | 366 | Fras1 related extracellular matrix protein 1 | 0.039 | 3271296-3271395 |
| 3157721 | 413 | EGF-like module containing, mucin-like, | 0.249 | 3218391-3218490 |
| | | hormone receptor-like sequence 1 | | |
| 3157729 | 356 | tectorin | 0.049 | 3257705-3257804 |
| 3157760 | 967 | interleukin 7 receptor | 0.428 | 3216691-3216790 |
| 3157775 | 648 | multiple EGF-like-domains 6 | 0.147 | 3174384-3174483 |
| 3157796 | 402 | secreted phosphoprotein 2 | 0.468 | 3270196-3270295 |
| 3157845 | 837 | mast cell protease 8 | 4.869 | 3206558-3206657 |
| 3157850 | 577 | collagen, type XV, 1 | 0.108 | 3250617-3250716 |
| 3157858 | 323 | apolipoprotein E | 0.255 | 3172384-3172483 |
| 3157868 | 306 | cathelicidin antimicrobial peptide | 0.513 | 3234517-3234616 |
| 3157885 | 1542 | sema domain, immunoglobulin domain (Ig), | 0.705 | 3168184-3168283 |
| | | short basic domain, secreted, (semaphorin) 3A | | |
| 3157898 | 422 | disintegrin-like and metallopeptidase (reprolysin | 0.115 | 3193471-3193570 |
| | | type) with thrombospondin type 1 motif, 15 | | |
| 3157902 | 1558 | fibrillin 1 | 0.197 | 3211258-3211357 |
| 3157936 | 2200 | laminin, 3 | 0.41 | 3160721-3160820 |
| 3157937 | 697 | collagen, type XVII, 1 | 0.131 | 3163384-3163483 |
| 3157938 | 372 | secretagogin, EF-hand calcium binding protein | 0.26 | 3258005-3258104 |
| 3157949 | 477 | protein C | 0.42 | 3271796-3271895 |
| 3157974 | 2507 | thrombospondin 2 | 1.595 | 3265805-3265904 |
| 3157977 | 1031 | interleukin 7 | 0.642 | 3242917-3243016 |
| 3158019 | 362 | ABO blood group (transferase A, 1-3-N- | 0.204 | 3185571-3185670 |
| | | acetylgalactosaminyltransferase, transferase B, | | |
| | | 1-3-galactosyltransferase) | | |
| 3158024 | 541 | immunoglobulin superfamily, member 10 | 0.078 | 3194171-3194270 |
| 3158034 | 923 | HtrA serine peptidase 3 | 0.583 | 3258505-3258604 |
| 3158038 | 176 | Fc receptor, IgE, high affinity I, γpolypeptide | 0.258 | 3201197-3201296 |
| 3158050 | 435 | lumican | 0.209 | 3262905-3263004 |
| 3158075 | 480 | potassium inwardly-rectifying channel, | 0.297 | 3169184-3169283 |
| | | subfamily J, member 3 | | |
| 3158077 | 496 | fibulin 5 | 0.198 | 3239017-3239116 |
| 3158079 | 282 | expressed sequence AI462493 | 0.577 | 3210858-3210957 |
| 3158107 | 484 | scavenger receptor cysteine rich domain | 0.181 | 3161821-3161920 |
| | | containing, group B (4 domains) | | |
| 3158135 | 418 | mannan-binding lectin serine peptidase 1 | 0.152 | 3282249-3282348 |
| 3158185 | 485 | interleukin 1 family, member 9 | 2.527 | 3241217-3241316 |
| 3158191 | 197 | dermatopontin | 0.125 | 3210958-3211057 |
| 3158201 | 416 | matrix metallopeptidase 21 | 0.224 | 3195471-3195570 |
| 3158209 | 1954 | fibroblast growth factor receptor 2 | 2.109 | 3207458-3207557 |
| 3158212 | 2457 | RIKEN cDNA 1300010F03 gene | 0.56 | 3182084-3182183 |
| 3158227 | 235 | bactericidal/permeability-increasing protein-like 2 | 0.101 | 3160521-3160620 |
| 3158236 | 1428 | R-spondin 3 homolog (Xenopus laevis) | 0.883 | 3261305-3261404 |
| 3158246 | 338 | coagulation factor VII | 0.181 | 3207558-3207657 |
| 3158249 | 442 | amylase 1, salivary | 0.247 | 3203097-3203196 |
| 3158274 | 393 | C-type lectin domain family 18, member A | 0.214 | 3219791-3219890 |
| 3158294 | 648 | matrix metallopeptidase 2 | 0.413 | 3214291-3214390 |
| 3158295 | 426 | stratifin | 0.681 | 3216091-3216190 |
| 3158307 | 369 | placental growth factor | 0.923 | 3227817-3227916 |
| 3158309 | 408 | adiponectin, C1Q and collagen domain containing | 0.331 | 3225317-3225416 |
| 3158310 | 262 | neuropeptide B | 0.483 | 3278149-3278248 |
| 3158331 | 982 | NEL-like 1 (chicken) | 0.565 | 3163221-3163320 |
| 3158365 | 431 | complement component factor i | 0.209 | 3178584-3178683 |
| 3158373 | 246 | pyroglutamylated RFamide peptide | 0.172 | 3209458-3209557 |
| 3158381 | 762 | CD24a antigen | 0.906 | 3245917-3246016 |
| 3158387 | 364 | ladinin | 0.193 | 3193271-3193370 |
| 3158415 | 552 | growth differentiation factor 11 | 0.45 | 3178384-3178483 |
| 3158419 | 1567 | NA | 1.244 | 3273596-3273695 |

TABLE 13
Cell cycle/Cell Division (Chinese hamster)

| SEQ | | | Avg | siRNA |
|---|---|---|---|---|
| ID NO: | consL | Description | Cov | SEQ ID NOs: |
| 1 | 7293 | ubiquitin specific peptidase 9, X chromosome | 6.127 | 9772-10147 |
| 19 | 4458 | platelet-activating factor acetylhydrolase, | 4.915 | 15430-15711 |
| | | isoform 1b, subunit 1 | | |
| 25 | 4353 | PDS5, regulator of cohesion maintenance, | 2.006 | 17099-17460 |
| | | homolog B (S. cerevisiae) | | |
| 81 | 3902 | integrin β 1 (fibronectin receptor β) | 126.69 | 35564-35891 |
| 126 | 3635 | E2F transcription factor 3 | 7.133 | 50121-50455 |
| 146 | 3553 | microtubule-actin crosslinking factor 1 | 3.329 | 56027-56372 |
| 149 | 3549 | stromal antigen 1 | 5.503 | 56906-57146 |
| 189 | 3384 | phosphatase and tensin homolog | 0.633 | 69091-69404 |
| 214 | 3308 | microtubule-associated protein, RP/EB | 9.685 | 76455-76767 |
| | | family, member 2 | | |
| 236 | 3232 | non-SMC condensin II complex, subunit D3 | 5.339 | 83095-83338 |
| 239 | 3230 | septin 11 | 14.203 | 83878-84130 |
| 266 | 3179 | vascular endothelial growth factor A | 18.713 | 92246-92594 |
| 287 | 3132 | splicing factor 1 | 10.149 | 98068-98328 |
| 304 | 3108 | Nipped-B homolog (Drosophila) | 1.896 | 103144-103477 |
| 317 | 3089 | cytoskeleton associated protein 5 | 5.989 | 106729-106971 |
| 345 | 3034 | glycogen synthase kinase 3 β | 0.647 | 114424-114743 |
| 375 | 2989 | RAD21 homolog (S. pombe) | 34.322 | 123260-123508 |
| 378 | 2983 | tousled-like kinase 1 | 3.811 | 124295-124551 |
| 382 | 2979 | breakpoint cluster region | 3.754 | 125289-125540 |
| 384 | 2977 | transcriptional regulator, SIN3A (yeast) | 3.56 | 125791-126119 |
| 426 | 2925 | stromal antigen 2 | 1.018 | 137619-137852 |
| 431 | 2919 | Tia1 cytotoxic granule-associated RNA | 12.569 | 139041-139241 |
| | | binding protein-like 1 | | |
| 432 | 2919 | cyclin D1 | 18.856 | 139242-139629 |
| 451 | 2894 | kinetochore associated 1 | 2.501 | 144746-145029 |
| 477 | 2865 | spindlin 1 | 18.581 | 151421-151677 |
| 486 | 2857 | anaphase promoting complex subunit 1 | 2.309 | 154085-154328 |
| 510 | 2835 | calcium/calmodulin-dependent protein kinase II γ | 4.887 | 161048-161267 |
| 528 | 2814 | spastin | 4.005 | 166072-166288 |
| 540 | 2799 | signal transducer & activator of transcription 5B | 1.323 | 169415-169753 |
| 549 | 2785 | AT hook containing transcription factor 1 | 2.992 | 172063-172296 |
| 573 | 2763 | calmodulin 1 | 15.152 | 178775-179029 |
| 589 | 2746 | nuclear protein in the AT region | 2.695 | 183475-183690 |
| 644 | 2703 | mitogen-activated protein kinase 6 | 18.977 | 200294-200550 |
| 658 | 2692 | structural maintenace of chromosomes 3 | 18.331 | 204131-204513 |
| 662 | 2689 | calcium/calmodulin-dependent protein | 5.415 | 205498-205717 |
| | | kinase II, δ | | |
| 689 | 2670 | budding uninhibited by benzimidazoles 1 | 3.768 | 213750-213996 |
| | | homolog (S. cerevisiae) | | |
| 745 | 2630 | minichromosome maintenance deficient 6 | 38.269 | 230817-231043 |
| | | (MIS5 homolog, yeast) | | |
| 800 | 2590 | TAF1 RNA polymerase II, TATA box | 1.877 | 247696-248086 |
| | | binding protein (TBP)-associated factor | | |
| 811 | 2582 | ajuba | 12.735 | 251195-251502 |
| 825 | 2573 | amyloid β (A4) precursor protein | 165.22 | 255412-255644 |
| 838 | 2566 | anaphase promoting complex subunit 4 | 10.429 | 259583-259826 |
| 866 | 2552 | timeless homolog (Drosophila) | 1.453 | 267981-268365 |
| 873 | 2550 | cyclin G associated kinase | 4.774 | 270072-270372 |
| 885 | 2543 | platelet-derived growth factor, C polypeptide | 3.586 | 273882-274243 |
| 889 | 2543 | katanin p80 (WD40-containing) subunit B 1 | 12.112 | 275290-275634 |
| 891 | 2542 | RB1-inducible coiled-coil 1 | 2.069 | 275944-276175 |
| 898 | 2540 | kinesin family member 20B | 10.559 | 278267-278603 |
| 899 | 2538 | transformation related protein 53 binding | 2.893 | 278604-278960 |
| | | protein 2 | | |
| 905 | 2536 | ADP-ribosylation factor-like 8B | 2.122 | 280457-280707 |
| 913 | 2532 | proteaseome (prosome, macropain) 28 subunit, 3 | 21.397 | 283197-283568 |
| 965 | 2501 | ubiquitin specific peptidase 16 | 11.237 | 300334-300663 |
| 990 | 2488 | ubiquitin-conjugating enzyme E2I | 38.98 | 308789-309160 |
| 1006 | 2477 | large tumor suppressor 2 | 3.379 | 314156-314545 |
| 1009 | 2476 | transcription factor Dp 2 | 2.614 | 315253-315631 |
| 1051 | 2450 | anaphase-promoting complex subunit 5 | 60.895 | 329249-329648 |
| 1053 | 2449 | polycystic kidney disease 1 homolog | 1.249 | 330038-330429 |
| 1062 | 2447 | septin 2 | 12.767 | 333080-333462 |
| 1068 | 2441 | chromatin assembly factor 1, subunit | 6.127 | 334746-335135 |
| | | A (p150) | | |
| 1070 | 2440 | promyelocytic leukemia | 1.141 | 335490-335874 |
| 1082 | 2434 | tousled-like kinase 2 (Arabidopsis) | 5.586 | 339541-339778 |
| 1091 | 2431 | ligase I, DNA, ATP-dependent | 14.03 | 342515-342854 |
| 1102 | 2427 | CTF18, chromosome transmission fidelity | 3.974 | 346257-346598 |
| | | factor 18 homolog (S. cerevisiae) | | |
| 1103 | 2426 | dystonin | 1.863 | 346599-346975 |
| 1188 | 2387 | WEE 1 homolog 1 (S. pombe) | 5.458 | 375593-375982 |
| 1208 | 2379 | CDC 14 cell division cycle 14 homolog A | 2.141 | 381807-382191 |
| | | (S. cerevisiae) | | |
| 1247 | 2359 | microtubule-associated protein, RP/EB | 18.63 | 394632-394981 |
| | | family, member 1 | | |
| 1255 | 2354 | centrosomal protein 110 | 0.814 | 397494-397774 |
| 1261 | 2353 | ligase III, DNA, ATP-dependent | 1.44 | 399254-399624 |
| 1321 | 2325 | beta-transducin repeat containing protein | 2.152 | 419725-419957 |
| 1327 | 2324 | centrosomal protein 55 | 19.363 | 421520-421872 |
| 1329 | 2323 | adenomatosis polyposis coli | 0.997 | 422123-422508 |
| 1341 | 2318 | cell division cycle 73, Paf1/RNA polymerase II | 3.662 | 426333-426720 |
| | | complex component, homolog (S. cerevisiae) | | |
| 1353 | 2311 | centrosomal protein 63 | 8.32 | 430642-430998 |
| 1354 | 2311 | high mobility group box 1 | 4.567 | 430999-431370 |
| 1369 | 2302 | protein phosphatase 1, catalytic subunit, | 113.24 | 436277-436523 |
| | | γ isoform | | |
| 1403 | 2287 | structural maintenance of chromosomes 1A | 13.394 | 447520-447805 |
| 1425 | 2276 | minichromosome maintenance deficient 5, | 20.01 | 455118-455499 |
| | | cell division cycle 46 (S. cerevisiae) | | |
| 1438 | 2270 | cysteine and glycine-rich protein 2 | 2.431 | 459534-459931 |
| | | binding protein | | |
| 1505 | 2243 | growth arrest-specific 2 like 1 | 14.15 | 482255-482606 |
| 1523 | 2239 | TSPY-like 2 | 4.364 | 487980-488352 |
| 1532 | 2236 | CDC 16 cell division cycle 16 homolog | 61.55 | 491125-491521 |
| | | (S. cerevisiae) | | |
| 1537 | 2234 | anaphase promoting complex subunit 2 | 8.972 | 492880-493248 |
| 1542 | 2232 | Jun oncogene | 5.841 | 494469-494742 |
| 1554 | 2228 | SUMO/sentrin specific peptidase 5 | 1.726 | 498550-498878 |
| 1557 | 2227 | annexin A11 | 55.57 | 499580-499921 |
| 1560 | 2227 | SET domain containing (lysine | 16.79 | 500465-500805 |
| | | methyltransferase) 8 | | |
| 1562 | 2226 | small G protein signaling modulator 3 | 9.371 | 501162-501548 |
| 1565 | 2224 | ZW10 homolog (Drosophila), centromere/ | 12.63 | 502292-502621 |
| | | kinetochore protein | | |
| 1571 | 2221 | RAD 17 homolog (S. pombe) | 7.172 | 504416-504768 |
| 1582 | 2214 | family with sequence similarity 83, member D | 12.85 | 508106-508316 |
| 1593 | 2210 | rho/rac guanine nucleotide exchange factor (GEF) 2 | 3.451 | 511846-512237 |
| 1608 | 2206 | minichromosome maintenance deficient 3 | 24.19 | 517207-517557 |
| | | (S. cerevisiae) | | |
| 1638 | 2194 | polo-like kinase 2 (Drosophila) | 4.793 | 527681-527996 |
| 1706 | 2173 | catalase | 18.084 | 551058-551444 |
| 1716 | 2169 | cyclin G2 | 4.918 | 554595-554969 |
| 1724 | 2167 | E4F transcription factor 1 | 4.358 | 557314-557678 |
| 1726 | 2166 | cyclin I | 14.85 | 558041-558430 |
| 1741 | 2160 | non-SMC condensin I complex, subunit D2 | 12.081 | 563227-563611 |
| 1743 | 2159 | polymerase (DNA directed) sigma | 11.13 | 563897-564261 |
| 1744 | 2159 | RIKEN cDNA 2400003C14 gene | 16.24 | 564262-564570 |
| 1746 | 2159 | transformation/transcription domain- | 0.661 | 564955-565345 |
| | | associated protein | | |
| 1749 | 2158 | minichromosome maintenance deficient 7 | 52.55 | 566044-566427 |
| | | (S. cerevisiae) | | |
| 1750 | 2158 | retinoblastoma 1 | 1.741 | 566428-566760 |
| 1758 | 2157 | protein phosphatase 1G (formerly 2C), Mg- | 65.51 | 569118-569459 |
| | | dependent, γ isoform | | |
| 1767 | 2154 | programmed cell death 6 interacting protein | 24.67 | 572196-572546 |
| 1822 | 2137 | polo-like kinase 1 (Drosophila) | 42.62 | 591133-591528 |
| 1829 | 2135 | amyloid β (A4) precursor protein-binding, | 13.93 | 593493-593882 |
| | | family B, member 1 | | |
| 1837 | 2132 | polycystic kidney disease 2 | 2.329 | 596164-596507 |
| 1838 | 2132 | proviral integration site 3 | 16.75 | 596508-596892 |
| 1849 | 2128 | NIMA (never in mitosis gene a)-related | 11.135 | 600327-600624 |
| | | expressed kinase 6 | | |
| 1856 | 2126 | SEH1-like (S. cerevisiae) | 6.521 | 602767-603120 |
| 1860 | 2124 | cyclin G1 | 3.56 | 603997-604346 |
| 1874 | 2121 | NIMA (never in mitosis gene a)-related | 5.452 | 608758-609143 |
| | | expressed kinase 9 | | |
| 1882 | 2118 | ubiquitin-like modifier activating enzyme 3 | 26.578 | 611535-611917 |
| 1897 | 2113 | RIKEN cDNA 2010005J08 gene | 3.915 | 616258-616623 |
| 1910 | 2110 | macrophage erythroblast attacher | 48.23 | 620748-621108 |
| 1939 | 2098 | leucine zipper, putative tumor suppressor 2 | 14.19 | 630655-630915 |
| 1944 | 2097 | cell division cycle 42 homolog (S. cerevisiae) | 189.61 | 632324-632630 |
| 1972 | 2086 | protein phosphatase 1, catalytic subunit, | 1.708 | 642111-642462 |
| | | β isoform | | |
| 2029 | 2068 | heat shock protein 8 | 891.02 | 660889-661277 |
| 2078 | 2050 | cyclin F | 3.468 | 677909-678208 |
| 2094 | 2045 | polo-like kinase 3 (Drosophila) | 7.762 | 683175-683550 |
| 2105 | 2042 | CD2-associated protein | 0.744 | 686855-687170 |
| 2111 | 2040 | cyclin D binding myb-like transcription | 1.893 | 688585-688896 |
| | | factor 1 | | |
| 2121 | 2035 | Fanconi anemia, complementation group D2 | 1.038 | 691993-692390 |
| 2131 | 2032 | minichromosome maintenance deficient 2 | 14.00 | 695280-695591 |
| | | mitotin (S. cerevisiae) | | |
| 2139 | 2030 | multiple endocrine neoplasia 1 | 2.911 | 698091-698430 |
| 2182 | 2017 | inhibitor of growth family, member 1 | 6.197 | 712451-712798 |
| 2235 | 2001 | septin 7 | 3.112 | 730587-730976 |
| 2257 | 1993 | cell division cycle 27 homolog (S. cerevisiae) | 0.583 | 738313-738671 |
| 2283 | 1987 | MAP-kinase activating death domain | 1.589 | 747015-747324 |
| 2293 | 1985 | adaptor protein, phosphotyrosine interaction, | 0.781 | 750597-750920 |
| | | PH domain and leucine zipper containing 1 | | |
| 2297 | 1984 | protein phosphatase 3, catalytic subunit, isoform | 4.715 | 751950-752267 |
| 2346 | 1973 | calmodulin 3 | 14.01 | 768392-768693 |
| 2378 | 1963 | ubiquitin-like, containing PHD & RING | 7.038 | 778921-779204 |
| | | finger domains 2 | | |
| 2379 | 1963 | protein regulator of cytokinesis 1 | 14.63 | 779205-779513 |
| 2381 | 1963 | retinoblastoma binding protein 8 | 4.133 | 779852-780237 |
| 2416 | 1954 | kinesin family member C1 | 16.34 | 792040-792370 |
| 2426 | 1951 | adaptor protein, phosphotyrosine interaction, | 2.172 | 795330-795651 |
| | | PH domain and leucine zipper containing 2 | | |
| 2430 | 1949 | anillin, actin binding protein | 2.848 | 796726-797054 |
| 2441 | 1946 | CLIP associating protein 2 | 1.013 | 800461-800731 |
| 2455 | 1943 | host cell factor C1 | 2.096 | 805085-805458 |
| 2471 | 1940 | mutS homolog 2 (E. coli) | 6.134 | 810424-810813 |
| 2474 | 1940 | epiregulin | 9.501 | 811533-811821 |
| 2505 | 1931 | septin 8 | 0.895 | 822293-822664 |
| 2513 | 1930 | DnaJ (Hsp40) homolog, subfamily C, | 34.4 | 825067-825402 |
| | | member 2 | | |
| 2515 | 1929 | Cbp/p300-interacting transactivator, with | 22.655 | 825796-826120 |
| | | Glu/Asp-rich carboxy-terminal domain, 2 | | |
| 2531 | 1925 | NDC80 homolog, kinetochore complex | 20.308 | 831233-831608 |
| | | component (S. cerevisiae) | | |
| 2534 | 1925 | signal-induced proliferation associated gene 1 | 3.696 | 832257-832632 |
| 2547 | 1921 | cell division cycle and apoptosis regulator 1 | 1.757 | 836705-837044 |
| 2562 | 1916 | septin 5 | 22.256 | 841871-842174 |
| 2569 | 1914 | cyclin-dependent kinase 7 (homolog of | 1.788 | 844194-844512 |
| | | Xenopus MO15 cdk-activating kinase) | | |
| 2582 | 1911 | non-SMC condensin I complex, subunit H | 14.505 | 848672-848987 |
| 2583 | 1910 | inner centromere protein | 4.499 | 848988-849386 |
| 2586 | 1910 | par-3 partitioning defective 3 homolog B | 0.422 | 850130-850455 |
| | | (C. elegans) | | |
| 2593 | 1909 | BTG3 associated nuclear protein | 4.134 | 852510-852846 |
| 2595 | 1909 | DBF4 homolog (S. cerevisiae) | 8.657 | 853157-853542 |
| 2608 | 1906 | E2F transcription factor 1 | 7.007 | 857154-857487 |
| 2621 | 1902 | Rac GTPase-activating protein 1 | 19.316 | 861408-861766 |
| 2634 | 1899 | ubiquitin specific peptidase 22 | 1.692 | 865729-866104 |
| 2644 | 1897 | protein phosphatase 2 (formerly 2A), | 46.955 | 869071-869380 |
| | | catalytic subunit, isoform | | |
| 2691 | 1887 | growth arrest specific 2 | 2.282 | 885284-885579 |
| 2693 | 1886 | ring finger protein 2 | 1.202 | 885899-886287 |
| 2707 | 1882 | fizzy/cell division cycle 20 related 1 | 24.719 | 890466-890779 |
| | | (Drosophila) | | |
| 2728 | 1875 | STE20-related kinase adaptor | 12.387 | 897852-898184 |
| 2745 | 1872 | mitotic arrest deficient 1-like 1 | 4.132 | 903571-903958 |
| 2781 | 1861 | histone deacetylase 3 | 24.855 | 916015-916347 |
| 2792 | 1859 | Mdm2, transformed 3T3 cell double minute | 1.49 | 919781-920087 |
| | | p53 binding protein | | |
| 2793 | 1858 | non-SMC condensin II complex, subunit G2 | 2.181 | 920088-920444 |
| 2809 | 1855 | cell division cycle 25 homolog A (S. pombe) | 1.851 | 925695-926050 |
| 2817 | 1854 | regulator of chromosome condensation | 4.485 | 928459-928777 |
| | | (RCC1) and BTB (POZ) domain containing | | |
| | | protein 1 | | |
| 2834 | 1851 | neuroblastoma ras oncogene | 2.46 | 934198-934494 |
| 2844 | 1847 | large tumor suppressor | 0.394 | 937654-937969 |
| 2848 | 1847 | RAD9 homolog (S. pombe) | 13.395 | 938950-939251 |
| 2896 | 1832 | centromere protein E | 1.871 | 955437-955745 |
| 2904 | 1829 | breast cancer 1 | 7.497 | 958124-958436 |
| 2910 | 1827 | cyclin D2 | 1.579 | 960077-960401 |
| 2925 | 1823 | cell division cycle 45 homolog | 5.32 | 965312-965711 |
| | | (S. cerevisiae-like) | | |
| 2968 | 1810 | E2F transcription factor 6 | 4.213 | 980320-980709 |
| 2971 | 1808 | E2F transcription factor 4 | 11.352 | 981429-981759 |
| 2984 | 1804 | Jun-B oncogene | 63.645 | 985798-986175 |
| 3006 | 1794 | retinoblastoma binding protein 4 | 5.65 | 993294-993657 |
| 3033 | 1784 | 3-phosphoglycerate dehydrogenase | 126.19 | 1002179-1002496 |
| 3034 | 1784 | cell division cycle 20 homolog (S. cerevisiae) | 79.792 | 1002497-1002849 |
| 3039 | 1783 | vacuolar protein sorting 4b (yeast) | 2.342 | 1004233-1004573 |
| 3051 | 1779 | suppressor of variegation 3-9 homolog 1 | 2.513 | 1008311-1008610 |
| | | (Drosophila) | | |
| 3066 | 1776 | mitogen-activated protein kinase 3 | 37.586 | 1013377-1013718 |
| 3067 | 1775 | fibroblast growth factor 7 | 1.663 | 1013719-1014044 |
| 3081 | 1772 | septin 6 | 16.844 | 1018327-1018620 |
| 3110 | 1766 | protein kinase, membrane associated tyrosine/ | 10.224 | 1028441-1028755 |
| | | threonine 1 | | |
| 3145 | 1758 | cyclin D 3 | 23.86 | 1040554-1040910 |
| 3149 | 1757 | retinoblastoma-like 2 | 1.946 | 1041915-1042243 |
| 3152 | 1756 | lin-9 homolog (C. elegans) | 0.83 | 1042878-1043200 |
| 3161 | 1755 | E2F transcription factor 8 | 1.759 | 1046151-1046504 |
| 3171 | 1752 | chromatin assembly factor 1, subunit B (p60) | 14.978 | 1049710-1050012 |
| 3177 | 1750 | CDC23 (cell division cycle 23, yeast | 2.323 | 1051775-1052083 |
| | | homolog) | | |
| 3214 | 1742 | RAD50 interactor 1 | 2.415 | 1064421-1064789 |
| 3215 | 1742 | c-abl oncogene 1, receptor tyrosine kinase | 0.436 | 1064790-1065134 |
| 3238 | 1738 | high mobility group AT-hook 2 | 0.823 | 1072519-1072837 |
| 3256 | 1733 | potassium channel tetramerisation domain | 2.201 | 1078388-1078757 |
| | | containing 11 | | |
| 3283 | 1723 | protein phosphatase 1D magnesium- | 2.77 | 1087491-1087869 |
| | | dependent, δ isoform | | |
| 3289 | 1721 | menage a trois 1 | 12.96 | 1089606-1089959 |
| 3301 | 1718 | peripheral myelin protein 22 | 9.401 | 1093771-1094161 |
| 3306 | 1717 | CLIP associating protein 1 | 0.948 | 1095379-1095748 |
| 3338 | 1709 | NEDD8 activating enzyme E1 subunit 1 | 9.826 | 1106097-1106429 |
| 3390 | 1696 | cell division cycle 2-like 1 | 17.014 | 1124002-1124331 |
| 3419 | 1688 | bladder cancer associated protein homolog | 4.537 | 1133723-1134082 |
| | | (human) | | |
| 3426 | 1687 | regulator of chromosome condensation 1 | 4.314 | 1136021-1136304 |
| 3474 | 1673 | cyclin A2 | 5.366 | 1151948-1152332 |
| 3505 | 1668 | katanin p60 (ATPase-containing) subunit A1 | 32.182 | 1162218-1162611 |
| 3551 | 1656 | RIKEN cDNA B230120H23 gene | 0.667 | 1177903-1178190 |
| 3559 | 1654 | SKI-like | 1.243 | 1180446-1180768 |
| 3574 | 1650 | cell division cycle 6 homolog (S. cerevisiae) | 2.478 | 1185367-1185759 |
| 3577 | 1650 | cell division cycle 25 homolog B (S. pombe) | 1.866 | 1186395-1186715 |
| 3583 | 1649 | checkpoint kinase 1 homolog (S. pombe) | 3.146 | 1188354-1188736 |
| 3598 | 1645 | cyclin-dependent kinase 2 | 16.205 | 1193336-1193684 |
| 3604 | 1644 | excision repair cross-complementing rodent | 3.307 | 1195379-1195725 |
| | | repair deficiency complementation group 6 - like | | |
| 3605 | 1644 | vacuolar protein sorting 24 (yeast) | 5.661 | 1195726-1196052 |
| 3652 | 1633 | minichromosome maintenance deficient 8 | 2.747 | 1211842-1212151 |
| | | (S. cerevisiae) | | |
| 3699 | 1623 | transforming, acidic coiled-coil containing | 13.073 | 1227651-1228044 |
| | | protein 3 | | |
| 3705 | 1622 | seven in absentia 2 | 1.664 | 1229814-1230210 |
| 3727 | 1618 | vascular endothelial growth factor C | 10.284 | 1237351-1237686 |
| 3736 | 1616 | cullin 7 | 1.583 | 1240268-1240610 |
| 3743 | 1614 | thioredoxin interacting protein | 5.1 | 1242664-1242964 |
| 3761 | 1609 | ataxia telangiectasia mutated homolog | 0.181 | 1248864-1249255 |
| | | (human) | | |
| 3768 | 1607 | protein (peptidyl-prolyl cis/trans isomerase) | 5.639 | 1251267-1251627 |
| | | NIMA-interacting 1 | | |
| 3773 | 1605 | inhibitor of growth family, member 4 | 12.81 | 1252896-1253239 |
| 3787 | 1601 | transcription factor Dp 1 | 6.434 | 1257788-1258139 |
| 3792 | 1600 | salt inducible kinase 1 | 0.413 | 1259549-1259840 |
| 3804 | 1596 | RIKEN cDNA 6720463M24 gene | 2.973 | 1263541-1263924 |
| 3828 | 1591 | cyclin K | 1.622 | 1271584-1271845 |
| 3855 | 1584 | activating transcription factor 5 | 9.537 | 1280625-1280989 |
| 3865 | 1582 | nuclear autoantigenic sperm protein | 31.057 | 1283868-1284213 |
| | | (histone-binding) | | |
| 3885 | 1577 | SWI/SNF related, matrix associated, actin | 11.687 | 1290692-1291012 |
| | | dependent regulator of chromatin, subfamily b, | | |
| | | member 1 | | |
| 3907 | 1573 | Zwilch, kinetochore associated, homolog | 1.026 | 1297895-1298179 |
| | | (Drosophila) | | |
| 3910 | 1572 | cyclin B1 | 25.641 | 1298863-1299236 |
| 3913 | 1571 | signal transducer & activator of transcription 5 A | 1.268 | 1299843-1300222 |
| 3921 | 1568 | zinc finger protein 369 | 5.039 | 1302401-1302734 |
| 3969 | 1558 | chromatin modifying protein 1A | 7.377 | 1318357-1318651 |
| 4008 | 1547 | Fanconi anemia, complementation group I | 1.721 | 1331437-1331720 |
| 4010 | 1547 | septin 9 | 27.144 | 1332075-1332392 |
| 4016 | 1545 | aryl-hydrocarbon receptor | 0.43 | 1334066-1334367 |
| 4023 | 1544 | Wilms' tumour 1-associating protein | 2.862 | 1336382-1336718 |
| 4069 | 1531 | ubiquitin-like, containing PHD & RING | 6.026 | 1351856-1352193 |
| | | finger domains, 1 | | |
| 4071 | 1530 | NIMA-related expressed kinase 2 | 2.858 | 1352509-1352861 |
| 4090 | 1525 | zinc finger, C3HC type 1 | 17.029 | 1358571-1358886 |
| 4097 | 1523 | RuvB-like protein 1 | 55.736 | 1360967-1361271 |
| 4103 | 1522 | HAUS augmin-like complex, subunit 4 | 20.991 | 1362890-1363204 |
| 4140 | 1514 | E2F transcription factor 5 | 2.277 | 1375653-1375938 |
| 4154 | 1511 | transformed mouse 3T3 cell double minute 2 | 3.215 | 1380172-1380483 |
| 4156 | 1511 | EP300 interacting inhibitor of differentiation 1 | 21.285 | 1380867-1381243 |
| 4160 | 1510 | fibronectin type 3 & SPRY domain- | 2.066 | 1382212-1382607 |
| | | containing protein | | |
| 4171 | 1508 | casein kinase 2, prime polypeptide | 16.889 | 1385888-1386249 |
| 4193 | 1502 | mitogen-activated protein kinase 1 | 15.004 | 1393467-1393856 |
| 4199 | 1500 | cytoskeleton associated protein 2 | 1.674 | 1395624-1396011 |
| 4233 | 1494 | protein phosphatase 6, catalytic subunit | 9.673 | 1407109-1407417 |
| 4255 | 1491 | budding uninhibited by benzimidazoles 1 | 2.264 | 1414236-1414628 |
| | | homolog, β (S. cerevisiae) | | |
| 4266 | 1488 | tumor susceptibility gene 101 | 23.4 | 1417992-1418306 |
| 4268 | 1487 | STE20-related kinase adaptor β | 1.082 | 1418669-1418996 |
| 4290 | 1482 | mutL homolog 1 (E. coli) | 5.514 | 1426359-1426686 |
| 4304 | 1480 | KH domain containing, RNA binding, signal | 4.254 | 1431183-1431494 |
| | | transduction associated 1 | | |
| 4339 | 1472 | helicase, lymphoid specific | 0.521 | 1442541-1442877 |
| 4380 | 1463 | pelota homolog (Drosophila) | 13.919 | 1456293-1456635 |
| 4414 | 1456 | cyclin-dependent kinase 5 | 3.895 | 1467595-1467925 |
| 4476 | 1442 | ring finger protein 8 | 3.436 | 1488202-1488477 |
| 4480 | 1441 | cyclin B2 | 64.86 | 1489394-1489722 |
| 4491 | 1439 | ADP-ribosylation factor-like 8A | 11.733 | 1492911-1493304 |
| 4537 | 1428 | dual specificity phosphatase 1 | 8.225 | 1507891-1508212 |
| 4554 | 1425 | growth arrest and DNA-damage-inducible, β | 3.26 | 1513621-1513922 |
| | | interacting protein 1 | | |
| 4632 | 1407 | cell division cycle 7 (S. cerevisiae) | 2.07 | 1539427-1539781 |
| 4685 | 1394 | annexin A1 | 186.99 | 1557035-1557427 |
| 4702 | 1391 | chromatin licensing and DNA replication factor 1 | 5.76 | 1563109-1563436 |
| 4728 | 1387 | acidic (leucine-rich) nuclear phosphoprotein | 140.45 | 1571589-1571985 |
| | | 32 family, member B | | |
| 4729 | 1387 | regulator of chromosome condensation 2 | 9.39 | 1571986-1572324 |
| 4732 | 1386 | sirtuin 2 (silent mating type information | 9.325 | 1573015-1573411 |
| | | regulation 2, homolog) (S. cerevisiae) | | |
| 4747 | 1383 | seven in absentia 1A | 1.166 | 1578078-1578382 |
| 4775 | 1373 | ecotropic viral integration site 5 | 1.536 | 1587335-1587660 |
| 4777 | 1373 | zinc finger protein 830 | 2.475 | 1587986-1588305 |
| 4792 | 1371 | protein phosphatase 1, catalytic subunit, | 294.16 | 1593376-1593702 |
| | | isoform | | |
| 4811 | 1366 | coiled-coil domain containing 99 | 1.214 | 1599899-1600288 |
| 4839 | 1360 | cyclin-dependent kinase 4 | 100.24 | 1609522-1609852 |
| 4882 | 1350 | nuclear factor of activated T-cells, | 0.584 | 1623871-1624266 |
| | | cytoplasmic, calcineurin-dependent 1 | | |
| 4893 | 1348 | vacuolar protein sorting 4a (yeast) | 1.43 | 1627799-1628173 |
| 4897 | 1348 | anaphase promoting complex subunit 7 | 3.347 | 1629252-1629559 |
| 4957 | 1336 | transformation related p53 | 6.608 | 1649857-1650157 |
| 4969 | 1332 | TGFβ-regulated gene 1 | 16.316 | 1654114-1654473 |
| 4976 | 1330 | nucleoporin 214 | 0.854 | 1656631-1657026 |
| 4978 | 1330 | homeo box B4 | 1.659 | 1657427-1657747 |
| 5039 | 1316 | S-phase kinase-associated protein 2 (p45) | 0.814 | 1678054-1678363 |
| 5104 | 1300 | nuclear distribution gene C homolog | 102.46 | 1699971-1700369 |
| | | (Aspergillus) | | |
| 5201 | 1281 | cyclin D-type binding-protein 1 | 14.126 | 1733399-1733721 |
| 5208 | 1279 | nucleolar and spindle associated protein 1 | 2.386 | 1735724-1736042 |
| 5221 | 1275 | growth arrest and DNA-damage-inducible 45 β | 21.495 | 1740423-1740753 |
| 5268 | 1267 | F-box protein 5 | 1.752 | 1756030-1756337 |
| 5277 | 1265 | COP9 (constitutive photomorphogenic) | 22.12 | 1759189-1759545 |
| | | homolog, subunit 5 (Arabidopsis) | | |
| 5287 | 1263 | nucleophosmin 1 | 155.72 | 1762731-1763125 |
| 5319 | 1255 | chromatin modifying protein 1B | 4.81 | 1773630-1773932 |
| 5357 | 1245 | TGFβ1 | 13.689 | 1787146-1787456 |
| 5370 | 1243 | HAUS augmin-like complex, subunit 7 | 59.234 | 1791926-1792280 |
| 5373 | 1242 | H2A histone family, member X | 35.377 | 1792920-1793310 |
| 5389 | 1239 | high mobility group 20 B | 18.123 | 1798703-1799083 |
| 5399 | 1238 | RAN, member RAS Oncogene family | 61.23 | 1802120-1802418 |
| 5401 | 1237 | nucleoporin 37 | 8.371 | 1802806-1803091 |
| 5443 | 1227 | CHK2 checkpoint homolog (S. pombe) | 1.749 | 1817364-1817648 |
| 5448 | 1226 | RIKEN cDNA F630043A04 gene | 2.085 | 1819143-1819511 |
| 5459 | 1223 | BRCA2 and CDKN1A interacting protein | 22.32 | 1823218-1823604 |
| 5476 | 1218 | cell division cycle 123 homolog | 19.04 | 1829272-1829545 |
| | | (S. cerevisiae) | | |
| 5513 | 1209 | NIMA-related expressed kinase 1 | 0.751 | 1842362-1842733 |
| 5531 | 1204 | DNA cross-link repair 1A, PSO2 homolog | 0.722 | 1848560-1848902 |
| | | (S. cerevisiae) | | |
| 5560 | 1198 | forkhead box N3 | 0.714 | 1858644-1859006 |
| 5569 | 1196 | nibrin | 0.874 | 1861722-1862120 |
| 5580 | 1194 | cell division cycle 2 homolog A (S. pombe) | 43.513 | 1865374-1865693 |
| 5609 | 1188 | F-box protein 31 | 1.331 | 1875647-1875991 |
| 5636 | 1182 | mitogen-activated protein kinase 7 | 1.049 | 1885325-1885696 |
| 5653 | 1178 | apoptosis antagonizing transcription factor | 19.78 | 1891250-1891647 |
| 5667 | 1173 | reprimo, TP53 dependent G2 arrest mediator | 2.891 | 1896225-1896560 |
| | | candidate | | |
| 5676 | 1171 | cell growth regulator with ring finger domain 1 | 8.143 | 1899574-1899946 |
| 5694 | 1168 | vascular endothelial growth factor B | 11.40 | 1906017-1906367 |
| 5698 | 1166 | aurora kinase A | 16.86 | 1907469-1907831 |
| 5701 | 1166 | telomeric repeat binding factor 1 | 2.789 | 1908582-1908967 |
| 5729 | 1161 | MAD2 mitotic arrest deficient-like 2 (yeast) | 23.02 | 1918682-1919036 |
| 5746 | 1157 | caspase 3 | 11.813 | 1924836-1925195 |
| 5773 | 1151 | protein tyrosine phosphatase 4a1 | 0.279 | 1934685-1935079 |
| 5774 | 1151 | centrobin, centrosomal BRCA2 interacting | 1.021 | 1935080-1935410 |
| | | protein | | |
| 5787 | 1148 | mitochondrial tumor suppressor 1 | 0.27 | 1939909-1940301 |
| 5828 | 1140 | growth arrest and DNA-damage-inducible 45 | 21.77 | 1954514-1954899 |
| 5833 | 1139 | cyclin H | 10.28 | 1956302-1956671 |
| 5869 | 1132 | cyclin-dependent kinase inhibitor 2C (p18, | 13.76 | 1969649-1970047 |
| | | inhibits CDK4) | | |
| 5877 | 1129 | E2F transcription factor 7 | 0.593 | 1972492-1972861 |
| 5881 | 1129 | mediator of DNA damage checkpoint 1 | 0.237 | 1974024-1974400 |
| 5882 | 1129 | calmodulin 2 | 263.81 | 1974401-1974748 |
| 5899 | 1124 | cyclin E1 | 1.228 | 1980613-1981009 |
| 5902 | 1124 | cell cycle related kinase | 3.686 | 1981792-1982170 |
| 5927 | 1118 | cyclin-dependent kinase inhibitor 2D (p19, | 10.528 | 1990790-1991181 |
| | | inhibits CDK4) | | |
| 5933 | 1117 | thioredoxin-like 4A | 29.973 | 1993063-1993439 |
| 5997 | 1101 | NUF2, NDC80 kinetochore complex | 1.166 | 2016390-2016751 |
| | | component, homolog (S. cerevisiae) | | |
| 6008 | 1100 | DSN1, MIND kinetochore complex | 2.499 | 2020156-2020546 |
| | | component, homolog (S. cerevisiae) | | |
| 6049 | 1092 | RIKEN cDNA 2610002M06 gene | 2.988 | 2035042-2035392 |
| 6060 | 1089 | cell division cycle associated 8 | 7.204 | 2039068-2039461 |
| 6065 | 1088 | asp (abnormal spindle)-like, microcephaly | 0.54 | 2040964-2041345 |
| | | associated (Drosophila) | | |
| 6084 | 1083 | bridging integrator 3 | 4.997 | 2047682-2048036 |
| 6119 | 1075 | ankyrin repeat domain 54 | 3.785 | 2060520-2060872 |
| 6130 | 1072 | proline/serine-rich coiled-coil 1 | 1.861 | 2064611-2064994 |
| 6141 | 1070 | aurora kinase B | 6.311 | 2068620-2068994 |
| 6153 | 1068 | max binding protein | 0.824 | 2073201-2073580 |
| 6173 | 1064 | CDK2 (cyclin-dependent kinase 2)- | 21.227 | 2079920-2080306 |
| | | associated protein 1 | | |
| 6246 | 1047 | CDK5 and Abl enzyme substrate 1 | 0.472 | 2106649-2107036 |
| 6309 | 1031 | CDK5 and Abl enzyme substrate 2 | 3.54 | 2128521-2128907 |
| 6318 | 1030 | centrin 2 | 4.69 | 2131765-2132103 |
| 6434 | 1005 | telomeric repeat binding factor 2 | 1.302 | 2173556-2173867 |
| 6480 | 992 | cyclin-dependent kinase 6 | 1.042 | 2189891-2190242 |
| 6534 | 981 | discs, large (Drosophila) homolog- | 3.759 | 2208846-2209155 |
| | | associated protein 5 | | |
| 6553 | 976 | RIKEN cDNA 2810433K01 gene | 2.289 | 2215581-2215976 |
| 6574 | 973 | checkpoint w/forkhead & ring finger domains | 0.59 | 2222821-2223198 |
| 6581 | 971 | HAUS augmin-like complex, subunit 1 | 5.105 | 2225453-2225779 |
| 6647 | 960 | Bmi1 polycomb ring finger oncogene | 0.42 | 2248765-2249118 |
| 6664 | 956 | par-6 (partitioning defective 6,) homolog | 1.905 | 2254717-2255106 |
| | | (C. elegans) | | |
| 6669 | 955 | ras homolog gene family, member U | 0.296 | 2256530-2256915 |
| 6678 | 952 | BCL2-antagonist/killer 1 | 3.0 | 2259855-2260161 |
| 6713 | 943 | centrosomal protein 250 | 0.433 | 2271720-2272085 |
| 6714 | 942 | centromere protein O | 0.733 | 2272086-2272464 |
| 6729 | 939 | kinesin family member 11 | 1.155 | 2277436-2277733 |
| 6782 | 929 | nuclear distribution gene E homolog 1 | 7.884 | 2295836-2296146 |
| | | (A. nidulans) | | |
| 6812 | 922 | forkhead box O4 | 1.102 | 2306279-2306609 |
| 6827 | 918 | protein kinase inhibitor | 0.376 | 2311372-2311759 |
| 6833 | 917 | septin 3 | 0.248 | 2313405-2313686 |
| 6882 | 908 | aurora kinase C | 14.22 | 2329723-2330035 |
| 6898 | 903 | spindle assembly 6 homolog (C. elegans) | 0.224 | 2334515-2334801 |
| 6909 | 902 | septin 10 | 4.725 | 2337987-2338293 |
| 6952 | 892 | timeless interacting protein | 1.598 | 2352399-2352710 |
| 7003 | 880 | neural precursor cell expressed, | 0.33 | 2369333-2369684 |
| | | developmentally down-regulated gene 1 | | |
| 7010 | 877 | proteasome (prosome, macropain) assembly | 9.024 | 2371767-2372110 |
| | | chaperone 2 | | |
| 7115 | 858 | centromere protein H | 4.014 | 2406674-2407073 |
| 7126 | 852 | vasohibin 1 | 0.138 | 2410493-2410795 |
| 7151 | 847 | germ cell-specific gene 2 | 0.717 | 2418878-2419222 |
| 7158 | 845 | c-fos induced growth factor | 3.445 | 2420809-2421101 |
| 7159 | 845 | MAD2 mitotic arrest deficient-like 1 (yeast) | 8.32 | 2421102-2421467 |
| 7175 | 841 | baculoviral IAP repeat-containing 5 | 0.966 | 2426437-2426713 |
| 7199 | 838 | TGFβ3 | 1.124 | 2434410-2434754 |
| 7208 | 836 | Leu rich repeat & coiled-coil domain containing 1 | 0.248 | 2437517-2437910 |
| 7216 | 834 | suppressor of variegation 3-9 homolog 2 | 0.735 | 2440171-2440490 |
| | | (Drosophila) | | |
| 7224 | 833 | NIMA (never in mitosis gene a)-related | 0.325 | 2443004-2443301 |
| | | expressed kinase 4 | | |
| 7228 | 832 | cell division cycle 25 homolog C (S. pombe) | 1.85 | 2444341-2444625 |
| 7249 | 826 | RIKEN cDNA 4922501C03 gene | 0.438 | 2451461-2451761 |
| 7283 | 816 | ribosomal protein S6 | 18.875 | 2462245-2462567 |
| 7291 | 813 | HAUS augmin-like complex, subunit 2 | 3.496 | 2464662-2464966 |
| 7330 | 803 | MAD2L1 binding protein | 3.685 | 2477746-2478077 |
| 7365 | 796 | cDNA sequence BC023882 | 0.603 | 2489301-2489640 |
| 7405 | 788 | cell division cycle associated 3 | 10.276 | 2502489-2502808 |
| 7439 | 778 | B-cell leukemia/lymphoma 2 | 0.149 | 2513854-2514170 |
| 7444 | 776 | cell division cycle associated 2 | 0.252 | 2515580-2515941 |
| 7454 | 774 | platelet derived growth factor, | 4.859 | 2518844-2519200 |
| 7551 | 749 | expressed sequence C79407 | 0.187 | 2550344-2550743 |
| 7554 | 749 | enhancer of rudimentary homolog | 3.142 | 2551508-2551815 |
| | | (Drosophila) | | |
| 7565 | 747 | CDC28 protein kinase 1b | 22.475 | 2555228-2555394 |
| 7603 | 738 | SPC24, NDC80 kinetochore complex | 1.038 | 2567431-2567712 |
| | | component, homolog (S. cerevisiae) | | |
| 7630 | 732 | serine/threonine kinase 11 | 0.449 | 2575716-2576017 |
| 7633 | 731 | anaphase promoting complex subunit 10 | 0.787 | 2576622-2576942 |
| 7674 | 720 | malignant T cell amplified sequence 1 | 1.817 | 2590027-2590422 |
| 7720 | 710 | arginine vasopressin-induced 1 | 19.275 | 2605845-2606126 |
| 7756 | 700 | Rap1 interacting factor 1 homolog (yeast) | 0.083 | 2618117-2618471 |
| 7781 | 693 | proviral integration site 1 | 0.392 | 2626615-2627001 |
| 7795 | 691 | pituitary tumor-transforming gene 1 | 3.612 | 2631430-2631804 |
| 7803 | 689 | breast cancer 2 | 0.07 | 2634236-2634594 |
| 7838 | 679 | par-6 (partitioning defective 6) homolog β | 0.235 | 2645826-2646140 |
| | | (C. elegans) | | |
| 7841 | 678 | NIMA (never in mitosis gene a)-related | 0.716 | 2646895-2647246 |
| | | expressed kinase 3 | | |
| 7864 | 669 | amyloid beta (A4) precursor protein-binding, | 0.212 | 2654750-2655139 |
| | | family B, member 2 | | |
| 7879 | 666 | cyclin-dependent kinase inhibitor 1A (P21) | 3.252 | 2659502-2659871 |
| 7888 | 664 | StAR-related lipid transfer (START) domain | 0.12 | 2662630-2662978 |
| | | containing 13 | | |
| 7899 | 659 | ADP-ribosylation factor-like 3 | 2.999 | 2666529-2666853 |
| 7957 | 644 | RIKEN cDNA 2810452K22 gene | 4.522 | 2686201-2686541 |
| 8038 | 618 | polyamine-modulated factor 1 | 5.098 | 2712675-2712999 |
| 8046 | 615 | cell division cycle associated 5 | 1.215 | 2715194-2715557 |
| 8079 | 606 | ADP-ribosylation factor-like 2 | 4.584 | 2726337-2726723 |
| 8095 | 601 | cyclin-dependent kinase inhibitor 1B | 0.381 | 2731076-2731440 |
| 8100 | 601 | E2F transcription factor 2 | 0.204 | 2732428-2732782 |
| 8123 | 594 | citron | 0.131 | 2740025-2740319 |
| 8155 | 587 | sphingomyelin phosphodiesterase 3, neutral | 0.179 | 2750331-2750645 |
| 8174 | 583 | mitochondrial ribosomal protein L41 | 0.749 | 2755819-2756155 |
| 8176 | 583 | dynactin 3 | 1.37 | 2756466-2756744 |
| 8209 | 573 | CDC28 protein kinase regulatory subunit 2 | 0.994 | 2767357-2767753 |
| 8220 | 569 | geminin | 1.653 | 2770484-2770876 |
| 8281 | 552 | ubiquitin-conjugating enzyme E2C | 2.402 | 2790466-2790755 |
| 8283 | 551 | SPC25, NDC80 kinetochore complex | 4.035 | 2791059-2791454 |
| | | component, homolog (S. cerevisiae) | | |
| 8300 | 548 | MIS12 homolog (yeast) | 0.199 | 2796988-2797361 |
| 8308 | 544 | NSL1, MIND kinetochore complex | 0.644 | 2799438-2799722 |
| | | component, homolog (S. cerevisiae) | | |
| 8335 | 539 | par-3 (partitioning defective 3) homolog | 0.154 | 2808716-2809107 |
| | | (C. elegans) | | |
| 8348 | 536 | myeloid leukemia factor 1 | 0.454 | 2813229-2813621 |
| 8349 | 535 | DNA-damage inducible transcript 3 | 4.982 | 2813622-2813956 |
| 8378 | 526 | RIKEN cDNA 2610039C10 gene | 2.336 | 2823614-2823897 |
| 8390 | 522 | RAD50 homolog (S. cerevisiae) | 0.102 | 2827676-2828022 |
| 8393 | 522 | proline rich 5 (renal) | 0.462 | 2828643-2828993 |
| 8398 | 520 | cell division cycle 26 | 6.939 | 2830505-2830878 |
| 8402 | 519 | ciliary rootlet coiled-coil, rootletin | 0.102 | 2831925-2832268 |
| 8429 | 512 | ligase IV, DNA, ATP-dependent | 0.41 | 2841502-2841815 |
| 8594 | 478 | cyclin-dependent kinase inhibitor 2B (p15, | 2.07 | 2895015-2895359 |
| | | inhibits CDK4) | | |
| 8620 | 473 | cyclin E2 | 0.159 | 2904183-2904530 |
| 8643 | 468 | RIKEN cDNA 9130404D08 gene | 0.284 | 2912093-2912444 |
| 8680 | 462 | 4HAUS augmin-like complex, subunit 8 | 1.099 | 2923769-2924049 |
| 8765 | 447 | tet oncogene family member 2 | 0.115 | 2950714-2950987 |
| 8776 | 445 | TAF10 RNA polymerase II, TATA box | 1.068 | 2953967-2954306 |
| | | binding protein (TBP)-associated factor | | |
| 8808 | 439 | centrin 3 | 1.05 | 2963461-2963764 |
| 8817 | 437 | S100 calcium binding protein A6 (calcyclin) | 10.781 | 2966362-2966657 |
| 8877 | 422 | thioredoxin-like 4B | 0.561 | 2984204-2984528 |
| 8905 | 416 | K(lysine) acetyltransferase 2B | 0.097 | 2992304-2992627 |
| 8932 | 409 | SAC3 domain containing 1 | 0.452 | 2999825-3000109 |
| 8933 | 409 | ZW10 interactor | 0.203 | 3000110-3000428 |
| 8954 | 403 | junction-mediating and regulatory protein | 0.09 | 3005715-3006035 |
| 8964 | 401 | establishment of cohesion 1 homolog 2 | 0.202 | 3008545-3008860 |
| | | (S. cerevisiae) | | |
| 9019 | 388 | BCL2-associated X protein | 1.131 | 3023234-3023515 |
| 9107 | 363 | growth arrest-specific 2 like 3 | 0.094 | 3045621-3045858 |
| 9152 | 352 | anaphase promoting complex subunit 13 | 0.808 | 3056640-3056878 |
| 9161 | 349 | RAB GTPase activating protein 1 | 0.083 | 3058415-3058689 |
| 9360 | 297 | structural maintenance of chromosomes 4 | 0.073 | 3101933-3102112 |
| 9392 | 286 | cyclin T1 | 0.131 | 3107706-3107919 |
| 9409 | 280 | anaphase promoting complex subunit 11 | 2.158 | 3111178-3111374 |
| 9434 | 270 | growth arrest specific 1 | 0.093 | 3115802-3115978 |
| 9477 | 255 | shugoshin-like 1 (S. pombe) | 0.109 | 3123096-3123285 |
| 9504 | 241 | protein tyrosine phosphatase, receptor type, V | 0.04 | 3127383-3127553 |
| 9512 | 239 | G protein-coupled receptor 132 | 0.098 | 3128448-3128607 |
| 9665 | 179 | regulator of G-protein signaling 2 | 0.059 | 3145905-3146047 |
| 9740 | 139 | betacellulin, EGF family member | 0.073 | 3150839-3150877 |
| 3157247 | 594 | endoplasmic reticulum to nucleus signaling 1 | 0.18 | 3179284-3179383 |
| 3157294 | 353 | family with sequence similarity 33, member A | 0.31 | 3266905-3267004 |
| 3157319 | 402 | HAUS augmin-like complex, subunit 5 | 0.183 | 3232617-3232716 |
| 3157349 | 680 | NA | 7.561 | 3271596-3271695 |
| 3157464 | 268 | TMF1-regulated nuclear protein 1 | 0.324 | 3280149-3280248 |
| 3157487 | 308 | NIMA (never in mitosis gene a)-related | 0.493 | 3167184-3167283 |
| | | expressed kinase 11 | | |
| 3157523 | 803 | centromere protein V | 3.696 | 3267205-3267304 |
| 3157530 | 446 | adenylate kinase 1 | 0.22 | 3212658-3212757 |
| 3157631 | 3098 | establishment of cohesion 1 homolog 1 | 4.952 | 3198571-3198670 |
| | | (S. cerevisiae) | | |
| 3157646 | 403 | hepatic nuclear factor 4, | 0.092 | 3262105-3262204 |
| 3157712 | 3480 | structural maintenance of chromosomes 2 | 1.498 | 3189471-3189570 |
| 3157780 | 1357 | PEST proteolytic signal containing | 2.21 | 3191171-3191270 |
| | | nuclear protein | | |
| 3157798 | 765 | speedy homolog A (Xenopus) | 0.756 | 3226217-3226316 |
| 3157809 | 1876 | NA | 0.817 | 3262505-3262604 |
| 3157812 | 168 | sestrin 2 | 0.071 | 3260905-3261004 |
| 3157837 | 1573 | caspase 8 associated protein 2 | 0.5 | 3184971-3185070 |
| 3157862 | 2352 | retinoblastoma-like 1 (p107) | 2.545 | 3265505-3265604 |
| 3157928 | 393 | NA | 0.096 | 3213958-3214057 |
| 3157931 | 840 | podoplanin | 8.076 | 3202997-3203096 |
| 3157962 | 4088 | NA | 15.347 | 3158921-3159020 |
| 3157993 | 162 | epidermal growth factor receptor | 0.048 | 3166784-3166883 |
| 3158035 | 383 | septin 1 | 0.279 | 3259205-3259304 |
| 3158037 | 432 | phospholipase A2, group XVI | 0.124 | 3230917-3231016 |
| 3158121 | 3735 | p53-inducible nuclear protein 1 | 2.567 | 3197071-3197170 |
| 3158132 | 612 | RIKEN cDNA 4632434I11 gene | 0.26 | 3275096-3275195 |
| 3158184 | 776 | calcium/calmodulin-dependent protein kinase II | 0.183 | 3257905-3258004 |
| 3158209 | 1954 | fibroblast growth factor receptor 2 | 2.109 | 3207458-3207557 |
| 3158213 | 203 | deleted in bladder cancer 1 (human) | 0.113 | 3194971-3195070 |
| 3158218 | 4830 | NA | 2.47 | 3259005-3259104 |
| 3158295 | 426 | stratifin | 0.681 | 3216091-3216190 |
| 3158307 | 369 | placental growth factor | 0.923 | 3227817-3227916 |
| 3158328 | 1531 | RAB11 family interacting protein 3 (class II) | 0.975 | 3221991-3222090 |

TABLE 14
Apoptosis (Chinese hamster)

| SEQ | | | Avg | siRNA |
|---|---|---|---|---|
| ID NO: | consL | Description | Cov | SEQ ID NOs: |
| 16 | 4536 | homeodomain interacting protein kinase 1 | 5.166 | 14439-14801 |
| 21 | 4379 | feminization 1 homolog b (C. elegans) | 5.83 | 15971-16283 |
| 31 | 4290 | nuclear receptor subfamily 3, | 6.926 | 19057-19428 |
| | | group C, member 1 | | |
| 44 | 4201 | SH3-domain kinase binding protein 1 | 6.615 | 23443-23756 |
| 73 | 3972 | cell adhesion molecule 1 | 13.147 | 32944-33332 |
| 102 | 3754 | neurofibromatosis 1 | 1.523 | 42422-42742 |
| 104 | 3746 | PHD finger protein 17 | 2.772 | 43019-43313 |
| 111 | 3699 | intersectin 1 (SH3 domain protein 1A) | 3.481 | 45218-45546 |
| 131 | 3611 | mitogen-activated protein kinase 9 | 5.629 | 51635-51907 |
| 170 | 3445 | RING1 and YY1 binding protein | 15.89 | 63269-63644 |
| 189 | 3384 | phosphatase and tensin homolog | 0.633 | 69091-69404 |
| 199 | 3345 | protein kinase C, | 2.25 | 72112-72439 |
| 204 | 3339 | sphingosine phosphate lyase 1 | 2.842 | 73601-73949 |
| 205 | 3337 | unc-5 homolog B (C. elegans) | 15.951 | 73950-74213 |
| 218 | 3290 | alanyl-tRNA synthetase | 25.07 | 77662-77970 |
| 243 | 3224 | Fas-associated factor 1 | 10.626 | 85018-85295 |
| 266 | 3179 | vascular endothelial growth factor A | 18.713 | 92246-92594 |
| 272 | 3152 | Rho-associated coiled-coil containing | 3.17 | 94052-94292 |
| | | protein kinase 1 | | |
| 279 | 3139 | methyl CpG binding protein 2 | 1.23 | 95910-96141 |
| 293 | 3127 | SAFB-like, transcription modulator | 10.672 | 100152-100477 |
| 300 | 3115 | nischarin | 3.465 | 102105-102309 |
| 345 | 3034 | glycogen synthase kinase 3 β | 0.647 | 114424-114743 |
| 366 | 3003 | cullin 1 | 25.78 | 120499-120798 |
| 375 | 2989 | RAD21 homolog (S. pombe) | 34.322 | 123260-123508 |
| 384 | 2977 | transcriptional regulator, SIN3A (yeast) | 3.56 | 125791-126119 |
| 386 | 2976 | cytotoxic granule-associated RNA binding | 1.496 | 126356-126593 |
| | | protein 1 | | |
| 390 | 2967 | tumor necrosis factor receptor | 22.566 | 127481-127779 |
| | | superfamily, member 21 | | |
| 394 | 2960 | apoptosis inhibitor 5 | 2.055 | 128748-129043 |
| 419 | 2931 | dedicator of cytokinesis 1 | 4.621 | 135539-135925 |
| 431 | 2919 | Tia1 cytotoxic granule-associated RNA | 12.569 | 139041-139241 |
| | | binding protein-like 1 | | |
| 434 | 2913 | mitogen-activated protein kinase kinase | 2.174 | 139905-140195 |
| | | kinase 7 | | |
| 511 | 2835 | hypoxia inducible factor 1, subunit | 6.799 | 161268-161478 |
| 525 | 2821 | BCL2-like 13 (apoptosis facilitator) | 7.089 | 165351-165590 |
| 540 | 2799 | signal transducer and activator of | 1.323 | 169415-169753 |
| | | transcription 5B | | |
| 543 | 2791 | Janus kinase 2 | 4.149 | 170408-170768 |
| 562 | 2773 | uveal autoantigen with coiled-coil | 14.96 | 175535-175851 |
| | | domains and ankyrin repeats | | |
| 609 | 2735 | activity-dependent neuroprotective protein | 6.52 | 189603-189839 |
| 621 | 2718 | catenin | 30.996 | 192742-193116 |
| 670 | 2686 | nuclear factor of kappa light polypeptide | 4.948 | 208013-208351 |
| | | gene enhancer in B-cells 1, p105 | | |
| 710 | 2658 | TNF receptor-associated factor 3 | 1.284 | 219648-219935 |
| 729 | 2640 | homeodomain interacting protein kinase 3 | 0.784 | 225660-225908 |
| 732 | 2639 | transforming growth factor, β receptor I | 4.064 | 226652-227037 |
| 825 | 2573 | amyloid β (A4) precursor protein | 165.22 | 255412-255644 |
| 867 | 2552 | sphingomyelin synthase 1 | 9.259 | 268366-268630 |
| 891 | 2542 | RB1-inducible coiled-coil 1 | 2.069 | 275944-276175 |
| 899 | 2538 | p53-binding protein 2 | 2.893 | 278604-278960 |
| 901 | 2538 | zinc finger matrin type 3 | 0.701 | 279250-279506 |
| 913 | 2532 | proteaseome (prosome, macropain) 28 | 21.397 | 283197-283568 |
| | | subunit, 3 | | |
| 933 | 2523 | phosphatidylinositol 3-kinase, catalytic, | 1.26 | 290027-290396 |
| | | polypeptide | | |
| 994 | 2485 | Tax1 (human T-cell leukemia virus type I) | 26.472 | 310231-310562 |
| | | binding protein 1 | | |
| 1001 | 2480 | myeloid cell leukemia sequence 1 | 11.498 | 312684-312913 |
| 1046 | 2453 | TNF receptor-associated factor 7 | 17.763 | 327682-328074 |
| 1070 | 2440 | promyelocytic leukemia | 1.141 | 335490-335874 |
| 1096 | 2428 | synovial apoptosis inhibitor 1, synoviolin | 3.957 | 344178-344523 |
| 1116 | 2418 | mutS homolog 6 (E. coli) | 11.162 | 350996-351268 |
| 1121 | 2417 | ubiquitin-conjugating enzyme | 3.951 | 352601-352956 |
| | | E2Z (putative) | | |
| 1230 | 2367 | mitogen-activated protein kinase 8 | 0.908 | 388975-389185 |
| 1237 | 2364 | rabaptin, RAB GTPase binding effector | 1.86 | 391313-391594 |
| | | protein 1 | | |
| 1285 | 2341 | D4, zinc and double PHD fingers family 2 | 14.055 | 407477-407781 |
| 1286 | 2340 | RNA binding motif protein 5 | 6.953 | 407782-408116 |
| 1329 | 2323 | adenomatosis polyposis coli | 0.997 | 422123-422508 |
| 1340 | 2318 | GRAM domain containing 4 | 3.878 | 426012-426332 |
| 1381 | 2294 | vac 14 homolog (S. cerevisiae) | 7.275 | 440226-440553 |
| 1386 | 2293 | serine incorporator 3 | 64.3 | 441950-442265 |
| 1398 | 2290 | phosphatidylinositol 3-kinase, regulatory | 0.933 | 445880-446276 |
| | | subunit, polypeptide 1 (p85) | | |
| 1430 | 2274 | ring finger protein 216 | 2.663 | 456856-457171 |
| 1458 | 2262 | Alstrom syndrome 1 homolog (human) | 0.712 | 466342-466731 |
| 1468 | 2259 | HLA-B-associated transcript 3 | 18.8 | 469774-470120 |
| 1469 | 2258 | RIKEN cDNA 5730403B10 gene | 2.351 | 470121-470460 |
| 1491 | 2250 | BCL2-like 2 | 6.539 | 477629-477999 |
| 1520 | 2239 | optic atrophy 1 homolog (human) | 2.52 | 487010-487405 |
| 1547 | 2230 | mitogen-activated protein kinase 8 | 5.814 | 496124-496454 |
| | | interacting protein 1 | | |
| 1561 | 2227 | autophagy/beclin 1 regulator 1 | 1.709 | 500806-501161 |
| 1572 | 2221 | glutaminyl-tRNA synthetase | 17.276 | 504769-505049 |
| 1596 | 2209 | Kruppel-like factor 11 | 2.24 | 512866-513206 |
| 1610 | 2205 | ankyrin 2, brain | 0.639 | 517928-518264 |
| 1615 | 2204 | interleukin-1 receptor-associated kinase 2 | 7.953 | 519606-519900 |
| 1617 | 2203 | BCL2/adenovirus E1B interacting protein | 4.764 | 520293-520639 |
| | | 3-like | | |
| 1623 | 2201 | v-raf-leukemia viral Oncogene 1 | 11.737 | 522454-522805 |
| 1625 | 2201 | carbohydrate sulfotransferase 11 | 1.436 | 523162-523531 |
| 1640 | 2194 | p21 protein (Cdc42/Rac)-activated kinase 2 | 12.908 | 528351-528713 |
| 1670 | 2185 | GATA zinc finger domain containing 2A | 6.186 | 538783-539093 |
| 1681 | 2181 | brain derived neurotrophic factor | 1.421 | 542519-542783 |
| 1745 | 2159 | huntingtin interacting protein 1 | 2.993 | 564571-564954 |
| 1767 | 2154 | programmed cell death 6 | 24.67 | 572196-572546 |
| | | interacting protein | | |
| 1793 | 2146 | thymoma viral proto-oncogene 1 | 55.121 | 581286-581643 |
| 1807 | 2140 | prion protein | 10.293 | 586022-586407 |
| 1814 | 2138 | autophagy-related 7 (yeast) | 3.031 | 588504-588828 |
| 1828 | 2136 | matrix metallopeptidase 9 | 16.33 | 593202-593492 |
| 1829 | 2135 | amyloid beta (A4) precursor protein- | 13.93 | 593493-593882 |
| | | binding, family B, member 1 | | |
| 1849 | 2128 | NIMA (never in mitosis gene a)-related | 11.135 | 600327-600624 |
| | | expressed kinase 6 | | |
| 1866 | 2123 | huntingtin | 0.879 | 606012-606402 |
| 1913 | 2108 | apoptosis-inducing factor, mitochondrion- | 114.54 | 621815-622188 |
| | | associated 1 | | |
| 1925 | 2104 | DnaJ (Hsp40) homolog, subfamily A, | 15.15 | 625909-626254 |
| | | member 3 | | |
| 1943 | 2097 | chromodomain helicase DNA binding | 3.526 | 631928-632323 |
| | | protein 8 | | |
| 1963 | 2088 | tumor necrosis factor receptor | 0.748 | 638890-639228 |
| | | superfamily, member 1b | | |
| 1967 | 2087 | serum/glucocorticoid regulated kinase 1 | 4.001 | 640401-640729 |
| 1971 | 2086 | Scl/Tal1 interrupting locus | 0.813 | 641737-642110 |
| 1974 | 2086 | lymphotoxin B receptor | 20.795 | 642821-643161 |
| 1985 | 2083 | serine/threonine kinase 4 | 2.64 | 646540-646922 |
| 2003 | 2079 | X-ray repair complementing defective | 5.752 | 652584-652920 |
| | | repair in CHO cells 5 | | |
| 2017 | 2073 | myocyte enhancer factor 2D | 8.208 | 657055-657357 |
| 2021 | 2072 | B-cell translocation gene 2, | 5.326 | 658375-658645 |
| | | anti-proliferative | | |
| 2024 | 2071 | K(lysine) acetyltransferase 2A | 4.934 | 659254-659597 |
| 2040 | 2064 | STE20-like kinase (yeast) | 10.306 | 664580-664973 |
| 2050 | 2061 | engulfment and cell motility 2, ced-12 | 7.176 | 668000-668354 |
| | | homolog (C. elegans) | | |
| 2054 | 2059 | phosphoprotein enriched in astrocytes 15A | 14.429 | 669292-669690 |
| 2080 | 2049 | CLPTM1-like | 89.279 | 678524-678834 |
| 2083 | 2049 | ADP-ribosylation factor 6 | 4.368 | 679540-679784 |
| 2124 | 2034 | ras homolog gene family, member A | 135.612 | 693012-693333 |
| 2139 | 2030 | multiple endocrine neoplasia 1 | 2.911 | 698091-698430 |
| 2185 | 2015 | myelocytomatosis oncogene | 119.45 | 713438-713745 |
| 2193 | 2012 | THO complex 1 | 2.149 | 716160-716525 |
| 2199 | 2011 | autophagy-related 5 (yeast) | 7.623 | 718183-718508 |
| 2227 | 2003 | smoothened homolog (Drosophila) | 2.634 | 727770-728086 |
| 2230 | 2002 | BCL2-like 1 | 9.446 | 728838-729216 |
| 2242 | 1999 | sequestosome 1 | 51.17 | 733070-733459 |
| 2252 | 1996 | mitogen-activated protein kinase 5 | 1.378 | 736639-737018 |
| 2283 | 1987 | MAP-kinase activating death domain | 1.589 | 747015-747324 |
| 2284 | 1987 | TNF receptor associated factor 4 | 7.889 | 747325-747659 |
| 2305 | 1982 | thymoma viral proto-oncogene 1 | 21.705 | 754612-754878 |
| | | interacting protein | | |
| 2364 | 1967 | protein disulfide isomerase associated 3 | 173.82 | 774355-774677 |
| 2367 | 1966 | TSC22 domain family, member 3 | 5.809 | 775361-775690 |
| 2400 | 1959 | phosphofurin acidic cluster sorting protein 2 | 2.811 | 786380-786716 |
| 2403 | 1958 | DnaJ (Hsp40) homolog, subfamily C, | 5.417 | 787385-787676 |
| | | member 5 | | |
| 2450 | 1945 | receptor (TNFRSF)-interacting serine- | 0.965 | 803414-803712 |
| | | threonine kinase 1 | | |
| 2471 | 1940 | mutS homolog 2 (E. coli) | 6.134 | 810424-810813 |
| 2496 | 1934 | Kv channel interacting | 1.03 | 819220-819569 |
| | | protein 3, calsenilin | | |
| 2515 | 1929 | Cbp/p300-interacting transactivator, with | 22.655 | 825796-826120 |
| | | Glu/Asp-rich carboxy-terminal domain, 2 | | |
| 2547 | 1921 | cell division cycle and apoptosis regulator 1 | 1.757 | 836705-837044 |
| 2599 | 1908 | tripartite motif-containing 39 | 1.032 | 854385-854718 |
| 2608 | 1906 | E2F transcription factor 1 | 7.007 | 857154-857487 |
| 2660 | 1891 | TGFβ-regulated gene 4 | 10.934 | 874486-874847 |
| 2668 | 1890 | apoptotic chromatin condensation inducer 1 | 3.906 | 877244-877643 |
| 2670 | 1890 | BCL2-associated athanogene 3 | 5.061 | 878043-878361 |
| 2691 | 1887 | growth arrest specific 2 | 2.282 | 885284-885579 |
| 2749 | 1871 | protein phosphatase 1, regulatory | 2.369 | 905145-905540 |
| | | (inhibitor) subunit 13B | | |
| 2790 | 1859 | excision repair cross-complementing rodent | 1.408 | 919056-919386 |
| | | repair deficiency, complementation group 2 | | |
| 2811 | 1854 | retinoic acid receptor, gamma | 2.638 | 926437-926742 |
| 2815 | 1854 | serine/threonine kinase 3 (Ste20, | 4.084 | 927749-928072 |
| | | yeast homolog) | | |
| 2831 | 1851 | aldehyde dehydrogenase family 1, | 40.058 | 933071-933460 |
| | | subfamily A1 | | |
| 2838 | 1850 | catenin, beta like 1 | 20.124 | 935528-935906 |
| 2848 | 1847 | RAD9 homolog (S. pombe) | 13.395 | 938950-939251 |
| 2904 | 1829 | breast cancer 1 | 7.497 | 958124-958436 |
| 2965 | 1810 | protein kinase, DNA activated, | 0.793 | 979242-979576 |
| | | catalytic polypeptide | | |
| 3042 | 1782 | sphingosine-1-phosphate phosphatase 1 | 3.922 | 1005199-1005578 |
| 3054 | 1777 | death effector domain-containing | 1.323 | 1009277-1009659 |
| 3073 | 1775 | vanin 1 | 20.503 | 1015567-1015901 |
| 3078 | 1773 | zinc finger CCCH type containing 12A | 3.152 | 1017198-1017589 |
| 3094 | 1769 | TRAF3 interacting protein 2 | 4.391 | 1022836-1023187 |
| 3096 | 1769 | MKL (megakaryoblastic | 1.041 | 1023531-1023903 |
| | | leukemia)/myocardin-like 1 | | |
| 3234 | 1738 | FAST kinase domains 5 | 2.617 | 1071097-1071485 |
| 3268 | 1729 | B-cell leukemia/lymphoma 6 | 8.467 | 1082762-1083124 |
| 3273 | 1726 | tyrosine 3-monooxygenase/tryptophan 5- | 62.681 | 1084449-1084755 |
| | | monooxygenase activation protein, eta | | |
| | | polypeptide | | |
| 3275 | 1726 | ubiquitin-conjugating enzyme E2B, RAD6 | 13.78 | 1085017-1085315 |
| | | homology (S. cerevisiae) | | |
| 3289 | 1721 | menage a trois 1 | 12.96 | 1089606-1089959 |
| 3300 | 1718 | TNF receptor-associated factor 5 | 3.925 | 1093396-1093770 |
| 3324 | 1712 | poly-U binding splicing factor 60 | 14.514 | 1101460-1101740 |
| 3326 | 1711 | RIKEN cDNA 1200009F10 gene | 3.501 | 1102067-1102381 |
| 3338 | 1709 | NEDD8 activating enzyme E1 subunit 1 | 9.826 | 1106097-1106429 |
| 3342 | 1708 | phosphatidylinositol glycan anchor | 24.872 | 1107410-1107750 |
| | | biosynthesis, class T | | |
| 3358 | 1704 | DNA-damage regulated autophagy | 2.146 | 1112807-1113187 |
| | | modulator 1 | | |
| 3382 | 1699 | major facilitator superfamily domain | 17.753 | 1121263-1121574 |
| | | containing 10 | | |
| 3390 | 1696 | cell division cycle 2-like 1 | 17.014 | 1124002-1124331 |
| 3419 | 1688 | bladder cancer associated protein | 4.537 | 1133723-1134082 |
| | | homolog (human) | | |
| 3448 | 1680 | family with sequence similarity 188, | 2.812 | 1143475-1143791 |
| | | member A | | |
| 3499 | 1670 | SAP30 binding protein | 3.008 | 1160338-1160643 |
| 3524 | 1664 | integral membrane protein 2B | 103.29 | 1168940-1169261 |
| 3540 | 1661 | superoxide dismutase 2, mitochondrial | 2.559 | 1174163-1174529 |
| 3559 | 1654 | SKI-like | 1.243 | 1180446-1180768 |
| 3651 | 1633 | FK506 binding protein 8 | 53.498 | 1211464-1211841 |
| 3654 | 1632 | glutamate-cysteine ligase, catalytic subunit | 12.64 | 1212479-1212769 |
| 3685 | 1627 | HtrA serine peptidase 2 | 11.095 | 1222907-1223252 |
| 3692 | 1625 | family with sequence similarity 82, | 4.761 | 1225295-1225616 |
| | | member A2 | | |
| 3693 | 1624 | BCL2-associated athanogene 5 | 26.647 | 1225617-1225987 |
| 3695 | 1623 | pleiomorphic adenoma gene-like 2 | 0.74 | 1226344-1226650 |
| 3705 | 1622 | seven in absentia 2 | 1.664 | 1229814-1230210 |
| 3710 | 1621 | voltage-dependent anion channel 1 | 35.606 | 1231561-1231854 |
| 3736 | 1616 | cullin 7 | 1.583 | 1240268-1240610 |
| 3749 | 1612 | ADAMTS-like 4 | 2.67 | 1244700-1245081 |
| 3761 | 1609 | ataxia telangiectasia mutated | 0.181 | 1248864-1249255 |
| | | homolog (human) | | |
| 3776 | 1605 | death associated protein 3 | 18.724 | 1253963-1254317 |
| 3787 | 1601 | transcription factor Dp 1 | 6.434 | 1257788-1258139 |
| 3806 | 1595 | adenosine deaminase | 19.88 | 1264324-1264663 |
| 3837 | 1587 | modulator of apoptosis 1 | 2.395 | 1274626-1274921 |
| 3855 | 1584 | activating transcription factor 5 | 9.537 | 1280625-1280989 |
| 3913 | 1571 | signal transducer and activator of | 1.268 | 1299843-1300222 |
| | | transcription 5A | | |
| 3926 | 1567 | clusterin | 40.878 | 1304084-1304407 |
| 3983 | 1553 | RAS p21 protein activator 1 | 0.463 | 1323060-1323449 |
| 3994 | 1550 | caspase recruitment domain family, | 3.045 | 1326706-1327065 |
| | | member 10 | | |
| 4014 | 1545 | protein phosphatase 2 (formerly 2A), | 82.162 | 1333415-1333732 |
| | | catalytic subunit, beta isoform | | |
| 4041 | 1540 | presenilin 1 | 3.007 | 1342545-1342881 |
| 4052 | 1537 | BCL2-associated athanogene 4 | 0.353 | 1346314-1346657 |
| 4085 | 1525 | RELT tumor necrosis factor receptor | 2.067 | 1356880-1357195 |
| 4090 | 1525 | zinc finger, C3HC type 1 | 17.03 | 1358571-1358886 |
| 4106 | 1522 | TNF receptor-associated factor 2 | 7.2 | 1363971-1364287 |
| 4128 | 1517 | programmed cell death 11 | 1.078 | 1371711-1372000 |
| 4152 | 1512 | cytokine induced apoptosis inhibitor 1 | 6.495 | 1379554-1379805 |
| 4165 | 1510 | nuclear receptor subfamily 4, group A, | 3.433 | 1383906-1384203 |
| | | member 1 | | |
| 4166 | 1509 | bifunctional apoptosis regulator | 2.213 | 1384204-1384477 |
| 4199 | 1500 | cytoskeleton associated protein 2 | 1.674 | 1395624-1396011 |
| 4201 | 1500 | eukaryotic translation initiation factor 2 | 2.46 | 1396283-1396617 |
| | | alpha kinase 3 | | |
| 4202 | 1500 | intraflagellar transport 57 homolog | 4.102 | 1396618-1396929 |
| | | (Chlamydomonas) | | |
| 4247 | 1492 | B-cell receptor-associated protein 29 | 2.19 | 1411569-1411898 |
| 4250 | 1492 | caspase 9 | 1.769 | 1412589-1412860 |
| 4252 | 1491 | RRN3 RNA polymerase I transcription | 2.225 | 1413234-1413535 |
| | | factor homolog (yeast) | | |
| 4255 | 1491 | budding uninhibited by benzimidazoles 1 | 2.264 | 1414236-1414628 |
| | | homolog, β(S. cerevisiae) | | |
| 4268 | 1487 | STE20-related kinase adaptor beta | 1.082 | 1418669-1418996 |
| 4275 | 1486 | FAST kinase domains 2 | 4.522 | 1421149-1421474 |
| 4290 | 1482 | mutL homolog 1 (E. coli) | 5.514 | 1426359-1426686 |
| 4322 | 1476 | phosphatidylinositol 3-kinase, regulatory | 3.629 | 1436979-1437294 |
| | | subunit, polypeptide 2 (p85 beta) | | |
| 4325 | 1476 | eukaryotic translation elongation factor 1 2 | 3.269 | 1437945-1438305 |
| 4327 | 1475 | Notch gene homolog 2 (Drosophila) | 0.347 | 1438663-1438970 |
| 4339 | 1472 | helicase, lymphoid specific | 0.521 | 1442541-1442877 |
| 4348 | 1470 | Ras-related GTP binding A | 46.31 | 1445616-1445968 |
| 4379 | 1464 | SH3-domain GRB2-like B1 (endophilin) | 13.153 | 1455957-1456292 |
| 4383 | 1463 | tripartite motif-containing 35 | 1.003 | 1457309-1457624 |
| 4414 | 1456 | cyclin-dependent kinase 5 | 3.895 | 1467595-1467925 |
| 4421 | 1455 | ring finger protein 34 | 7.18 | 1469632-1469965 |
| 4433 | 1453 | reticulon 4 | 53.172 | 1473726-1474051 |
| 4434 | 1453 | protein kinase, interferon inducible double | 5.527 | 1474052-1474353 |
| | | stranded RNA dependent activator | | |
| 4461 | 1446 | DNA-damage-inducible transcript 4 | 3.353 | 1483293-1483590 |
| 4478 | 1441 | CCAAT/enhancer binding protein (C/EBP), β | 11.321 | 1488766-1489110 |
| 4504 | 1435 | polycomb group ring finger 2 | 3.603 | 1496993-1497354 |
| 4515 | 1433 | ceroid lipofuscinosis, neuronal 3, juvenile | 2.904 | 1500552-1500853 |
| | | (Batten, Spielmeyer-Vogt disease) | | |
| 4525 | 1431 | GATA binding protein 6 | 1.073 | 1503752-1504126 |
| 4568 | 1422 | WW domain-containing oxidoreductase | 2.113 | 1518412-1518773 |
| 4594 | 1416 | transmembrane BAX inhibitor motif | 16.969 | 1527288-1527665 |
| | | containing 6 | | |
| 4606 | 1414 | cold shock domain protein A | 171.461 | 1531366-1531649 |
| 4642 | 1405 | shisa homolog 5 (Xenopus laevis) | 11.181 | 1542721-1542999 |
| 4668 | 1399 | testis expressed gene 261 | 22.005 | 1551436-1551738 |
| 4682 | 1396 | protein phosphatase 1, regulatory | 1.002 | 1556095-1556385 |
| | | (inhibitor) subunit 13 like | | |
| 4705 | 1391 | Pleckstrin homology-like domain, family | 17.062 | 1564100-1564401 |
| | | A, member 3 | | |
| 4744 | 1384 | fibroblast growth factor receptor 1 | 0.422 | 1577052-1577365 |
| 4747 | 1383 | seven in absentia 1A | 1.166 | 1578078-1578382 |
| 4764 | 1376 | jumonji domain containing 6 | 14.926 | 1583786-1584134 |
| 4831 | 1362 | integrator complex subunit 1 | 1.012 | 1606795-1607183 |
| 4859 | 1355 | myocyte enhancer factor 2A | 0.685 | 1616416-1616715 |
| 4904 | 1346 | FAST kinase domains 3 | 2.435 | 1631671-1632058 |
| 4905 | 1346 | mitochondrial carrier homolog 1 (C. elegans) | 54.765 | 1632059-1632447 |
| 4912 | 1345 | v-Ki-ras2 Kirsten rat sarcoma viral | 3.151 | 1634477-1634773 |
| | | oncogene homolog | | |
| 4929 | 1342 | tectonic family member 3 | 1.25 | 1640228-1640526 |
| 4941 | 1339 | catenin (cadherin associated protein), β1 | 0.495 | 1644372-1644747 |
| 4944 | 1339 | B-cell leukemia/lymphoma 10 | 9.013 | 1645462-1645856 |
| 4952 | 1337 | tribbles homolog 3 (Drosophila) | 7.419 | 1648199-1648515 |
| 4953 | 1337 | mitochondrial ubiquitin ligase activator of | 2.065 | 1648516-1648850 |
| | | NFKB 1 | | |
| 4957 | 1336 | transformation related protein 53 | 6.608 | 1649857-1650157 |
| 4963 | 1334 | amyloid β(A4) precursor protein-binding, | 1.378 | 1651979-1652331 |
| | | family B, member 3 | | |
| 4993 | 1326 | collagen, type XVIII, 1 | 0.529 | 1662476-1662775 |
| 5016 | 1320 | RIKEN cDNA 4930453N24 gene | 3.737 | 1670187-1670553 |
| 5046 | 1313 | deoxyribonuclease II | 31.897 | 1680451-1680725 |
| 5047 | 1313 | estrogen receptor-binding fragment- | 21.721 | 1680726-1681024 |
| | | associated gene 9 | | |
| 5056 | 1311 | BCL2-associated athanogene 1 | 11.445 | 1683576-1683895 |
| 5079 | 1304 | baculoviral IAP repeat-containing 3 | 7.2 | 1691584-1691970 |
| 5081 | 1303 | family with sequence similarity 176, | 3.606 | 1692345-1692702 |
| | | member A | | |
| 5111 | 1298 | brain & reproductive organ-expressed protein | 57.864 | 1702336-1702627 |
| 5112 | 1297 | tumor necrosis factor, -induced protein 8 | 5.97 | 1702628-1702979 |
| 5120 | 1295 | eukaryotic translation initiation factor 5A | 661.40 | 1705373-1705736 |
| 5131 | 1292 | presenilin 2 | 2.55 | 1709139-1709525 |
| 5139 | 1291 | BCL2 binding component 3 | 1.503 | 1712045-1712425 |
| 5140 | 1291 | WD repeat domain 92 | 1.995 | 1712426-1712738 |
| 5168 | 1285 | sphingosine kinase 2 | 1.151 | 1721818-1722158 |
| 5174 | 1285 | death inducer-obliterator 1 | 1.104 | 1723982-1724350 |
| 5221 | 1275 | growth arrest & DNA-damage-inducible 45 β | 21.495 | 1740423-1740753 |
| 5222 | 1275 | BCL2/adenovirus E1B interacting protein 3 | 9.252 | 1740754-1741152 |
| 5260 | 1269 | receptor (TNFRSF)-interacting serine- | 2.702 | 1753377-1753673 |
| | | threonine kinase 2 | | |
| 5295 | 1259 | nuclear receptor subfamily 4, group A, | 0.73 | 1765734-1766070 |
| | | member 2 | | |
| 5318 | 1255 | DNA fragmentation factor, beta subunit | 1.315 | 1773243-1773629 |
| 5328 | 1252 | rhotekin | 2.833 | 1776824-1777199 |
| 5357 | 1245 | transforming growth factor, beta 1 | 13.689 | 1787146-1787456 |
| 5379 | 1240 | baculoviral IAP repeat-containing 2 | 1.473 | 1795149-1795509 |
| 5479 | 1217 | cytochrome c, somatic | 5.321 | 1830214-1830597 |
| 5501 | 1212 | microphthalmia-associated transcription factor | 0.4 | 1838060-1838448 |
| 5506 | 1211 | craniofacial development protein 1 | 17.159 | 1839938-1840310 |
| 5512 | 1210 | pleckstrin homology-like domain, family | 6.85 | 1841998-1842361 |
| | | A, member 1 | | |
| 5532 | 1204 | B-cell receptor-associated protein 31 | 116.56 | 1848903-1849265 |
| 5537 | 1202 | angiopoietin-like 4 | 0.987 | 1850651-1851035 |
| 5550 | 1200 | disintegrin & metallopeptidase domain 17 | 1.374 | 1855220-1855596 |
| 5567 | 1197 | X-linked inhibitor of apoptosis | 0.297 | 1861051-1861417 |
| 5568 | 1197 | ring finger protein 130 | 5.397 | 1861418-1861721 |
| 5589 | 1192 | Werner syndrome homolog (human) | 0.711 | 1868474-1868871 |
| 5608 | 1188 | caspase 12 | 0.856 | 1875252-1875646 |
| 5633 | 1182 | Harvey rat sarcoma virus oncogene 1 | 4.391 | 1884273-1884616 |
| 5636 | 1182 | mitogen-activated protein kinase 7 | 1.049 | 1885325-1885696 |
| 5641 | 1180 | death effector domain-containing DNA | 1.463 | 1887105-1887480 |
| | | binding protein 2 | | |
| 5649 | 1178 | STAM binding protein | 2.283 | 1889758-1890088 |
| 5663 | 1175 | CASP8 & FADD-like apoptosis regulator | 4.448 | 1894743-1895132 |
| 5671 | 1173 | programmed cell death 7 | 1.96 | 1897662-1898025 |
| 5711 | 1164 | leucine-rich & death domain containing | 2.507 | 1912080-1912460 |
| 5746 | 1157 | caspase 3 | 11.813 | 1924836-1925195 |
| 5771 | 1151 | TNFRSF1A-associated via death domain | 11.061 | 1934043-1934332 |
| 5775 | 1151 | cell death-inducing DFFA-like effector c | 55.287 | 1935411-1935807 |
| 5791 | 1147 | microtubule-associated protein 1S | 6.328 | 1941401-1941793 |
| 5844 | 1137 | BCL2-like 11 (apoptosis facilitator) | 0.584 | 1960442-1960764 |
| 5854 | 1136 | caspase 1 | 2.306 | 1964106-1964500 |
| 5862 | 1133 | zinc finger, DHHC domain containing 16 | 4.4 | 1967129-1967439 |
| 5883 | 1129 | X-ray repair complementing defective | 6.458 | 1974749-1975138 |
| | | repair in CHO cells 4 | | |
| 5906 | 1123 | sphingosine kinase 1 | 15.987 | 1983308-1983651 |
| 5931 | 1117 | Fas death domain-associated protein | 2.242 | 1992296-1992675 |
| 5946 | 1115 | diablo homolog (Drosophila) | 10.353 | 1997873-1998247 |
| 5968 | 1110 | amiloride-sensitive cation channel 1, | 1.444 | 2005882-2006234 |
| | | neuronal (degenerin) | | |
| 5987 | 1104 | ceroid-lipofuscinosis, neuronal 8 | 0.372 | 2012719-2013104 |
| 6050 | 1092 | Sp110 nuclear body protein | 2.119 | 2035393-2035780 |
| 6051 | 1092 | phosducin-like 3 | 12.75 | 2035781-2036142 |
| 6055 | 1091 | LPS-induced TN factor | 4.202 | 2037259-2037644 |
| 6056 | 1091 | programmed cell death 6 | 53.378 | 2037645-2037947 |
| 6153 | 1068 | max binding protein | 0.824 | 2073201-2073580 |
| 6165 | 1066 | G2/M-phase specific E3 ubiquitin ligase | 0.358 | 2077605-2078002 |
| 6185 | 1062 | aminoacyl tRNA synthetase complex- | 33.092 | 2084323-2084687 |
| | | interacting multifunctional protein 1 | | |
| 6223 | 1053 | glutamate-Cys ligase, modifier subunit | 22.216 | 2098389-2098782 |
| 6239 | 1049 | myocyte enhancer factor 2C | 0.524 | 2104360-2104732 |
| 6252 | 1045 | TM2 domain containing 1 | 2.155 | 2108754-2109139 |
| 6273 | 1039 | nerve growth factor | 9.393 | 2115896-2116286 |
| 6295 | 1034 | forkheadbox C1 | 0.44 | 2123858-2124256 |
| 6305 | 1031 | dual-specificity tyrosine-(Y)- | 0.52 | 2127434-2127800 |
| | | phosphorylation regulated kinase 2 | | |
| 6312 | 1030 | programmed cell death 2 | 6.216 | 2129627-2130022 |
| 6369 | 1020 | programmed cell death 4 | 0.953 | 2150178-2150561 |
| 6396 | 1013 | DNA fragmentation factor, alpha subunit | 2.45 | 2159909-2160294 |
| 6445 | 1003 | aminoacyl tRNA synthetase complex- | 12.784 | 2177473-2177849 |
| | | interacting multifunctional protein 2 | | |
| 6481 | 991 | polymerase (DNA directed), beta | 1.632 | 2190243-2190641 |
| 6522 | 984 | endonuclease G | 23.832 | 2204505-2204896 |
| 6557 | 975 | B-cell CLL/lymphoma 7C | 6.467 | 2216903-2217199 |
| 6572 | 973 | transcription factor 7, T-cell specific | 1.383 | 2222093-2222467 |
| 6624 | 964 | tumor necrosis factor receptor | 58.921 | 2240612-2240962 |
| | | superfamily, member 12a | | |
| 6644 | 960 | sema domain, transmembrane domain (TM), | 0.16 | 2247664-2248042 |
| | | and cytoplasmic domain, (semaphorin) 6A | | |
| 6647 | 960 | Bmi1 polycomb ring finger oncogene | 0.42 | 2248765-2249118 |
| 6678 | 952 | BCL2-antagonist/killer 1 | 3 | 2259855-2260161 |
| 6686 | 950 | apoptotic peptidase activating factor 1 | 0.325 | 2262408-2262743 |
| 6710 | 944 | BCL2/adenovirus E1B interacting protein 2 | 15.617 | 2270556-2270934 |
| 6736 | 938 | TNF receptor-associated factor 1 | 1.035 | 2279878-2280163 |
| 6786 | 928 | steroid receptor RNA activator 1 | 9.006 | 2297190-2297589 |
| 6798 | 926 | caspase 7 | 0.436 | 2301618-2301960 |
| 6804 | 924 | GLI-Kruppel family member GLI2 | 0.489 | 2303659-2303992 |
| 6806 | 924 | purine-nucleoside Phosphorylase 1 | 10.99 | 2304356-2304474 |
| 6807 | 923 | tumor necrosis factor receptor | 2.901 | 2304475-2304854 |
| | | superfamily, member 1a | | |
| 6813 | 922 | TNF, -induced protein 3 | 0.517 | 2306610-2306966 |
| 6830 | 918 | interleukin 19 | 4.282 | 2312386-2312719 |
| 6858 | 913 | nucleotide-binding oligomerization | 0.461 | 2322123-2322429 |
| | | domain containing 2 | | |
| 6866 | 911 | GLI-Kruppel family member GLI3 | 1.434 | 2324663-2324995 |
| 6958 | 890 | BCL2-like 12 (proline rich) | 18.291 | 2354097-2354391 |
| 6975 | 887 | yippee-like 3 (Drosophila) | 1.989 | 2359942-2360263 |
| 7010 | 877 | proteasome (prosome, macropain) | 9.024 | 2371767-2372110 |
| | | assembly chaperone 2 | | |
| 7015 | 877 | TNF (ligand) superfamily, member 12 | 4.328 | 2373485-2373776 |
| 7067 | 866 | HIV-1 tat interactive protein 2, homolog | 7.75 | 2391070-2391405 |
| | | (human) | | |
| 7082 | 863 | Pleckstrin homology domain containing, | 2.804 | 2395849-2396175 |
| | | family F (with FYVE domain) member 1 | | |
| 7092 | 861 | sirtuin 1 (silent mating type information | 0.22 | 2399178-2399470 |
| | | regulation 2, homolog) 1 (S. cerevisiae) | | |
| 7120 | 855 | caspase 6 | 4.965 | 2408466-2408843 |
| 7124 | 853 | homeodomain interacting protein kinase 2 | 0.328 | 2409808-2410107 |
| 7144 | 849 | serum/glucocorticoid regulated kinase 3 | 0.553 | 2416403-2416787 |
| 7167 | 843 | fibroblast growth factor receptor 3 | 0.243 | 2423777-2424112 |
| 7175 | 841 | baculoviral IAP repeat-containing 5 | 0.966 | 2426437-2426713 |
| 7187 | 839 | nucleotide-binding oligomerization | 0.746 | 2430407-2430803 |
| | | domain containing 1 | | |
| 7196 | 838 | transformation related protein 63 | 0.317 | 2433439-2433750 |
| 7199 | 838 | transforming growth factor, beta 3 | 1.124 | 2434410-2434754 |
| 7209 | 836 | ras homolog gene family, member B | 0.721 | 2437911-2438277 |
| 7213 | 835 | glutathione peroxidase 1 | 10.976 | 2439217-2439612 |
| 7244 | 828 | cysteine-serine-rich nuclear protein 2 | 0.278 | 2449829-2450156 |
| 7283 | 816 | ribosomal protein S6 | 18.875 | 2462245-2462567 |
| 7297 | 811 | TNF receptor-associated factor 6 | 1.188 | 2466579-2466938 |
| 7320 | 807 | C1D nuclear receptor co-repressor | 0.376 | 2474231-2474564 |
| 7349 | 800 | nucleolar protein 3 (apoptosis repressor | 2.282 | 2484064-2484342 |
| | | with CARD domain) | | |
| 7374 | 794 | ceroid-lipofuscinosis, neuronal 5 | 1.261 | 2492286-2492578 |
| 7418 | 785 | myeloid differentiation primary response | 2.514 | 2506840-2507215 |
| | | gene 116 | | |
| 7424 | 782 | RIKEN cDNA 1110007C09 gene | 3.301 | 2508903-2509183 |
| 7426 | 782 | engulfment and cell motility 1, ced-12 | 0.528 | 2509515-2509793 |
| | | homolog (C. elegans) | | |
| 7439 | 778 | B-cell leukemia/lymphoma 2 | 0.149 | 2513854-2514170 |
| 7484 | 767 | UDP-Gal: βGlcNAc β1,4- | 0.387 | 2528454-2528763 |
| | | galactosyltransferase, polypeptide 1 | | |
| 7498 | 765 | sodium channel, voltage-gated, type II, 1 | 0.184 | 2533197-2533494 |
| 7504 | 763 | interferon activated gene 204 | 9.678 | 2535305-2535372 |
| 7506 | 762 | apoptosis enhancing nuclease | 1.126 | 2535692-2536051 |
| 7528 | 756 | transmembrane protein 85 | 25.649 | 2543334-2543651 |
| 7579 | 744 | etoposide induced 2.4 mRNA | 0.629 | 2559503-2559877 |
| 7584 | 743 | apoptosis-inducing factor, mitochondrion- | 0.88 | 2561258-2561555 |
| | | associated 2 | | |
| 7596 | 740 | tumor protein, translationally-controlled 1 | 10.23 | 2565288-2565685 |
| 7631 | 732 | methyl-CpG binding domain protein 4 | 0.522 | 2576018-2576339 |
| 7651 | 725 | BH3 interacting domain death agonist | 13.705 | 2582517-2582823 |
| 7664 | 723 | distal-less homeobox 1 | 0.37 | 2586625-2586998 |
| 7672 | 721 | xeroderma pigmentosum, | 1.337 | 2589348-2589735 |
| | | complementation group A | | |
| 7675 | 720 | eukaryotic translation elongation factor 1 ε1 | 1.403 | 2590423-2590793 |
| 7689 | 717 | BCL2/adenovirus E1B interacting protein 1 | 1.953 | 2595342-2595666 |
| 7749 | 702 | peroxiredoxin 2 | 15.903 | 2616024-2616366 |
| 7784 | 693 | Ser/Thr kinase 17b (apoptosis-inducing) | 0.603 | 2627742-2628087 |
| 7794 | 691 | giant axonal neuropathy | 0.587 | 2631132-2631429 |
| 7803 | 689 | breast cancer 2 | 0.07 | 2634236-2634594 |
| 7864 | 669 | amyloid beta (A4) precursor protein- | 0.212 | 2654750-2655139 |
| | | binding, family B, member 2 | | |
| 7879 | 666 | cyclin-dependent kinase inhibitor 1A (P21) | 3.252 | 2659502-2659871 |
| 7880 | 666 | protein phosphatase 1F (PP2C domain | 2.902 | 2659872-2660259 |
| | | containing) | | |
| 7924 | 652 | excision repair cross-complementing rodent | 21.84 | 2675071-2675432 |
| | | repair deficiency, complementation group 1 | | |
| 7978 | 639 | BCL2 modifying factor | 0.17 | 2692923-2693205 |
| 8013 | 630 | TCF3 (E2A) fusion partner | 4.464 | 2704602-2704917 |
| 8026 | 624 | CASP2 and RIPK1 domain containing | 1.176 | 2709036-2709355 |
| | | adaptor with death domain | | |
| 8030 | 623 | ring finger and FYVE like domain | 0.192 | 2710236-2710629 |
| | | containing protein | | |
| 8056 | 612 | caspase 2 | 1.166 | 2718675-2719039 |
| 8065 | 610 | testis expressed gene 11 | 0.205 | 2721707-2721990 |
| 8095 | 601 | cyclin-dependent kinase inhibitor 1B | 0.381 | 2731076-2731440 |
| 8100 | 601 | E2F transcription factor 2 | 0.204 | 2732428-2732782 |
| 8116 | 595 | inhibitor of DNA binding 1 | 1.398 | 2737742-2738071 |
| 8119 | 595 | serglycin | 9.946 | 2738723-2739031 |
| 8133 | 591 | defender against cell death 1 | 4.551 | 2742894-2743239 |
| 8174 | 583 | mitochondrial ribosomal protein L41 | 0.749 | 2755819-2756155 |
| 8191 | 580 | RIKEN cDNA 2810002N01 gene | 1.368 | 2761213-2761609 |
| 8218 | 570 | interleukin 18 | 2.856 | 2769797-2770097 |
| 8241 | 562 | BCL2-associated athanogene 2 | 1.083 | 2776948-2777283 |
| 8282 | 551 | programmed cell death 5 | 3.991 | 2790756-2791058 |
| 8328 | 540 | FAST kinase domains 1 | 0.298 | 2806153-2806512 |
| 8345 | 536 | Fas (TNF receptor superfamily member 6) | 0.501 | 2812206-2812506 |
| 8349 | 535 | DNA-damage inducible transcript 3 | 4.982 | 2813622-2813956 |
| 8369 | 530 | superoxide dismutase 1, soluble | 9.577 | 2820605-2820925 |
| 8381 | 524 | nuclear protein 1 | 26.14 | 2824647-2825002 |
| 8386 | 523 | NADH dehydrogenase (ubiquinone) 1 | 1.74 | 2826135-2826503 |
| | | subcomplex, 13 | | |
| 8429 | 512 | ligase IV, DNA, ATP-dependent | 0.41 | 2841502-2841815 |
| 8473 | 502 | programmed cell death 10 | 0.375 | 2855519-2855901 |
| 8508 | 493 | serine (or cysteine) peptidase inhibitor, | 0.146 | 2867128-2867490 |
| | | clade B, member 9 | | |
| 8543 | 488 | NLR family, apoptosis inhibitory protein 1 | 0.091 | 2878738-2879123 |
| 8562 | 484 | calcium and integrin binding 1 (calmyrin) | 2.049 | 2884444-2884809 |
| 8595 | 478 | death-associated protein | 6.602 | 2895360-2895710 |
| 8608 | 475 | BCL2-interacting killer | 1.02 | 2899985-2900289 |
| 8633 | 470 | SIVA1, apoptosis-inducing factor | 2.357 | 2908717-2909086 |
| 8662 | 464 | death-associated protein kinase 3 | 0.33 | 2918007-2918383 |
| 8746 | 450 | tumor necrosis factor receptor | 0.392 | 2944708-2945036 |
| | | superfamily, member 4 | | |
| 8762 | 448 | RIKEN cDNA 1700020C11 gene | 0.321 | 2949726-2950061 |
| 8776 | 445 | TAF10 RNA polymerase II, TATA box | 1.068 | 2953967-2954306 |
| | | binding protein (TBP)-associated factor | | |
| 8785 | 442 | zinc finger protein 346 | 0.244 | 2956870-2957191 |
| 8833 | 434 | tumor necrosis factor (ligand) superfamily, | 0.089 | 2971279-2971604 |
| | | member 10 | | |
| 8911 | 415 | vitamin D receptor | 0.096 | 2993954-2994263 |
| 8917 | 414 | caspase 8 | 0.2 | 2995593-2995870 |
| 8946 | 407 | G protein-coupled receptor kinase 1 | 0.1 | 3003705-3003945 |
| 8950 | 405 | baculoviral IAP repeat-containing 6 | 0.047 | 3004660-3004919 |
| 8954 | 403 | junction-mediating and regulatory protein | 0.09 | 3005715-3006035 |
| 8970 | 400 | nuclear factor of kappa light polypeptide | 0.2 | 3010046-3010308 |
| | | gene enhancer in B-cells inhibitor, delta | | |
| 8989 | 396 | nudix (nucleoside diphosphate linked | 0.696 | 3015481-3015727 |
| | | moiety X)-type motif 2 | | |
| 8998 | 393 | BCL2-associated transcription factor 1 | 0.506 | 3017654-3017919 |
| 9019 | 388 | BCL2-associated X protein | 1.131 | 3023234-3023515 |
| 9047 | 379 | cell death-inducing DNA fragmentation | 0.326 | 3030361-3030636 |
| | | factor, alpha subunit-like effector B | | |
| 9061 | 375 | X-ray repair complementing defective | 0.116 | 3034073-3034352 |
| | | repair in Chinese hamster cells 2 | | |
| 9110 | 362 | PRKC, apoptosis, WT1, regulator | 0.2 | 3046374-3046623 |
| 9122 | 360 | BCL2-associated agonist of cell death | 0.429 | 3049436-3049721 |
| 9125 | 359 | ring finger protein 7 | 0.318 | 3050245-3050522 |
| 9151 | 352 | tumor necrosis factor receptor | 0.691 | 3056380-3056639 |
| | | superfamily, member 22 | | |
| 9168 | 347 | ribonucleotide reductase M2 B | 0.11 | 3059844-3060049 |
| | | (TP53 inducible) | | |
| 9232 | 334 | apoptosis-associated tyrosine kinase | 0.065 | 3074031-3074270 |
| 9276 | 322 | purine rich element binding protein B | 0.763 | 3083608-3083822 |
| 9291 | 319 | TP53 regulated inhibitor of apoptosis 1 | 3.404 | 3086855-3087130 |
| 9321 | 307 | cysteine-serine-rich nuclear protein 1 | 0.109 | 3093672-3093894 |
| 9351 | 299 | caspase recruitment domain family, | 0.076 | 3100085-3100282 |
| | | member 14 | | |
| 9363 | 296 | oncostatin M | 0.135 | 3102482-3102721 |
| 9386 | 291 | BCL2/adenovirus E1B 19 kD interacting | 0.168 | 3106657-3106876 |
| | | protein like | | |
| 9434 | 270 | growth arrest specific 1 | 0.093 | 3115802-3115978 |
| 9436 | 269 | Fas apoptotic inhibitory molecule | 0.408 | 3116150-3116343 |
| 9440 | 160 | NLR family, apoptosis inhibitory protein 5 | 0.618 | 3116945-3116985 |
| 9464 | 259 | DEAD (Asp-Glu-Ala-Asp) box | 0.096 | 3120923-3121116 |
| | | polypeptide 20 | | |
| 9466 | 258 | post-GPI attachment to proteins 2 | 0.218 | 3121170-3121374 |
| 9473 | 256 | engulfment and cell motility 3, ced-12 | 0.119 | 3122400-3122588 |
| | | homolog (C. elegans) | | |
| 9504 | 241 | protein Tyr phosphatase, receptor type, V | 0.04 | 3127383-3127553 |
| 9508 | 240 | fission 1 (mitochondrial outer membrane) | 0.298 | 3127965-3128127 |
| | | homolog (yeast) | | |
| 9516 | 238 | nerve growth factor receptor (TNFRSF16) | 0.256 | 3129086-3129263 |
| | | associated protein 1 | | |
| 9517 | 238 | mucosa associated lymphoid tissue | 0.359 | 3129264-3129311 |
| | | lymphoma translocation gene 1 | | |
| 9526 | 234 | NUAK family, SNF1-like kinase, 2 | 0.077 | 3130443-3130616 |
| 9547 | 229 | Ras association (RalGDS/AF-6) domain | 0.163 | 3133777-3133906 |
| | | family member 5 | | |
| 9576 | 215 | tumor necrosis factor receptor | 0.089 | 3137352-3137413 |
| | | superfamily, member 10b | | |
| 9587 | 211 | tensin 4 | 0.089 | 3138556-3138633 |
| 9679 | 173 | heat shock protein 1B | 0.091 | 3147029-3147080 |
| 9740 | 139 | betacellulin, epidermal growth factor | 0.073 | 3150839-3150877 |
| | | family member | | |
| 9741 | 139 | NLR family, pyrin domain containing 3 | 0.035 | 3150878-3150975 |
| 3157184 | 1487 | retinoic acid receptor, beta | 1.024 | 3177484-3177583 |
| 3157219 | 274 | eyes absent 1 homolog (Drosophila) | 0.064 | 3260105-3260204 |
| 3157247 | 594 | endoplasmic reticulum (ER) to nucleus | 0.18 | 3179284-3179383 |
| | | signalling 1 | | |
| 3157277 | 397 | cell death-inducing DNA fragmentation | 0.341 | 3274796-3274895 |
| | | factor, -like effector A | | |
| 3157296 | 3494 | RNA binding motif protein 25 | 4.319 | 3267605-3267704 |
| 3157366 | 450 | angiotensinogen (serpin peptidase | 0.242 | 3260305-3260404 |
| | | inhibitor, clade A, member 8) | | |
| 3157479 | 733 | ELL associated factor 2 | 0.451 | 3264005-3264104 |
| 3157505 | 644 | crystallin, alpha B | 0.99 | 3280749-3280848 |
| 3157518 | 901 | ectodysplasin A2 isoform receptor | 0.239 | 3181584-3181683 |
| 3157545 | 387 | death-associated protein kinase 2 | 0.216 | 3254417-3254516 |
| 3157559 | 371 | XIAP associated factor 1 | 0.143 | 3203397-3203496 |
| 3157562 | 1064 | NLR family, pyrin domain containing 1A | 0.283 | 3194871-3194970 |
| 3157570 | 321 | relaxin/insulin-like family peptide receptor 2 | 0.161 | 3227917-3228016 |
| 3157594 | 236 | LIM homeobox transcription factor 1 beta | 0.194 | 3202097-3202196 |
| 3157643 | 549 | zinc finger CCCH type containing 8 | 0.373 | 3219691-3219790 |
| 3157762 | 794 | APAF1 interacting protein | 6.754 | 3227717-3227816 |
| 3157765 | 1398 | twist homolog 1 (Drosophila) | 3.622 | 3160121-3160220 |
| 3157772 | 2098 | RIKEN cDNA 2610301G19 gene | 2.281 | 3173184-3173283 |
| 3157807 | 762 | src homology 2 domain-containing | 0.391 | 3186971-3187070 |
| | | transforming protein B | | |
| 3157837 | 1573 | caspase 8 associated protein 2 | 0.5 | 3184971-3185070 |
| 3157885 | 1542 | sema domain, Immunoglobulin domain | 0.705 | 3168184-3168283 |
| | | (Ig), short basic domain, secreted, | | |
| | | (semaphorin) 3A | | |
| 3157890 | 1059 | angiotensin II receptor, type 2 | 0.668 | 3167484-3167583 |
| 3157913 | 2302 | topoisomerase I binding, arginine/serine- | 2.01 | 3173284-3173383 |
| | | rich | | |
| 3157926 | 837 | NA | 0.212 | 3253017-3253116 |
| 3157949 | 477 | protein C | 0.42 | 3271796-3271895 |
| 3157952 | 795 | homeobox, msh-like 1 | 0.717 | 3279749-3279848 |
| 3157977 | 1031 | interleukin 7 | 0.642 | 3242917-3243016 |
| 3157980 | 428 | phospholipase C, gamma 2 | 0.099 | 3169484-3169583 |
| 3157993 | 162 | epidermal growth factor receptor | 0.048 | 3166784-3166883 |
| 3158019 | 362 | ABO blood group (transferase A, 1-3-N- | 0.204 | 3185571-3185670 |
| | | acetylgalactosaminyltransferase, transferase B, | | |
| | | 1-3-galactosyltransferase) | | |
| 3158038 | 176 | Fc receptor, IgE, high affinity I, γpolypeptide | 0.258 | 3201197-3201296 |
| 3158091 | 478 | NLR family, CARD domain containing 4 | 0.179 | 3216191-3216290 |
| 3158094 | 886 | forkhead box O3 | 0.446 | 3175484-3175583 |
| 3158120 | 566 | gasdermin A | 0.477 | 3209058-3209157 |
| 3158121 | 3735 | transformation related protein 53 inducible | 2.567 | 3197071-3197170 |
| | | nuclear protein 1 | | |
| 3158129 | 525 | protein Tyr phosphatase, receptor type, F | 0.136 | 3255205-3255304 |
| 3158132 | 612 | RIKEN cDNA 4632434I11 gene | 0.26 | 3275096-3275195 |
| 3158149 | 629 | Src homology 2 domain containing F | 0.416 | 3221791-3221890 |
| 3158154 | 347 | microtubule-associated protein tau | 0.08 | 3245217-3245316 |
| 3158175 | 190 | excision repair cross-complementing rodent | 0.023 | 3230317-3230416 |
| | | repair deficiency, complementation group 6 | | |
| 3158199 | 521 | hepatocyte growth factor | 0.226 | 3253417-3253516 |
| 3158202 | 2263 | GULP, engulfment adaptor PTB domain | 3.671 | 3167784-3167883 |
| | | containing 1 | | |
| 3158294 | 648 | matrix metallopeptidase 2 | 0.413 | 3214291-3214390 |
| 3158322 | 490 | NLR family, apoptosis inhibitory protein 2 | 0.102 | 3179584-3179683 |
| 3158324 | 937 | apoptosis, caspase activation inhibitor | 1.828 | 3272696-3272795 |
| 3158331 | 982 | NEL-like 1 (chicken) | 0.565 | 3163221-3163320 |
| 3158359 | 394 | angiotensin II receptor, type 1a | 0.175 | 3213058-3213157 |
| 3158381 | 762 | CD24a antigen | 0.906 | 3245917-3246016 |

TABLE 15
Protein folding (Chinese hamster)

| SEQ | | | Avg | siRNA |
|---|---|---|---|---|
| ID NO: | consL | Description | Cov | SEQ ID NOs: |
| 91 | 3840 | peptidyl-prolyl isomerase G (cyclophilin G) | 10.266 | 38781-39067 |
| 164 | 3470 | calnexin | 23.27 | 61559-61785 |
| 218 | 3290 | alanyl-tRNA synthetase | 25.07 | 77662-77970 |
| 412 | 2946 | DnaJ (Hsp40) homolog, subfamily C, | 7.271 | 133746-134002 |
| | | member 14 | | |
| 476 | 2865 | heat shock 105 kDa/110 kDa protein 1 | 19.863 | 151195-151420 |
| 546 | 2787 | DnaJ (Hsp40) homolog, subfamily C, | 22.023 | 171304-171555 |
| | | member 10 | | |
| 579 | 2758 | heat shock protein 90, beta (Grp94), | 606.207 | 180574-180954 |
| | | member 1 | | |
| 594 | 2744 | heat shock protein 90, alpha (cytosolic), | 93.844 | 184698-184927 |
| | | class A member 1 | | |
| 827 | 2572 | heat shock protein 9 | 28.56 | 255926-256325 |
| 893 | 2541 | DnaJ (Hsp40) homolog, subfamily A, | 15.853 | 276519-276904 |
| | | member 2 | | |
| 977 | 2496 | heat shock protein 90 alpha (cytosolic), | 609.471 | 304274-304591 |
| | | class B member 1 | | |
| 1048 | 2451 | RAN binding protein 2 | 3.802 | 328313-328601 |
| 1078 | 2437 | ERO1-like (S. cerevisiae) | 6.094 | 338047-338432 |
| 1097 | 2428 | sarcolemma associated protein | 1.377 | 344524-344917 |
| 1254 | 2355 | expressed sequence C80913 | 4.935 | 397171-397493 |
| 1384 | 2293 | TNF receptor-associated protein 1 | 66.179 | 441242-441639 |
| 1543 | 2232 | heat shock protein 1 (chaperonin) | 134.366 | 494743-495086 |
| 1679 | 2181 | FK506 binding protein 4 | 66.756 | 541802-542184 |
| 1925 | 2104 | DnaJ (Hsp40) homolog, subfamily A, | 15.15 | 625909-626254 |
| | | member 3 | | |
| 1932 | 2102 | DnaJ (Hsp40) homolog, subfamily A, | 18.764 | 628385-628725 |
| | | member 1 | | |
| 1948 | 2092 | t-complex protein 1 | 67.336 | 633771-634149 |
| 1960 | 2089 | DnaJ (Hsp40) homolog, subfamily C, | 1.225 | 637892-638209 |
| | | member 16 | | |
| 2029 | 2068 | heat shock protein 8 | 891.015 | 660889-661277 |
| 2076 | 2052 | DnaJ (Hsp40) homolog, subfamily B, | 9.75 | 677203-677558 |
| | | member 1 | | |
| 2198 | 2012 | FK506 binding protein 9 | 6.327 | 717817-718182 |
| 2403 | 1958 | DnaJ (Hsp40) homolog, subfamily C, | 5.417 | 787385-787676 |
| | | member 5 | | |
| 2408 | 1957 | chaperonin containing Tcp1, subunit 3 (γ) | 229.706 | 789130-789474 |
| 2502 | 1933 | chaperonin containing Tcp1, subunit 2 (β) | 197.327 | 821357-821658 |
| 2610 | 1905 | FK506 binding protein 10 | 11.722 | 857806-858195 |
| 2671 | 1890 | chaperonin containing Tcp1, 4 (δ) | 106.158 | 878362-878726 |
| 2722 | 1877 | calreticulin | 630.596 | 895691-896051 |
| 2995 | 1797 | chaperonin containing Tcp1, 6a (zeta) | 101.293 | 989555-989847 |
| 3064 | 1776 | chaperonin containing Tcp1, 7 (eta) | 197.813 | 1012622-1013001 |
| 3202 | 1747 | chaperonin containing Tcp1, 8 (theta) | 46.504 | 1060416-1060692 |
| 3243 | 1737 | peptidylprolyl isomerase (cyclophilin)-like 4 | 2.479 | 1074139-1074475 |
| 3263 | 1730 | tubulin-specific chaperone E | 13.488 | 1080945-1081272 |
| 3269 | 1729 | chaperonin containing Tcp1, subunit 5 (ε) | 174.058 | 1083125-1083449 |
| 3276 | 1726 | peptidylprolyl isomerase domain and WD | 1.901 | 1085316-1085607 |
| | | repeat containing 1 | | |
| 3399 | 1693 | peptidylprolyl isomerase (cyclophilin)-like 2 | 8.8 | 1127061-1127426 |
| 3651 | 1633 | FK506 binding protein 8 | 53.498 | 1211464-1211841 |
| 3768 | 1607 | protein (peptidyl-prolyl cis/trans | 5.639 | 1251267-1251627 |
| | | isomerase) NIMA-interacting 1 | | |
| 3893 | 1575 | FK506 binding protein 1a | 280.554 | 1293334-1293698 |
| 4000 | 1549 | von Hippel-Lindau binding protein 1 | 35.144 | 1328790-1329108 |
| 4159 | 1510 | DnaJ (Hsp40) homolog, subfamily C, | 3.933 | 1381932-1382211 |
| | | member 1 | | |
| 4267 | 1487 | STIP1 homology and U-Box containing | 36.452 | 1418307-1418668 |
| | | protein 1 | | |
| 4379 | 1464 | SH3-domain GRB2-like B1 (endophilin) | 13.153 | 1455957-1456292 |
| 4393 | 1460 | caseinolytic peptidase X (E. coli) | 1.978 | 1460653-1461024 |
| 4429 | 1454 | GrpE-like 1, mitochondrial | 12.051 | 1472389-1472681 |
| 4545 | 1426 | GrpE-like 2, mitochondrial | 1.493 | 1510687-1510976 |
| 4697 | 1393 | torsin family 1, member A (torsin A) | 20.451 | 1561330-1561725 |
| 4955 | 1336 | peptidylprolyl isomerase D (cyclophilin D) | 17.796 | 1649170-1649515 |
| 5149 | 1289 | DnaJ (Hsp40) homolog, subfamily B, | 0.929 | 1715305-1715623 |
| | | member 9 | | |
| 5217 | 1277 | FK506 binding protein 5 | 0.441 | 1738906-1739301 |
| 5227 | 1274 | selenoprotein | 61.456 | 1742333-1742644 |
| 5347 | 1248 | DnaJ (Hsp40) homolog, subfamily B, | 3.209 | 1783440-1783810 |
| | | member 12 | | |
| 5350 | 1247 | DnaJ (Hsp40) homolog, subfamily B, | 17.061 | 1784585-1784897 |
| | | member 11 | | |
| 5405 | 1236 | DnaJ (Hsp40) homolog, subfamily B, | 1.568 | 1804161-1804465 |
| | | member 4 | | |
| 5852 | 1136 | aryl-hydrocarbon receptor-interacting protein | 21.695 | 1963346-1963707 |
| 5965 | 1111 | natural killer tumor recognition sequence | 0.378 | 2004821-2005182 |
| 6059 | 1090 | torsin family 2, member A | 4.118 | 2038737-2039067 |
| 6183 | 1062 | FK506 binding protein 14 | 2.059 | 2083548-2083925 |
| 6388 | 1016 | serologically defined colon cancer | 3.1 | 2157023-2157404 |
| | | antigen 10 | | |
| 6631 | 962 | DnaJ (Hsp40) homolog, subfamily C, | 1.346 | 2243108-2243387 |
| | | member 17 | | |
| 6640 | 960 | calreticulin 3 | 3.271 | 2246344-2246668 |
| 6648 | 959 | DnaJ (Hsp40) homolog, subfamily C, | 1.456 | 2249119-2249439 |
| | | member 30 | | |
| 6662 | 956 | peptidylprolyl isomerase C | 21.193 | 2253978-2254373 |
| 6684 | 951 | peptidylprolyl isomerase B | 30.861 | 2261765-2262058 |
| 6723 | 941 | peptidylprolyl isomerase E (cyclophilin E) | 11.137 | 2275330-2275633 |
| 7277 | 817 | DnaJ (Hsp40) homolog, subfamily C, | 0.36 | 2460206-2460591 |
| | | member 18 | | |
| 7348 | 800 | DnaJ (Hsp40) homolog, subfamily C, | 4.236 | 2483678-2484063 |
| | | member 4 | | |
| 7499 | 764 | FK506 binding protein 11 | 6.2 | 2533495-2533867 |
| 7597 | 740 | prefoldin 2 | 8.764 | 2565686-2566071 |
| 7599 | 740 | FK506 binding protein 7 | 1.092 | 2566115-2566476 |
| 7642 | 729 | peptidylprolyl isomerase A | 86.046 | 2579547-2579908 |
| 7643 | 729 | FK506 binding protein 3 | 38.663 | 2579909-2580256 |
| 7889 | 664 | ubiquitously expressed transcript | 1.147 | 2662979-2663371 |
| 8128 | 593 | DnaJ (Hsp40) homolog, subfamily B, | 0.47 | 2741242-2741540 |
| | | member 5 | | |
| 8339 | 538 | FK506 binding protein 2 | 5.81 | 2810112-2810427 |
| 8366 | 531 | prefoldin 5 | 2.394 | 2819456-2819825 |
| 8398 | 520 | cell division cycle 26 | 6.939 | 2830505-2830878 |
| 8405 | 517 | heat shock protein 1 (chaperonin 10) | 4.477 | 2833031-2833420 |
| 8480 | 501 | peptidylprolyl isomerase (cyclophilin)-like 1 | 0.94 | 2857424-2857802 |
| 8689 | 461 | prefoldin 1 | 2.791 | 2926689-2926987 |
| 8788 | 442 | tetratricopeptide repeat domain 9C | 0.133 | 2957757-2958131 |
| 8881 | 421 | protein (peptidyl-prolyl cis/trans isomerase) | 1.474 | 2985485-2985777 |
| | | NIMA-interacting, 4 (parvulin) | | |
| 8886 | 420 | H2-K region expressed gene 2 | 4.724 | 2986944-2987208 |
| 8901 | 416 | RIKEN cDNA A830007P12 gene | 0.129 | 2991112-2991407 |
| 8963 | 401 | FK506 binding protein 1b | 0.504 | 3008274-3008544 |
| 9430 | 271 | peptidyl prolyl isomerase H | 0.124 | 3115010-3115199 |
| 3157256 | 387 | peptidylprolyl isomerase (cyclophilin)-like 3 | 1.624 | 3262205-3262304 |
| 3157418 | 441 | DnaJ (Hsp40) homolog, subfamily B, | 0.238 | 3228617-3228716 |
| | | member 14 | | |
| 3157499 | 462 | FK506 binding protein 6 | 0.331 | 3177284-3177383 |
| 3157505 | 644 | crystallin, alpha B | 0.99 | 3280749-3280848 |
| 3157831 | 1176 | FK506 binding protein 15 | 0.713 | 3167384-3167483 |
| 3157871 | 528 | DnaJ (Hsp40) homolog, subfamily A, | 0.656 | 3215391-3215490 |
| | | member 4 | | |
| 3158190 | 691 | histocompatibility 2, class II, locus Mb2 | 2.388 | 3199171-3199196 |
| 3158259 | 974 | histocompatibility 2, class II, locus Mb1 | 2.25 | 3256605-3256704 |
| 3158293 | 407 | chaperonin containing Tcp1, 6b (zeta) | 0.228 | 3166684-3166783 |

TABLE 16
Immune response (Chinese hamster)

| SEQ | | | Avg | siRNA |
|---|---|---|---|---|
| ID NO: | consL | Description | Cov | SEQ ID NOs: |
| 73 | 3972 | cell adhesion molecule 1 | 13.147 | 32944-33332 |
| 78 | 3935 | strawberry notch homolog 2 (Drosophila) | 39.592 | 34611-34972 |
| 440 | 2902 | toll interacting protein | 9.02 | 141719-141960 |
| 680 | 2676 | polymerase (RNA) III (DNA directed) | 5.84 | 211082-211316 |
| | | polypeptide E | | |
| 1175 | 2393 | inositol polyphosphate phosphatase-like 1 | 3.628 | 371083-371386 |
| 1299 | 2335 | toll-like receptor 4 | 2.692 | 412131-412513 |
| 1330 | 2323 | complement component 1, r subcomponent | 62.586 | 422509-422751 |
| 1382 | 2293 | CD276 antigen | 2.822 | 440554-440858 |
| 1440 | 2270 | TANK-binding kinase 1 | 3.946 | 460287-460685 |
| 1490 | 2250 | transcription factor E3 | 4.882 | 477308-477628 |
| 1601 | 2208 | complement component 1, s subcomponent | 7.355 | 514675-514999 |
| 1694 | 2176 | toll-like receptor 2 | 12.948 | 547130-547467 |
| 1703 | 2174 | endoplasmic reticulum aminopeptidase 1 | 16.062 | 550016-550337 |
| 1718 | 2169 | MAD homolog 3 (Drosophila) | 1.913 | 555364-555694 |
| 1873 | 2121 | protein kinase C, delta | 15.233 | 608454-608757 |
| 1885 | 2116 | interleukin-1 receptor-associated kinase 1 | 6.896 | 612534-612817 |
| 1980 | 2085 | complement component 1, r subcomponent B | 28.837 | 644971-645023 |
| 2234 | 2001 | signal transducer and activator of | 2.945 | 730267-730586 |
| | | transcription 6 | | |
| 2242 | 1999 | sequestosome 1 | 51.17 | 733070-733459 |
| 2471 | 1940 | mutS homolog 2 (E. coli) | 6.134 | 810424-810813 |
| 2474 | 1940 | epiregulin | 9.501 | 811533-811821 |
| 2477 | 1938 | complement component factor h | 1.484 | 812520-812875 |
| 2520 | 1929 | drebrin-like | 40.69 | 827385-827727 |
| 2525 | 1927 | myxovirus (influenza virus) resistance 2 | 8.118 | 829145-829432 |
| 2627 | 1901 | tubulointerstitial nephritis antigen-like 1 | 471.92 | 863337-863698 |
| 2876 | 1838 | transporter 2, ATP-binding cassette, | 14.82 | 948495-948800 |
| | | subfamily B (MDR/TAP) | | |
| 3073 | 1775 | vanin 1 | 20.50 | 1015567-1015901 |
| 3094 | 1769 | TRAF3 interacting protein 2 | 4.391 | 1022836-1023187 |
| 3179 | 1750 | polymerase (RNA) III (DNA directed) | 5.685 | 1052412-1052729 |
| | | polypeptide D | | |
| 3259 | 1732 | polymerase (RNA) III (DNA directed) | 15.023 | 1079448-1079786 |
| | | polypeptide C | | |
| 3268 | 1729 | B-cell leukemia/lymphoma 6 | 8.467 | 1082762-1083124 |
| 3603 | 1645 | Fc receptor, IgG, alpha chain transporter | 84.176 | 1195070-1195378 |
| 3771 | 1606 | ectonucleotide | 1.076 | 1252246-1252538 |
| | | pyrophosphatase/phosphodiesterase 1 | | |
| 3936 | 1565 | predicted gene 5077 | 4.951 | 1307451-1307521 |
| 4041 | 1540 | presenilin 1 | 3.007 | 1342545-1342881 |
| 4063 | 1533 | transporter 1, ATP-binding cassette, | 4.595 | 1349852-1350157 |
| | | subfamily B (MDR/TAP) | | |
| 4126 | 1519 | avian reticuloendotheliosis viral (v-rel) | 4.305 | 1371109-1371427 |
| | | oncogene related B | | |
| 4240 | 1493 | complement factor properdin | 2.075 | 1409395-1409692 |
| 4256 | 1491 | polymerase (RNA) III (DNA directed) | 1.005 | 1414629-1414949 |
| | | polypeptide B | | |
| 4290 | 1482 | mutL homolog 1 (E. coli) | 5.514 | 1426359-1426686 |
| 4513 | 1433 | leukemia inhibitory factor | 2.095 | 1499872-1500182 |
| 4578 | 1419 | 2′-5′ oligoadenylate synthetase-like 2 | 1.78 | 1521814-1522122 |
| 4619 | 1411 | major facilitator superfamily domain | 1.657 | 1535249-1535610 |
| | | containing 6 | | |
| 4662 | 1400 | transcription factor EB | 2.445 | 1549445-1549837 |
| 4780 | 1372 | CCAAT/enhancer binding protein (C/EBP), γ | 0.522 | 1588969-1589358 |
| 4832 | 1362 | mitochondrial antiviral signaling protein | 1.615 | 1607184-1607527 |
| 4944 | 1339 | B-cell leukemia/lymphoma 10 | 9.013 | 1645462-1645856 |
| 4957 | 1336 | transformation related protein 53 | 6.608 | 1649857-1650157 |
| 5102 | 1300 | complement component (3b/4b) receptor 1-like | 36.058 | 1699537-1699891 |
| 5103 | 1300 | histocompatibility 2, D region locus 1 | 14.507 | 1699892-1699970 |
| 5114 | 1296 | ECSIT homolog (Drosophila) | 34.83 | 1703363-1703719 |
| 5131 | 1292 | presenilin 2 | 2.55 | 1709139-1709525 |
| 5154 | 1287 | solute carrier family 11 (proton-coupled | 2.617 | 1716973-1717346 |
| | | divalent metal ion transporters), member 1 | | |
| 5189 | 1282 | OTU domain, ubiquitin aldehyde binding 1 | 6.598 | 1729190-1729552 |
| 5233 | 1274 | histocompatibility 2, K1, K region | 12.62 | 1744314-1744510 |
| 5244 | 1272 | interleukin 4 receptor, alpha | 1.087 | 1748021-1748398 |
| 5260 | 1269 | receptor (TNFRSF)-interacting serine- | 2.702 | 1753377-1753673 |
| | | threonine kinase 2 | | |
| 5436 | 1229 | polymerase (RNA) III (DNA directed) | 0.45 | 1814931-1815240 |
| | | polypeptide F | | |
| 5532 | 1204 | B-cell receptor-associated protein 31 | 116.56 | 1848903-1849265 |
| 5598 | 1190 | parathymosin | 27.95 | 1871721-1872006 |
| 5618 | 1187 | myeloid differentiation primary response | 1.629 | 1878827-1879137 |
| | | gene 88 | | |
| 5644 | 1179 | complement component 3 | 0.472 | 1888266-1888655 |
| 5825 | 1141 | ORAI calcium release-activated calcium | 3.196 | 1953406-1953799 |
| | | modulator 1 | | |
| 5948 | 1114 | interferon regulatory factor 7 | 2.718 | 1998635-1999022 |
| 5964 | 1111 | colony stimulating factor 3 (granulocyte) | 2.413 | 2004485-2004820 |
| 6050 | 1092 | Sp110 nuclear body protein | 2.119 | 2035393-2035780 |
| 6073 | 1086 | histocompatibility 2, Q region locus 10 | 6.325 | 2043884-2044062 |
| 6124 | 1073 | linker for activation of T cells | 2.661 | 2062427-2062767 |
| 6240 | 1048 | canopy 3 homolog (zebrafish) | 15.161 | 2104733-2105122 |
| 6334 | 1028 | chemokine (C-X-C motif) ligand 12 | 0.641 | 2137589-2137972 |
| 6418 | 1008 | histocompatibility 2, T region locus 23 | 35.314 | 2167964-2168216 |
| 6454 | 999 | toll-interleukin 1 receptor (TIR) domain- | 0.575 | 2180459-2180745 |
| | | containing adaptor protein | | |
| 6507 | 986 | acid phosphatase 5, tartrate resistant | 9.561 | 2199344-2199734 |
| 6550 | 978 | Nedd4 family interacting protein 1 | 41.452 | 2214566-2214874 |
| 6615 | 966 | histocompatibility 2, Q region locus 7 | 6.966 | 2237589-2237640 |
| 6647 | 960 | Bmi1 polycomb ring finger oncogene | 0.42 | 2248765-2249118 |
| 6745 | 936 | proteasome (prosome, macropain) subunit, β | 32.531 | 2282619-2282981 |
| | | type 8 (large multifunctional peptidase 7) | | |
| 6858 | 913 | nucleotide-binding oligomerization domain | 0.461 | 2322123-2322429 |
| | | containing 2 | | |
| 6916 | 900 | membrane-associated ring finger (C3HC4) 8 | 0.75 | 2340263-2340589 |
| 7015 | 877 | tumor necrosis factor (ligand) superfamily, | 4.328 | 2373485-2373776 |
| | | member 12 | | |
| 7039 | 872 | Fc receptor, IgG, low affinity III | 2.956 | 2381692-2381999 |
| 7128 | 852 | SAM domain and HD domain, 1 | 0.214 | 2411159-2411550 |
| 7135 | 850 | DNA cross-link repair 1C, PSO2 homolog | 0.264 | 2413358-2413664 |
| | | (S. cerevisiae) | | |
| 7223 | 833 | chemokine (C-X-C motif) ligand 1 | 3.826 | 2442608-2443003 |
| 7260 | 823 | DEAD (Asp-Glu-Ala-Asp) box polypeptide 58 | 0.166 | 2454994-2455378 |
| 7283 | 816 | ribosomal protein S6 | 18.875 | 2462245-2462567 |
| 7297 | 811 | TNF receptor-associated factor 6 | 1.188 | 2466579-2466938 |
| 7469 | 770 | CD1d1 antigen | 0.505 | 2523514-2523656 |
| 7586 | 743 | phosphoprotein associated with | 0.439 | 2561944-2562307 |
| | | glycosphingolipid microdomains 1 | | |
| 7670 | 721 | myxovirus (influenza virus) resistance 1 | 0.687 | 2588615-2588951 |
| 7676 | 720 | chemokine (C-C motif) ligand 2 | 14.55 | 2590794-2591157 |
| 7683 | 718 | toll-like receptor 3 | 0.226 | 2593179-2593525 |
| 7716 | 710 | polymerase (RNA) III (DNA directed) | 2.352 | 2604412-2604804 |
| | | polypeptide H | | |
| 7754 | 701 | hemochromatosis | 0.638 | 2617430-2617793 |
| 7764 | 698 | polymerase (RNA) III (DNA directed) | 0.231 | 2620918-2621272 |
| | | polypeptide G | | |
| 7874 | 666 | CD1d2 antigen | 0.935 | 2658252-2658336 |
| 7903 | 658 | interleukin 1 receptor accessory protein | 0.254 | 2667913-2668256 |
| 7929 | 651 | interleukin 23, alpha subunit p19 | 0.852 | 2676772-2677097 |
| 7943 | 647 | proteasome maturation protein | 19.088 | 2681546-2681896 |
| 8097 | 601 | histocompatibility 2, Q region locus 2 | 1.764 | 2731750-2731823 |
| 8129 | 592 | exonuclease 1 | 0.312 | 2741541-2741842 |
| 8218 | 570 | interleukin 18 | 2.856 | 2769797-2770097 |
| 8244 | 562 | interleukin 1 receptor-like 1 | 0.299 | 2777898-2778255 |
| 8245 | 562 | calcitonin gene-related peptide-receptor | 0.987 | 2778256-2778534 |
| | | component protein | | |
| 8304 | 546 | macrophage migration inhibitory factor | 43.469 | 2798316-2798434 |
| 8312 | 543 | immunoglobulin joining chain | 0.441 | 2800818-2801142 |
| 8318 | 541 | T-cell specific GTPase | 0.193 | 2802893-2803167 |
| 8345 | 536 | Fas (TNF receptor superfamily member 6) | 0.501 | 2812206-2812506 |
| 8495 | 496 | SH2B adaptor protein 2 | 0.174 | 2862373-2862711 |
| 8504 | 494 | chemokine (C-X-C motif) ligand 10 | 1.586 | 2865648-2866015 |
| 8531 | 490 | interleukin 15 | 1.901 | 2874576-2874952 |
| 8597 | 477 | mannan-binding lectin serine peptidase 2 | 0.156 | 2896069-2896411 |
| 8616 | 474 | Src-like-adaptor 2 | 1.772 | 2902824-2903199 |
| 8663 | 464 | chemokine (C-C motif) receptor 7 | 0.236 | 2918384-2918739 |
| 8696 | 459 | CSF 2 (granulocyte-macrophage) | 1.109 | 2928757-2929061 |
| 8719 | 455 | histocompatibility 28 | 0.469 | 2936057-2936444 |
| 8794 | 441 | histocompatibility 2, Q region locus 1 | 1.023 | 2959862-2959912 |
| 8812 | 439 | TNF (ligand) superfamily, member 9 | 11.755 | 2964694-2965039 |
| 8833 | 434 | TNF (ligand) superfamily, member 10 | 0.089 | 2971279-2971604 |
| 8871 | 423 | spondin 2, extracellular matrix protein | 0.189 | 2982359-2982686 |
| 9014 | 389 | polymerase (RNA) III (DNA directed) | 0.509 | 3021834-3022134 |
| | | polypeptide K | | |
| 9021 | 387 | hemopexin | 0.262 | 3023816-3024122 |
| 9064 | 373 | complement component 8, | 0.685 | 3034878-3035143 |
| | | gamma polypeptide | | |
| 9067 | 373 | proteasome (prosome, macropain), (3 type 9 | 0.464 | 3035689-3035987 |
| | | (large multifunctional peptidase 2) | | |
| 9135 | 356 | interleukin 1 receptor, type I | 0.507 | 3052757-3052969 |
| 9164 | 348 | TNF (ligand) superfamily, member 11 | 0.157 | 3058993-3059213 |
| 9204 | 341 | POU domain, class 2, transcription factor 2 | 0.107 | 3068222-3068455 |
| 9363 | 296 | oncostatin M | 0.135 | 3102482-3102721 |
| 9367 | 295 | Fc receptor, IgG, low affinity IIb | 0.189 | 3103313-3103351 |
| 9389 | 289 | TNF (ligand) superfamily, member 4 | 0.18 | 3107093-3107318 |
| 9395 | 285 | 2′-5′ oligoadenylate synthetase 1B | 0.156 | 3108340-3108557 |
| 9517 | 238 | mucosa associated lymphoid tissue | 0.359 | 3129264-3129311 |
| | | lymphoma translocation gene 1 | | |
| 9611 | 202 | chemokine (C-C motif) ligand 9 | 0.268 | 3141032-3141071 |
| 9624 | 196 | toll-like receptor 13 | 0.061 | 3142028-3142161 |
| 9667 | 178 | chemokine (C-C motif) receptor 2 | 0.144 | 3146072-3146098 |
| 9670 | 175 | histocompatibility 2, Q region locus 8 | 0.302 | 3146338-3146451 |
| 9720 | 149 | chemokine (C-X-C motif) ligand 3 | 0.148 | 3149776-3149850 |
| 3157279 | 427 | ectonucleotide pyrophosphatase/ | 0.153 | 3182184-3182283 |
| | | phosphodiesterase 3 | | |
| 3157459 | 250 | chemokine (C-C motif) ligand 11 | 0.299 | 3199071-3199170 |
| 3157520 | 492 | complement component 1, r subcomponent-like | 0.264 | 3224791-3224890 |
| 3157558 | 742 | chemokine (C-C motif) ligand 7 | 6.395 | 3279849-3279948 |
| 3157639 | 212 | spleen tyrosine kinase | 0.041 | 3259705-3259804 |
| 3157663 | 437 | interleukin 1 receptor-like 2 | 0.224 | 3176584-3176683 |
| 3157759 | 437 | toll-like receptor 1 | 0.309 | 3203997-3204096 |
| 3157859 | 973 | Casitas B-lineage lymphoma b | 0.221 | 3172084-3172183 |
| 3157977 | 1031 | interleukin 7 | 0.642 | 3242917-3243016 |
| 3158027 | 1030 | akirin 2 | 2.138 | 3188971-3189070 |
| 3158038 | 176 | Fc receptor, IgE, high affinity I, γ polypeptide | 0.258 | 3201197-3201296 |
| 3158135 | 418 | mannan-binding lectin serine peptidase 1 | 0.152 | 3282249-3282348 |
| 3158169 | 681 | TBK1 binding protein 1 | 0.203 | 3175184-3175283 |
| 3158197 | 284 | MHC, class I-related | 0.114 | 3163484-3163583 |
| 3158259 | 974 | histocompatibility 2, class II, locus Mb1 | 2.25 | 3256605-3256704 |
| 3158365 | 431 | complement component factor i | 0.209 | 3178584-3178683 |
| 3158381 | 762 | CD24a antigen | 0.906 | 3245917-3246016 |

### V. RNA EFFECTOR MODIFICATION

[0468] In some embodiments of the present invention, an oligonucleotide (e.g., a RNA effector molecule) is chemically modified to enhance stability or other beneficial characteristics. In one embodiment the RNA effector molecule is not chemically modified.

[0469] Oligonucleotides can be modified to prevent rapid degradation of the oligonucleotides by endo- and exo-nucleases and avoid undesirable off-target effects. The nucleic acids featured in the invention can be synthesized and/or modified by methods well established in the art, such as those described in CURRENT PROTOCOLS IN NUCLEIC ACID CHEMISTRY (Beaucage et al., eds., John Wiley & Sons, Inc., NY). Modifications include, for example, (a) end modifications, e.g., 5′ end modifications (phosphorylation, conjugation, inverted linkages, etc.), or 3′ end modifications (conjugation, DNA nucleotides, inverted linkages, etc.); (b) base modifications, e.g., replacement with stabilizing bases, destabilizing bases, or bases that base pair with an expanded repertoire of partners, removal of bases (abasic nucleotides), or conjugated bases; (c) sugar modifications (e.g., at the 2′ position or 4′ position) or replacement of the sugar; as well as (d) internucleoside linkage modifications, including modification or replacement of the phosphodiester linkages. Specific examples of oligonucleotide compounds useful in this invention include, but are not limited to RNAs containing modified backbones or no natural internucleoside linkages. RNAs having modified backbones include, among others, those that do not have a phosphorus atom in the backbone. Specific examples of oligonucleotide compounds useful in this invention include, but are not limited to oligonucleotides containing modified or non-natural internucleoside linkages. Oligonucleotides having modified internucleoside linkages include, among others, those that do not have a phosphorus atom in the internucleoside linkage.

[0470] For the purposes of this specification, and as sometimes referenced in the art, modified oligonucleotides that do not have a phosphorus atom in their internucleoside linkage(s) can also be considered to be oligonucleosides. In particular embodiments, the modified oligonucleotides will have a phosphorus atom in its internucleoside linkage(s). For the purposes of this specification, and as sometimes referenced in the art, modified RNAs that do not have a phosphorus atom in their internucleoside backbone can also be considered to be oligonucleosides. In particular embodiments, the modified RNA will have a phosphorus atom in its internucleoside backbone.

[0471] Modified internucleoside linkages include (e.g., RNA backbones) include, for example, phosphorothioates, chiral phosphorothioates, phosphorodithioates, phosphotriesters, aminoalkylphosphotriesters, methyl and other alkyl phosphonates including 3′-alkylene phosphonates and chiral phosphonates, phosphinates, phosphoramidates including 3′-amino phosphoramidate and aminoalkylphosphoramidates, thionophosphoramidates, thionoalkylphosphonates, thionoalkylphosphotriesters, and boranophosphates having normal 3′-5′ linkages, 2′-5′ linked analogs of these, and those) having inverted polarity wherein the adjacent pairs of nucleoside units are linked 3′-5′ to 5′-3′ or 2′-5′ to 5′-2′. Various salts, mixed salts and free acid forms are also included.

[0472] Representative patents that teach the preparation of the above phosphorus-containing linkages include, but are not limited to, U.S. Pat. No. 3,687,808; No. 4,469,863; No. 4,476,301; No. 5,023,243; No. 5,177,195; No. 5,188,897; No. 5,264,423; No. 5,276,019; No. 5,278,302; No. 5,286,717; No. 5,321,131; No. 5,399,676; No. 5,405,939; No. 5,453,496; No. 5,455,233; No. 5,466,677; No. 5,476,925; No. 5,519,126; No. 5,536,821; No. 5,541,316; No. 5,550,111; No. 5,563,253; No. 5,571,799; No. 5,587,361; No. 5,625,050; No. 6,028,188; No. 6,124,445; No. 6,160,109; No. 6,169,170; No. 6,172,209; No. 6,239,265; No. 6,277,603; No. 6,326,199; No. 6,346,614; No. 6,444,423; No. 6,531,590; No. 6,534,639; No. 6,608,035; No. 6,683,167; No. 6,858,715; No. 6,867,294; No. 6,878,805; No. 7,015,315; No. 7,041,816; No. 7,273,933; No. 7,321,029; and No. RE39464.

[0473] Modified oligonucleotide internucleoside linkages (e.g., RNA backbones) that do not include a phosphorus atom therein have internucleoside linkages that are formed by short chain alkyl or cycloalkyl internucleoside linkages, mixed heteroatoms and alkyl or cycloalkyl internucleoside linkages, or one or more short chain heteroatomic or heterocyclic internucleoside linkages. These include those having morpholino linkages (formed in part from the sugar portion of a nucleoside); siloxane backbones; sulfide, sulfoxide and sulfone backbones; formacetyl and thioformacetyl backbones; methylene formacetyl and thioformacetyl backbones; alkene containing backbones; sulfamate backbones; methyleneimino and methylenehydrazino backbones; sulfonate and sulfonamide backbones; amide backbones; and others having mixed N, O, S and CH₂ component parts.

[0474] Representative patents that teach the preparation of the above oligonucleosides include, but are not limited to, U.S. Pat. No. 5,034,506; No. 5,166,315; No. 5,185,444; No. 5,214,134; No. 5,216,141; No. 5,235,033; No. 5,64,562; No. 5,264,564; No. 5,405,938; No. 5,434,257; No. 5,466,677; No. 5,470,967; No. 5,489,677; No. 5,541,307; No. 5,561,225; No. 5,596,086; No. 5,602,240; No. 5,608,046; No. 5,610,289; No. 5,618,704; No. 5,623,070; No. 5,663,312; No. 5,633,360; No. 5,677,437; and No. 5,677,439.

[0475] In other modified oligonucleotides suitable or contemplated for use in RNA effector molecules, both the sugar and the internucleoside linkage, i.e., the backbone, of the nucleotide units are replaced with novel groups. The base units are maintained for hybridization with an appropriate nucleic acid target compound. One such oligomeric compound, a RNA mimetic that has been shown to have excellent hybridization properties, is referred to as a peptide nucleic acid (PNA). In PNA compounds, the sugar backbone of a RNA is replaced with an amide containing backbone, in particular an aminoethylglycine backbone. The nucleobases are retained and are bound directly or indirectly to aza nitrogen atoms of the amide portion of the backbone. Representative patents that teach the preparation of PNA compounds include, but are not limited to, U.S. Pat. No. 5,539,082; No. 5,714,331; and No. 5,719,262. Further teaching of PNA compounds can be found, for example, in Nielsen et al., 254 Science 1497-1500 (1991).

[0476] Some embodiments featured in the invention include oligonucleotides with phosphorothioate internucleoside linkages and oligonucleosides with heteroatom backbones, and in particular —CH₂—NH—CH₂—, —CH₂—N(CH₃)—O—CH₂— [known as a methylene (methylimino) or MMI backbone], —CH₂—O—N(CH₃)—CH₂—, —CH₂—N(CH₃)—N(CH₃)—CH₂— and —N(CH₃)—CH₂—CH₂— [wherein the native phosphodiester internucleoside linkage is represented as —O—P—O—CH₂—] (see U.S. Pat. No. 5,489,677), and amide backbones (see U.S. Pat. No. 5,602,240). In some embodiments, the oligonucleotides featured herein have morpholino backbone structures (see U.S. Pat. No. 5,034,506).

[0477] Modified oligonucleotides can also contain one or more substituted sugar moieties. The RNA effector molecules, e.g., dsRNAs, featured herein can include one of the following at the 2′ position: H (deoxyribose); OH (ribose); F; O-, S-, or N-alkyl; O-, S-, or N-alkenyl; O-, S- or N-alkynyl; or O-alkyl-O-alkyl, wherein the alkyl, alkenyl and alkynyl can be substituted or unsubstituted C₁ to C₁₀ alkyl or C₂ to C₁₀ alkenyl and alkynyl. Exemplary suitable modifications include O[(CH₂)ₙO]ₘCH₃, O(CH₂)ₙOCH₃, O(CH₂)ₙNH₂, O(CH₂)ₙCH₃, O(CH₂)ₙONH₂, and O(CH₂)ₙON[(CH₂)ₙCH₃)]₂, where n and m are from 1 to 10, inclusive. In some embodiments, oligonucleotides include one of the following at the 2′ position: C₁ to C₁₀ lower alkyl, substituted lower alkyl, alkaryl, aralkyl, O-alkaryl or O-aralkyl, SH, SCH₃, OCN, Cl, Br, CN, CF₃, OCF₃, SOCH₃, SO₂CH₃, ONO₂, NO₂, N₃, NH₂, heterocycloalkyl, heterocycloalkaryl, aminoalkylamino, polyalkylamino, substituted silyl, a RNA cleaving group, a reporter group, an intercalator, a group for improving the pharmacokinetic properties of an oligonucleotide (e.g., a RNA effector molecule), or a group for improving the pharmacodynamic properties of an oligonucleotide (e.g., a RNA effector molecule), and other substituents having similar properties. In some embodiments, the modification includes a 2′-methoxyethoxy (2′-β-CH₂CH₂OCH₃, also known as 2′-O-(2-methoxyethyl) or 2′-MOE) (Martin et al., 78 Helv. Chim. Acta 486-504 (1995)), i.e., an alkoxy-alkoxy group. Another exemplary modification is 2′-dimethylaminooxyethoxy, i.e., a O(CH₂)₂ON(CH₃)₂ group, also known as 2′-DMAOE, as described in examples herein below, and 2′-dimethylaminoethoxyethoxy (also known in the art as 2′-O-dimethylaminoethoxyethyl or 2′-DMAEOE), i.e., 2′-O—CH₂—O—CH₂—N(CH₂)₂.

[0478] Other modifications include 2′-methoxy (2′-OCH₃), 2′-aminopropoxy (2′-OCH₂CH₂CH₂NH₂) and 2′-fluoro (2′-F). Similar modifications can also be made at other positions on the oligonucleotide, particularly the 3′ position of the sugar on the 3′ terminal nucleotide or in 2′-5′ linked oligonucleotide and the 5′ position of 5′ terminal nucleotide. Oligonucleotides can also have sugar mimetics such as cyclobutyl moieties in place of the pentofuranosyl sugar. Representative patents that teach the preparation of such modified sugar structures include, but are not limited to, U.S. Pat. No. 4,981,957; No. 5,118,800; No. 5,319,080; No. 5,359,044; No. 5,393,878; No. 5,446,137; No. 5,466,786; No. 5,514,785; No. 5,519,134; No. 5,567,811; No. 5,576,427; No. 5,591,722; No. 5,597,909; No. 5,610,300; No. 5,627,053; No. 5,639,873; No. 5,646,265; No. 5,658,873; No. 5,670,633; and No. 5,700,920, certain of which are commonly owned with the instant application.

[0479] An oligonucleotide (e.g., a RNA effector molecule) can also include nucleobase (often referred to in the art simply as “base”) modifications or substitutions. As used herein, “unmodified” or “natural” nucleobases include the purine bases adenine (A) and guanine (G), and the pyrimidine bases cytosine (C) and uracil (U). Modified nucleobases include other synthetic and natural nucleobases such as as inosine, xanthine, hypoxanthine, nubularine, isoguanisine, tubercidine, 2-(halo)adenine, 2-(alkyl)adenine, 2-(propyl)adenine, 2 (amino)adenine, 2-(aminoalkyll)adenine, 2 (aminopropyl)adenine, 2 (methylthio) N6 (isopentenyl)adenine, 6 (alkyl)adenine, 6 (methyl)adenine, 7 (deaza)adenine, 8 (alkenyl)adenine, 8-(alkyl)adenine, 8 (alkynyl)adenine, 8 (amino)adenine, 8-(halo)adenine, 8-(hydroxyl)adenine, 8 (thioalkyl)adenine, 8-(thiol)adenine, N6-(isopentyl)adenine, N6 (methyl)adenine, N6, N6 (dimethyl)adenine, 2-(alkyl)guanine, 2 (propyl)guanine, 6-(alkyl)guanine, 6 (methyl)guanine, 7 (alkyl)guanine, 7 (methyl)guanine, 7 (deaza)guanine, 8 (alkyl)guanine, 8-(alkenyl)guanine, 8 (alkynyl)guanine, 8-(amino)guanine, 8 (halo)guanine, 8-(hydroxyl)guanine, 8 (thioalkyl)guanine, 8-(thiol)guanine, N (methyl)guanine, 2-(thio)cytosine, 3 (deaza) 5 (aza)cytosine, 3-(alkyl)cytosine, 3 (methyl)cytosine, 5-(alkyl)cytosine, 5-(alkynyl)cytosine, (halo)cytosine, 5 (methyl)cytosine, 5 (propynyl)cytosine, 5 (propynyl)cytosine, (trifluoromethyl)cytosine, 6-(azo)cytosine, N4 (acetyl)cytosine, 3 (3 amino-3 carboxypropyl)uracil, 2-(thio)uracil, 5 (methyl) 2 (thio)uracil, 5 (methylaminomethyl)-2 (thio)uracil, 4-(thio)uracil, 5 (methyl) 4 (thio)uracil, 5 (methylaminomethyl)-4 (thio)uracil, 5 (methyl) 2,4 (dithio)uracil, 5 (methylaminomethyl)-2,4 (dithio)uracil, 5 (2-aminopropyl)uracil, 5-(alkyl)uracil, 5-(alkynyl)uracil, 5-(allylamino)uracil, 5 (aminoallyl)uracil, (aminoalkyl)uracil, 5 (guanidiniumalkyl)uracil, 5 (1,3-diazole-1-alkyl)uracil, 5-(cyanoalkyl)uracil, 5-(dialkylaminoalkyl)uracil, 5 (dimethylaminoalkyl)uracil, 5-(halo)uracil, 5-(methoxy)uracil, uracil-5 oxyacetic acid, 5 (methoxycarbonylmethyl)-2-(thio)uracil, (methoxycarbonyl-methyl)uracil, 5 (propynyl)uracil, 5 (propynyl)uracil, 5 (trifluoromethyl)uracil, 6 (azo)uracil, dihydrouracil, N3 (methyl)uracil, 5-uracil (i.e., pseudouracil), 2 (thio)pseudouracil, 4 (thio)pseudouraci-1,2,4-(dithio)psuedouracil, 5-(alkyl)pseudouracil, 5-(methyl)pseudouracil, 5-(alkyl)-2-(thio)pseudouracil, 5-(methyl)-2-(thio)pseudouracil, 5-(alkyl)-4 (thio)pseudouracil, 5-(methyl)-4 (thio)pseudouracil, 5-(alkyl)-2,4 (dithio)pseudouracil, 5-(methyl)-2,4 (dithio)pseudouracil, 1 substituted pseudouracil, 1 substituted 2(thio)-pseudouracil, 1 substituted 4 (thio)pseudouracil, 1 substituted 2,4-(dithio)pseudouracil, 1 (aminocarbonylethylenyl)-pseudouracil, 1 (aminocarbonylethylenyl)-2(thio)-pseudouracil, 1 (aminocarbonylethylenyl)-4 (thio)pseudouracil, 1 (aminocarbonylethylenyl)-2,4-(dithio)pseudouracil, 1 (aminoalkylaminocarbonylethylenyl)-pseudouracil, 1 (aminoalkylamino-carbonylethylenyl)-2(thio)-pseudouracil, 1 (aminoalkylaminocarbonylethylenyl)-4 (thio)pseudouracil, 1 (aminoalkylaminocarbonylethylenyl)-2,4-(dithio)pseudouracil, 1,3-(diaza)-2-(oxo)-phenoxazin-1-yl, 1-(aza)-2-(thio)-3-(aza)-phenoxazin-1-yl, 1,3-(diaza)-2-(oxo)-phenthiazin-1-yl, 1-(aza)-2-(thio)-3-(aza)-phenthiazin-1-yl, 7-substituted 1,3-(diaza)-2-(oxo)-phenoxazin-1-yl, 7-substituted 1-(aza)-2-(thio)-3-(aza)-phenoxazin-1-yl, 7-substituted 1,3-(diaza)-2-(oxo)-phenthiazin-1-yl, 7-substituted 1-(aza)-2-(thio)-3-(aza)-phenthiazin-1-yl, 7-(aminoalkylhydroxy)-1,3-(diaza)-2-(oxo)-phenoxazin-1-yl, 7-(aminoalkylhydroxy)-1-(aza)-2-(thio)-3-(aza)-phenoxazin-1-yl, 7-(aminoalkylhydroxy)-1,3-(diaza)-2-(oxo)-phenthiazin-1-yl, 7-(aminoalkylhydroxy)-1-(aza)-2-(thio)-3-(aza)-phenthiazin-1-yl, 7-(guanidiniumalkylhydroxy)-1,3-(diaza)-2-(oxo)-phenoxazin-1-yl, 7-(guanidiniumalkylhydroxy)-1-(aza)-2-(thio)-3-(aza)-phenoxazin-1-yl, 7-(guanidiniumalkyl-hydroxy)-1,3-(diaza)-2-(oxo)-phenthiazin-1-yl, 7-(guanidiniumalkylhydroxy)-1-(aza)-2-(thio)-3-(aza)-phenthiazin-1-yl, 1,3,5-(triaza)-2,6-(dioxa)-naphthalene, inosine, xanthine, hypoxanthine, nubularine, tubercidine, isoguanisine, inosinyl, 2-aza-inosinyl, 7-deaza-inosinyl, nitroimidazolyl, nitropyrazolyl, nitrobenzimidazolyl, nitroindazolyl, aminoindolyl, pyrrolopyrimidinyl, 3-(methyl)isocarbostyrilyl, 5-(methyl)isocarbostyrilyl, 3-(methyl)-7-(propynyl)isocarbostyrilyl, 7-(aza)indolyl, 6-(methyl)-7-(aza)indolyl, imidizopyridinyl, 9-(methyl)-imidizopyridinyl, pyrrolopyrizinyl, isocarbostyrilyl, 7-(propynyl)isocarbostyrilyl, propynyl-7-(aza)indolyl, 2,4,5-(trimethyl)phenyl, 4-(methyl)indolyl, 4,6-(dimethyl)indolyl, phenyl, napthalenyl, anthracenyl, phenanthracenyl, pyrenyl, stilbenzyl, tetracenyl, pentacenyl, difluorotolyl, 4-(fluoro)-6-(methyl)benzimidazole, 4-(methyl)benzimidazole, 6-(azo)thymine, 2-pyridinone, 5 nitroindole, 3 nitropyrrole, 6-(aza)pyrimidine, 2 (amino)purine, 2,6-(diamino)purine, 5 substituted pyrimidines, N2-substituted purines, N6-substituted purines, 06-substituted purines, substituted 1,2,4-triazoles, pyrrolo-pyrimidin-2-on-3-yl, 6-phenyl-pyrrolo-pyrimidin-2-on-3-yl, para-substituted-6-phenyl-pyrrolo-pyrimidin-2-on-3-yl, ortho-substituted-6-phenyl-pyrrolo-pyrimidin-2-on-3-yl, bis-ortho-substituted-6-phenyl-pyrrolo-pyrimidin-2-on-3-yl, para-(aminoalkylhydroxy)-6-phenyl-pyrrolo-pyrimidin-2-on-3-yl, ortho-(aminoalkylhydroxy)-6-phenyl-pyrrolo-pyrimidin-2-on-3-yl, bis-ortho-(aminoalkylhydroxy)-6-phenyl-pyrrolo-pyrimidin-2-on-3-yl, pyridopyrimidin-3-yl, 2-oxo-7-amino-pyridopyrimidin-3-yl, 2-oxo-pyridopyrimidine-3-yl, or any O-alkylated or N-alkylated derivatives thereof. Modified nucleobases also include natural bases that comprise conjugated moieties, e.g., a ligand.

[0480] Further nucleobases include those disclosed in U.S. Pat. No. 3,687,808; MODIFIED NUCLEOSIDES BIOCHEM., BIOTECH. & MEDICINE (Herdewijn, ed., Wiley-VCH, 2008); WO 2009/120878; CONCISE ENCYCLOPEDIA OF POLYMER SCIENCE & ENGIN. 858-59 (Kroschwitz ed., John Wiley & Sons, 1990); Englisch et al., 30 Angewandte Chemie, Intl. Ed. 613 (1991); Sanghvi, 15 DsRNA RESEARCH & APPLICATIONS 289-302 (Crooke & Lebleu, eds., CRC Press, Boca Raton, Fla., 1993). Certain of these nucleobases are particularly useful for increasing the binding affinity of the oligomeric compounds featured in the invention. These include 5-substituted pyrimidines, 6-azapyrimidines and N-2, N-6 and 0-6 substituted purines, including 2-aminopropyladenine, 5-propynyluracil and 5-propynylcytosine. 5-methylcytosine substitutions have been shown to increase nucleic acid duplex stability by 0.6-1.2° C. (Sanghvi, at 276-78), and are exemplary base substitutions, even more particularly when combined with 2′-O-methoxyethyl sugar modifications.

[0481] Representative patents that teach the preparation of certain of the above noted modified nucleobases as well as other modified nucleobases include, but are not limited to, the above noted U.S. Pat. No. 3,687,808; No. 4,845,205; No. 5,130,30; No. 5,134,066; No. 5,175,273; No. 5,367,066; No. 5,432,272; No. 5,457,191No. 5,457,187; No. 5,459,255; No. 5,484,908; No. 5,502,177; No. 5,525,711; No. 5,552,540; No. 5,587,469; No. 5,594,121, No. 5,596,091; No. 5,614,617; No. 5,681,941; No. 6,015,886; No. 6,147,200; No. 6,166,197; No. 6,222,025; No. 6,235,887; No. 6,380,368; No. 6,528,640; No. 6,639,062; No. 6,617,438; No. 7,045,610; No. 7,427,672; and No. 7,495,088; and No. 5,750,692.

[0482] The oligonucleotides can also be modified to include one or more locked nucleic acids (LNA). A locked nucleic acid is a nucleotide having a modified ribose moiety in which the ribose moiety comprises an extra bridge connecting the 2′ and 4′ carbons. This structure effectively “locks” the ribose in the 3′-endo structural conformation. The addition of locked nucleic acids to oligonucleotide molecules has been shown to increase oligonucleotide molecule stability in serum, and to reduce off-target effects. Elmen et al., 33 Nucl. Acids Res. 439-47 (2005); Mook et al., 6 Mol. Cancer. Ther. 833-43 (2007); Grunweller et al., 31 Nucl. Acids Res. 3185-93 (2003); U.S. Pat. No. 6,268,490; No. 6,670,461; No. 6,794,499; No. 6,998,484; No. 7,053,207; No. 7,084,125; and No. 7,399,845.

[0483] In certain instances, the oligonucleotides of a RNA effector molecule can be modified by a non-ligand group. A number of non-ligand molecules have been conjugated to oligonucleotides in order to enhance the activity, cellular distribution or cellular uptake of the oligonucleotides, and procedures for performing such conjugations are available in the scientific literature. Such non-ligand moieties have included lipid moieties, such as cholesterol (Kubo et al., 365 Biochem. Biophys. Res. Comm. 54-61 (2007)); Letsinger et al., 86 PNAS 6553 (1989)); cholic acid (Manoharan et al., 1994); a thioether, e.g., hexyl-5-tritylthiol (Manoharan et al., 1992; Manoharan et al., 1993); a thiocholesterol (Oberhauser et al., 1992); an aliphatic chain, e.g., dodecandiol or undecyl residues (Saison-Behmoaras et al., 1991; Kabanov et al., 259 FEBS Lett. 327 (1990); Svinarchuk et al., 75 Biochimie 75 (1993)); a phospholipid, e.g., di-hexadecyl-rac-glycerol or triethylammonium 1,2-di-O-hexadecyl-rac-glycero-3-H-phosphonate (Manoharan et al., 1995); Shea et al., 18 Nucl. Acids Res. 3777 (1990)); a polyamine or a polyethylene glycol chain (Manoharan et al., Nucleosides & Nucleotides, 1995); or adamantane acetic acid (Manoharan et al., Tetrahedron Lett., 1995); a palmityl moiety (Mishra et al., 1995); or an octadecylamine or hexylamino-carbonyl-oxycholesterol moiety (Crooke et al., 1996). Representative United States patents that teach the preparation of such RNA conjugates have been listed herein. Typical conjugation protocols involve the synthesis of an oligonucleotide bearing an aminolinker at one or more positions of the sequence. The amino group is then reacted with the molecule being conjugated using appropriate coupling or activating reagents. The conjugation reaction can be performed either with the RNA still bound to the solid support or following cleavage of the RNA, in solution phase. Purification of the RNA conjugate by HPLC typically affords the pure conjugate.

[0484] Nucleic acid sequences of exemplary RNA effector molecules are represented below using standard nomenclature, and specifically the abbreviations of Table 17, as follows:

TABLE 17
Abbreviations of nucleotide monomers used
in nucleic acid sequence representation.

| Abbreviation | Nucleotide(s) |
|---|---|
| A | adenosine |
| C | cytidine |
| G | guanosine |
| T | thymidine |
| U | uridine |
| N | any nucleotide (G, A, C, T or U) |
| a | 2′-O-methyladenosine |
| c | 2′-O-methylcytidine |
| g | 2′-O-methylguanosine |
| u | 2′-O-methyluridine |
| dT | 2′-deoxythymidine |
| s | phosphorothioate linkage |

These monomers, when present in an oligonucleotide, are mutually linked by 5′-3′-phosphodiester bonds.

[0485] Ligands

[0486] Another modification of the oligonucleotides (e.g., of a RNA effector molecule) featured in the invention involves chemically linking to the oligonucleotide one or more ligands, moieties or conjugates that enhance the activity, cellular distribution or cellular uptake of the oligonucleotide. Such moieties include but are not limited to lipid moieties such as a cholesterol moiety (Letsinger et al., 86 PNAS 6553-56 (1989); cholic acid (Manoharan et al., 4 Biorg. Med. Chem. Let. 1053-60 (1994)); a thioether, e.g., beryl-5-tritylthiol (Manoharan et al., 660 Ann. NY Acad. Sci. 306309 (1992); Manoharan et al., 3 Biorg. Med. Chem. Let. 2765-70 (1993)); a thiocholesterol (Oberhauser et al., 20 Nucl. Acids Res. 533-38 (1992)); an aliphatic chain, e.g., dodecandiol or undecyl residues (Saison-Behmoaras et al., 10 EMBO J. 1111-18 (1991); Kabanov et al., 259 FEBS Lett. 327-30 (1990); Svinarchuk et al., 75 Biochimie 49-54 (1993)); a phospholipid, e.g., di-hexadecyl-rac-glycerol or triethyl-ammonium 1,2-di-O-hexadecyl-rac-glycero-3-phosphonate (Manoharan et al., 36 Tetrahedron Lett. 3651-54 (1995); Shea et al., 18 Nucl. Acids Res. 3777-83 (1990)); a polyamine or a polyethylene glycol chain (Manoharan et al., 14 Nucleosides & Nucleotides 969-73 (1995)); or adamantane acetic acid (Manoharan et al., Tetrahedron Lett., 1995); a palmityl moiety (Mishra et al., 1264 Biochim. Biophys. Acta 229-37 (1995)); or an octadecylamine or hexylamino-carbonyloxycholesterol moiety (Crooke et al., 227 J. Pharmacol. Exp. Ther. 923-37 (1996)).

[0487] In one embodiment, a ligand alters the distribution, targeting or lifetime of a RNA effector molecule agent into which it is incorporated. In some embodiments a ligand provides an enhanced affinity for a selected target, e.g., molecule, cell or cell type, compartment, e.g., a cellular or organ compartment, tissue, organ or region of the body, as, e.g., compared to a species absent such a ligand. Ideally, ligands will not take part in duplex pairing in a duplexed nucleic acid.

[0488] Ligands can include a naturally occurring substance, such as a protein (e.g., human serum albumin (HSA), low-density lipoprotein (LDL), or globulin); carbohydrate (e.g., a dextran, pullulan, chitin, chitosan, inulin, cyclodextrin or hyaluronic acid); or a lipid. The ligand can also be a recombinant or synthetic molecule, such as a synthetic polymer, e.g., a synthetic polyamino acid. Examples of polyamino acids include polyamino acid is a polylysine (PLL), poly L aspartic acid, poly L-glutamic acid, styrene-maleic acid anhydride copolymer, poly(L-lactide-co-glycolied) copolymer, divinyl ether-maleic anhydride copolymer, N-(2-hydroxypropyl)methacrylamide copolymer (HMPA), polyethylene glycol (PEG), polyvinyl alcohol (PVA), polyurethane, poly(2-ethylacryllic acid), N-isopropylacrylamide polymers, or polyphosphazine. Example polyamines include polyethylenimine, polylysine (PLL), spermine, spermidine, polyamine, pseudopeptide-polyamine, peptidomimetic polyamine, dendrimer polyamine, arginine, amidine, protamine, cationic lipid, cationic porphyrin, quaternary salt of a polyamine, or an -helical peptide.

[0489] Ligands can also include targeting groups, e.g., a cell or tissue targeting agent, e.g., a lectin, glycoprotein, lipid or protein, e.g., an antibody, that binds to a specified cell type such as a kidney cell. A targeting group can be a thyrotropin, melanotropin, lectin, glycoprotein, surfactant protein A, Mucin carbohydrate, multivalent lactose, multivalent galactose, N-acetyl-galactosamine, N-acetyl-gulucosamine multivalent mannose, multivalent fucose, glycosylated polyaminoacids, multivalent galactose, transferrin, bisphosphonate, polyglutamate, polyaspartate, a lipid, cholesterol, a steroid, bile acid, folate, vitamin B12, biotin, or an RGD peptide or RGD peptide mimetic.

[0490] Other examples of ligands include dyes, intercalating agents (e.g. acridines), cross-linkers (e.g. psoralene, mitomycin C), porphyrins (TPPC4, texaphyrin, Sapphyrin), polycyclic aromatic hydrocarbons (e.g., phenazine, dihydrophenazine), artificial endonucleases (e.g., EDTA), lipophilic molecules, e.g, cholesterol, cholic acid, adamantane acetic acid, 1-pyrene butyric acid, dihydrotestosterone, 1,3-Bis-O(hexadecyl)glycerol, geranyloxyhexyl group, hexadecylglycerol, borneol, menthol, 1,3-propanediol, heptadecyl group, palmitic acid, myristic acid,O3-(oleoyl)lithocholic acid, O3-(oleoyl)cholenic acid, dimethoxytrityl, or phenoxazine) and peptide conjugates (e.g., antennapedia peptide, Tat peptide), alkylating agents, phosphate, amino, mercapto, PEG (e.g., PEG-40K), MPEG, [MPEG]₂, polyamino, alkyl, substituted alkyl, radiolabeled markers, enzymes, haptens (e.g., biotin), transport/absorption facilitators (e.g., aspirin, vitamin E, folic acid), synthetic ribonucleases (e.g., imidazole, bisimidazole, histamine, imidazole clusters, acridine-imidazole conjugates, Eu³⁺ complexes of tetraazamacrocycles), dinitrophenyl, HRP, or AP.

[0491] Ligands can be proteins, e.g., glycoproteins, or peptides, e.g., molecules having a specific affinity for a co-ligand, or antibodies e.g., an antibody, that binds to a specified cell type such as a cancer cell, endothelial cell, or bone cell. Ligands can also include hormones and hormone receptors. They can also include non-peptidic species, such as lipids, lectins, carbohydrates, vitamins, cofactors, multivalent lactose, multivalent galactose, N-acetyl-galactosamine, N-acetyl-gulucosamine multivalent mannose, or multivalent fucose. The ligand can be, for example, a lipopolysaccharide, an activator of p38 MAP kinase, or an activator of NF-κB.

[0492] The ligand can be a substance, e.g., a drug, which can increase the uptake of the RNA effector molecule agent into the cell, for example, by disrupting the cell's cytoskeleton, e.g., by disrupting the cell's microtubules, microfilaments, and/or intermediate filaments. The drug can be, for example, taxol, vincristine, vinblastine, cytochalasin, nocodazole, japlakinolide, latrunculin A, phalloidin, swinholide A, indanocine, or myoservin.

[0493] An example ligand is a lipid or lipid-based molecule. Such a lipid or lipid-based molecule preferably binds a serum protein, e.g., human serum albumin (HSA). An HSA binding ligand allows for distribution of the conjugate to a target tissue, e.g., a non-kidney target tissue of the body. For example, the target tissue can be the liver, including parenchymal cells of the liver. Other molecules that can bind HSA can also be used as ligands. For example, Naproxen or aspirin can be used. A lipid or lipid-based ligand can (a) increase resistance to degradation of the conjugate, (b) increase targeting or transport into a target cell or cell membrane, and/or (c) can be used to adjust binding to a serum protein, e.g., HSA.

[0494] A lipid based ligand can be used to modulate, e.g., control the binding of the conjugate to a target tissue. For example, a lipid or lipid-based ligand that binds to HSA more strongly will be less likely to be targeted to the kidney and therefore less likely to be cleared from the embryo. A lipid or lipid-based ligand that binds to HSA less strongly can be used to target the conjugate to the kidney. For example, the lipid based ligand binds HSA, or it binds HSA with a sufficient affinity such that the conjugate will be distributed to a non-kidney tissue but also be reversible. Alternatively, the lipid-based ligand binds HSA weakly or not at all, such that the conjugate will be distributed to the kidney. Other moieties that target to kidney cells can also be used in place of or in addition to the lipid-based ligand.

[0495] In another aspect, the ligand is a moiety, e.g., a vitamin, that is taken up by an embryonic cell, e.g., a proliferating cell. Exemplary vitamins include vitamin A, E, and K. Other exemplary vitamins include are B vitamin, e.g., folic acid, B12, riboflavin, biotin, pyridoxal or other vitamins or nutrients taken up by embryonic cells. Also included are HSA and low density lipoproteins.

[0496] In another aspect, the ligand is a cell-permeation agent, preferably a helical cell-permeation agent. Preferably, the agent is amphipathic. An exemplary agent is a peptide such as tat or antennopedia. If the agent is a peptide, it can be modified, including a peptidylmimetic, invertomers, non-peptide or pseudo-peptide linkages, and use of D-amino acids. The helical agent can be an α-helical agent, and can include a lipophilic and a lipophobic phase.

[0497] The ligand can be a peptide or peptidomimetic. A peptidomimetic (also referred to herein as an oligopeptidomimetic) is a molecule capable of folding into a defined 3-dimensional structure similar to a natural peptide. The attachment of peptide and peptidomimetics to RNA effector molecule agents can affect pharmacokinetic distribution of the RNA effector molecule, such as by enhancing cellular recognition and absorption. The peptide or peptidomimetic moiety can be about 5 to 50 amino acids long, e.g., about 5, 10, 15, 20, 25, 30, 35, 40, 45, or 50 amino acids long (see Table 18, for example).

TABLE 18
Exemplary Cell Permeation Peptides

| Cell Permeation | | SEQ ID | |
|---|---|---|---|
| Peptide | Amino acid Sequence | NO: | Reference |
| Penetratin | RQIKIWFQNRRMKWKK | 3284943 | Derossi et al., 269 J. |
| | | | Biol. Chem. 10444 |
| | | | (1994) |
| Tat fragment | GRKKRRQRRRPPQC | 3284944 | Vives et al., 272 J. |
| (48-60) | | | Biol. Chem. 16010 |
| | | | (1997) |
| Signal | GALFLGWLGAAGSTMGAWSQPKKKRKV | 3284945 | Chaloin et al., 243 |
| Sequence-based | | | Biochem. Biophys. |
| peptide | | | Res. Commun 601 |
| | | | (1998) |
| PVEC | LLIILRRRIRKQAHAHSK | 3284946 | Elmquist et al., 269 |
| | | | Exp. Cell Res. 237 |
| | | | (2001) |
| Transportan | GWTLNSAGYLLKINLKALAALAKKIL | 3284947 | Pooga et al., 12 |
| | | | FASEB J. 67 (1998) |
| Amphiphilic | KLALKLALKALKAALKLA | 3284948 | Oehlke et al., 2 Mol. |
| model peptide | | | Ther. 339 (2000) |
| Arg₉ | RRRRRRRRR | 3284949 | Mitchell et al., 56 J. |
| | | | Pept. Res. 318 (2000) |
| Bacterial cell | KFFKFFKFFK | 3284950 | |
| wall permeating | | | |
| LL-37 | LLGDFFRKSKEKIGKEFKRIVQRIKDFLRN | 3284951 | |
| | LVPRTES | | |
| Cecropin P1 | SWLSKTAKKLENSAKKRISEGIAIAIQGGP | 3284952 | |
| | R | | |
| α-defensin | ACYCRIPACIAGERRYGTCIYQGRLWAFC | 3284953 | |
| | C | | |
| b-defensin | DHYNCVSSGGQCLYSACPIFTKIQGTCYR | 3284954 | |
| | GKAKCCK | | |
| Bactenecin | RKCRIVVIRVCR | 3284955 | |
| PR-39 | RRRPRPPYLPRPRPPPFFPPRLPPRIPPGFPP | 3284956 | |
| | RFPPRFPGKR-NH₂ | | |
| Indolicidin | ILPWKWPWWPWRR-NH₂ | 3284957 | |

[0498] A peptide or peptidomimetic can be, for example, a cell permeation peptide, cationic peptide, amphipathic peptide, or hydrophobic peptide (e.g., consisting primarily of Tyr, Trp or Phe). The peptide moiety can be a dendrimer peptide, constrained peptide or crosslinked peptide. In another alternative, the peptide moiety can include a hydrophobic membrane translocation sequence (MTS). An exemplary hydrophobic MTS-containing peptide is RFGF having the amino acid sequence AAVALLPAVLLALLAP (SEQ ID NO:3284958) An RFGF analogue (e.g., amino acid sequence AALLPVLLAAP (SEQ ID NO:3284959) containing a hydrophobic MTS can also be a targeting moiety. The peptide moiety can be a “delivery” peptide that carres large polar molecules including peptides, oligonucleotides, and protein across cell membranes. For example, sequences from the HIV Tat protein (GRKKRRQRRRPPQ [SEQ ID NO:3284960]) and the Drosophila antennapedia protein (RQIKIWFQNRRMKWKK [SEQ ID NO:284961]) can function as delivery peptides. A peptide or peptidomimetic can be encoded by a random sequence of DNA, such as a peptide identified from a phage-display library, or one-bead-one-compound (OBOC) combinatorial library. Lam et al., 354 Nature 82-84 (1991). The peptide or peptidomimetic can be tethered to a dsRNA agent via an incorporated monomer unit is a cell targeting peptide such as an arginine-glycine-aspartic acid (RGD)-peptide, or RGD mimic. As noted, the peptide moieties can have a structural modification, such as to increase stability or direct conformational properties. Any of the structural modifications described herein can be utilized.

[0499] An RGD peptide moiety can be used to target a tumor cell, such as an endothelial tumor cell or a breast cancer tumor cell. Zitzmann et al., 62 Cancer Res. 5139-43 (2002). An RGD peptide can facilitate targeting of an dsRNA agent to tumors of a variety of other tissues, including the lung, kidney, spleen, or liver. Aoki et al., 8 Cancer Gene Ther. 783-87 (2001). Preferably, the RGD peptide will facilitate targeting of a RNA effector molecule agent to the kidney. The RGD peptide can be linear or cyclic, and can be modified, e.g., glycosylated or methylated to facilitate targeting to specific tissues. For example, a glycosylated RGD peptide can deliver a RNA effector molecule agent to a tumor cell expressing αVβ3. Haubner et al., 42 J. Nucl. Med. 326-36 (2001).

[0500] A “cell permeation peptide” is capable of permeating a cell. It can be, for example, an α-helical linear peptide (e.g., LL-37 or Ceropin P1), a disulfide bond-containing peptide (e.g., α-defensin, β-defensin or bactenecin), or a peptide containing only one or two dominating amino acids (e.g., PR-39 or indolicidin). A cell permeation peptide can also include a nuclear localization signal (NLS). For example, a cell permeation peptide can be a bipartite amphipathic peptide, such as MPG, which is derived from the fusion peptide domain of HIV-1 gp41 and the NLS of SV40 large T antigen. Simeoni et al., 31 Nucl. Acids Res. 2717-24 (2003).

[0501] Representative patents that teach the preparation of oligonucleotide conjugates include, but are not limited to, U.S. Pat. No. 4,828,979; No. 4,948,882; No. 5,218,105; No. 5,525,465; No. 5,541,313; No. 5,545,730; No. 5,552,538; No. 5,578,717, No. 5,580,731; No. 5,591,584; No. 5,109,124; No. 5,118,802; No. 5,138,045; No. 5,414,077; No. 5,486,603; No. 5,512,439; No. 5,578,718; No. 5,608,046; No. 4,587,044; No. 4,605,735; No. 4,667,025; No. 4,762,779; No. 4,789,737; No. 4,824,941; No. 4,835,263; No. 4,876,335; No. 4,904,582; No. 4,958,013; No. 5,082,830; No. 5,112,963; No. 5,214,136; No. 5,082,830; No. 5,112,963; No. 5,214,136; No. 5,245,022; No. 5,254,469; No. 5,258,506; No. 5,262,536; No. 5,272,250; No. 5,292,873; No. 5,317,098; No. 5,371,241, No. 5,391,723; No. 5,416,203, No. 5,451,463; No. 5,510,475; No. 5,512,667; No. 5,514,785; No. 5,565,552; No. 5,567,810; No. 5,574,142; No. 5,585,481; No. 5,587,371; No. 5,595,726; No. 5,597,696; No. 5,599,923; No. 5,599,928; No. 5,688,941; No. 6,294,664; No. 6,320,017; No. 6,576,752; No. 6,783,931; No. 6,900,297; and No. 7,037,646.

[0502] It is not necessary for all positions in a given compound to be uniformly modified, and in fact more than one of the aforementioned modifications can be incorporated in a single compound or even at a single nucleoside within an oligonucleotide. The present invention also includes oligonucleotide molecule compounds which are chimeric compounds. “Chimeric” RNA effector molecule compounds or “chimeras,” in the context of this invention, are oligonucleotide compounds, such as dsRNAs, that contain two or more chemically distinct regions, each made up of at least one monomer unit, i.e., a nucleotide in the case of a dsRNA compound. These RNA effector molecules typically contain at least one region wherein the RNA is modified so as to confer upon the RNA effector molecule increased resistance to nuclease degradation, increased cellular uptake, and/or increased binding affinity for the target nucleic acid. An additional region of the oligonucleotide can serve as a substrate for enzymes capable of cleaving RNA:DNA or RNA:RNA hybrids. By way of example, RNase H is a cellular endonuclease which cleaves the RNA strand of a RNA:DNA duplex. Activation of RNase H, therefore, results in cleavage of the RNA target, thereby greatly enhancing the efficiency of RNA effector molecule inhibition of gene expression. Consequently, comparable results can often be obtained with shorter RNA effector molecules when chimeric dsRNAs are used, compared to phosphorothioate deoxydsRNAs hybridizing to the same target region. Cleavage of the oligonucleotide can be routinely detected by gel electrophoresis and, if necessary, associated nucleic acid hybridization techniques known in the art.

### VI. INTRODUCTION/DELIVERY OF RNA EFFECTOR MOLECULES

[0503] The delivery of an oligonucleotide (e.g., a RNA effector molecule) to cells according to methods provided herein can be achieved in a number of different ways. For example, delivery can be performed directly by administering a composition comprising a RNA effector molecule, e.g., a dsRNA, into cell culture. Alternatively, delivery can be performed indirectly by administering into the cell one or more vectors that encode and direct the expression of the RNA effector molecule. These alternatives are discussed further herein.

[0504] In some embodiments, the RNA effector molecule is a siRNA or shRNA effector molecule introduced into a cell by introducing into the cell an invasive bacterium containing one or more siRNA or shRNA effector molecules or DNA encoding one or more siRNA or shRNA effector molecules (a process sometimes referred to as transkingdom RNAi (tkRNAi)). The invasive bacterium can be an attenuated strain of Listeria, Shigella, Salmonella, E. coli, or Bifidobacteriae, or a non-invasive bacterium that has been genetically modified to increase its invasive properties, e.g., by introducing one or more genes that enable invasive bacteria to access the cytoplasm of cells. Examples of such cytoplasm-targeting genes include listeriolysin 0 of Listeria and the invasin protein of Yersinia pseudotuberculosis. Methods for delivering RNA effector molecules to animal cells to induce transkingdom RNAi (tkRNAi) are known in the art. See, e.g., U.S. Patent Pubs. No. 2008/0311081 and No. 2009/0123426. In one embodiment, the RNA effector molecule is a siRNA molecule. In one embodiment, the RNA effector molecule is not a shRNA molecule.

[0505] As noted herein, oligonucleotides can be modified to prevent rapid degradation of the dsRNA by endo- and exo-nucleases and avoid undesirable off-target effects. For example, RNA effector molecules can be modified by chemical conjugation to lipophilic groups such as cholesterol to enhance cellular uptake and prevent degradation. In one embodiment, the RNA effector molecule is not modified by chemical conjugation to a lipophilic group, e.g., cholesterol.

[0506] In an alternative embodiment, RNA effector molecules can be delivered using a drug delivery system such as a nanoparticle, a dendrimer, a polymer, a liposome, or a cationic delivery system. Positively charged cationic delivery systems facilitate binding of a RNA effector molecule (negatively charged) and also enhance interactions at the negatively charged cell membrane to permit efficient cellular uptake. Cationic lipids, dendrimers, or polymers can either be bound to RNA effector molecules, or induced to form a vesicle or micelle that encases the RNA effector molecule. See, e.g., Kim et al., 129 J. Contr. Release 107-16 (2008). Methods for making and using cationic-RNA effector molecule complexes are well within the abilities of those skilled in the art. See e.g., Sorensen et al 327 J. Mol. Biol. 761-66 (2003); Verma et al., 9 Clin. Cancer Res. 1291-1300 (2003); Arnold et al., 25 J. Hypertens. 197-205 (2007).

[0507] Where the RNA effector molecule is a double-stranded molecule, such as a small interfering RNA (siRNA), comprising a sense strand and an antisense strand, the sense strand and antisense strand can be separately and temporally exposed to a cell, cell lysates, tissue, or cell culture. The phrase “separately and temporally” refers to the introduction of each strand of a double-stranded RNA effector molecule to a cell, cell lysates, tissue or cell culture in a single-stranded form, e.g., in the form of a non-annealed mixture of both strands or as separate, i.e., unmixed, preparations of each strand. In some embodiments, there is a time interval between the introduction of each strand which can range from seconds to several minutes to about an hour or more, e.g., 12 hr, 24 hr, 48 hr, 72 hr, 84 hr, 96 hr, or 108 hr, or more. Separate and temporal administration can be performed with canonical or non-canonical RNA effector molecules.

[0508] It is also contemplated herein that a plurality of RNA effector molecules are administered in a separate and temporal manner. Thus, each of a plurality of RNA effector molecules can be administered at a separate time or at a different frequency interval to achieve the desired average percent inhibition for the target gene. For example, RNA effector molecules targeting Bak can be administered more frequently than RNA effector molecule targeting LDH, as the expression of Bak recovers faster following treatment with a Bak RNA effector molecule. In one embodiment, the RNA effector molecules are added at a concentration from approximately 0.01 nM to 200 nM. In another embodiment, the RNA effector molecules are added at an amount of approximately 50 molecules per cell up to and including 500,000 molecules per cell. In another embodiment, the RNA effector molecules are added at a concentration from about 0.1 fmol/10⁶ cells to about 1 pmol/10⁶ cells.

[0509] In another aspect, a RNA effector molecule for modulating expression of a target gene can be expressed from transcription units inserted into DNA or RNA vectors. See, e.g., Couture et al., 12 TIG 5-10 (1996); WO 00/22113; WO 00/22114; U.S. Pat. No. 6,054,299. Expression can be transient (on the order of hours to weeks) or sustained (weeks to months or longer), depending upon the specific construct used and the target tissue or cell type. These transgenes can be introduced as a linear construct, a circular plasmid, or a viral vector, which can be an integrating or non-integrating vector. The transgene can also be constructed to permit it to be inherited as an extra chromosomal plasmid. Gassmann, et al., 92 PNAS 1292 (1995).

[0510] The individual strand or strands of a RNA effector molecule can be transcribed from a promoter on an expression vector. Where two separate strands are to be expressed to generate, for example, a dsRNA, two separate expression vectors can be co-introduced (e.g., by transfection or infection) into a target cell. Alternatively each individual strand of a dsRNA can be transcribed by promoters both of which are located on the same expression plasmid. In one embodiment, a dsRNA is expressed as an inverted repeat joined by a linker polynucleotide sequence such that the dsRNA has a stem and loop structure.

[0511] RNA effector molecule expression vectors are generally DNA plasmids or viral vectors. Expression vectors compatible with eukaryotic cells, such as those compatible with vertebrate cells, insect cells, or yeast cells can be used to produce recombinant constructs for the expression of a RNA effector molecule as described herein. Eukaryotic cell expression vectors are well known in the art and are available from a number of commercial sources. Typically, such vectors are provided containing convenient restriction sites for insertion of the desired nucleic acid segment. RNA effector molecule expressing vectors can be delivered directly to target cells using standard transfection and transduction methods.

[0512] RNA effector molecule expression plasmids can be transfected into target cells as a complex with cationic lipid carriers (e.g., OLIGOFECTAMINE™ transfection reagent) or non-cationic lipid-based carriers (e.g., TRANSIT-TKO® transfection reagent, Minis Bio LLC, Madison, Wis.). Multiple lipid transfections for RNA effector molecule-mediated knockdowns targeting different regions of a target RNA over a period of a week or more are also contemplated by the invention. Successful introduction of vectors into host cells can be monitored using various known methods. For example, transient transfection can be signaled with a reporter, such as a fluorescent marker, such as Green Fluorescent Protein (GFP). Stable transfection of cells ex vivo can be ensured using markers that provide the transfected cell with resistance to specific environmental factors (e.g., antibiotics and drugs), such as hygromycin B resistance. RNA effector molecule expression plasmids can be transfected into target cells as a complex with cationic lipid carriers (e.g., OLIGOFECTAMINE™ reagent) or non-cationic lipid-based carriers (e.g., TRANSIT-TKO® transfection reagent). Multiple lipid transfections for RNA effector molecule-mediated knockdowns targeting different regions of a target RNA over a period of a week or more are also contemplated by the invention. Successful introduction of vectors into host cells can be monitored using various known methods. For example, transient transfection can be signaled with a reporter, such as a fluorescent marker, such as GFP. Stable transfection of cells ex vivo can be ensured using markers that provide the transfected cell with resistance to specific environmental factors (e.g., antibiotics and drugs), such as hygromycin B resistance.

[0513] Viral vector systems which can be utilized with the methods and compositions described herein include, but are not limited to, (a) adenovirus vectors; (b) retrovirus vectors, including but not limited to lentiviral vectors, moloney murine leukemia virus, etc.; (c) adeno-associated virus vectors; (d) herpes simplex virus vectors; (e) SV 40 vectors; (f) polyoma virus vectors; (g) papilloma virus vectors; (h) picornavirus vectors; (i) pox virus vectors such as an orthopox, e.g., vaccinia virus vectors or avipox, e.g. canary pox or fowl pox; and (j) a helper-dependent or gutless adenovirus. Replication-defective viruses can also be advantageous. Different vectors will or will not become incorporated into the cells' genome. The constructs can include viral sequences for transfection, if desired. Alternatively, the construct can be incorporated into vectors capable of episomal replication, e.g., EPV and EBV vectors. Constructs for the recombinant expression of a RNA effector molecule will generally require regulatory elements, e.g., promoters, enhancers, etc., to ensure the expression of the RNA effector molecule in target cells. Other aspects to consider for vectors and constructs are further described herein.

[0514] Vectors useful for the delivery of a RNA effector molecule will include regulatory elements (promoter, enhancer, etc.) sufficient for expression of the RNA effector molecule in the desired target cell or tissue. The regulatory elements can be chosen to provide either constitutive or regulated/inducible expression.

[0515] Expression of the RNA effector molecule can be precisely regulated, for example, by using an inducible regulatory sequence that is sensitive to certain physiological regulators, e.g., glucose levels. Docherty et al., 8 FASEB J. 20-24 (1994). Such inducible expression systems, suitable for the control of dsRNA expression in cells include, for example, regulation by ecdysone, estrogen, progesterone, tetracycline, chemical inducers of dimerization, and isopropyl-β-D1-thiogalactopyranoside (IPTG). A person skilled in the art would be able to choose the appropriate regulatory/promoter sequence based on the intended use of the RNA effector molecule transgene.

[0516] In a specific embodiment, viral vectors that contain nucleic acid sequences encoding a RNA effector molecule can be used. For example, a retroviral vector can be used. See Miller et al., 217 Meth. Enzymol. 581-99 (1993); U.S. Pat. No. 6,949,242. Retroviral vectors contain the components necessary for the correct packaging of the viral genome and integration into the host cell DNA. The nucleic acid sequences encoding a RNA effector molecule are cloned into one or more vectors, which facilitates delivery of the nucleic acid into a cell. More detail about retroviral vectors can be found, for example, in Boesen et al., 6 Biotherapy 291-302 (1994), which describes the use of a retroviral vector to deliver the mdr1 gene to hematopoietic stem cells in order to make the stem cells more resistant to chemotherapy. Other references illustrating the use of retroviral vectors in gene therapy include Clowes et al., 93 J. Clin. Invest. 644-651 (1994); Kiem et al., 83 Blood 1467-73 (1994); Salmons & Gunzberg, 4 Human Gene Ther. 129-11 (1993); Grossman & Wilson, 3 Curr. Opin. Genetics Devel. 110-14 (1993). Lentiviral vectors contemplated for use include, for example, the HIV based vectors described in U.S. Pat. No. 6,143,520; No. 5,665,557; and No. 5,981,276.

[0517] It should be noted, as discussed herein, that host cell-surface receptors for retroviral entry can be inhabited by ERV Env proteins (virus interference). See Miller, 93 PNAS 11407-13 (1996). The retroviral envelope (Env) protein mediates the binding of virus particles to their cellular receptors, enabling virus entry: the first step in a new replication cycle. If an ERV is expressed in a cell, re-infection by a related exogenous retrovirus is prevented through interference (also called receptor interference): the Env protein of an ERV that is inserted into the cell membrane will interfere with the corresponding exogenous virus by receptor competition. This protects the cell from being overloaded with retroviruses. For example, enJSRVs can block the entry of exogenous JSRVs because they all utilize the cellular hyaluronidase-2 as a receptor. Spencer et al., 77 J. Virol. 5749-53 (2003). It is noteworthy that defective ERVs are no less interfering. Two enJSRVs, enJS56A1 and enJSRV-20, contain a mutant Gag polyprotein that can interfere with the late stage replication of exogenous JSRVs. Arnaud et al., 2 PLoS e170 (2007). Thus, interference between defective and replication-competent retroviruses provides an important mechanism of ERV copy number control. Receptor interference by ERV-expressed Env molecules (e.g., expressed by the HERV-H family) can hinder transfection or re-infection of cells intended to produce recombinant proteins. Such effects can explain low copy number or low expression in retroviral vector-mediated recombinant host cells, such as host cells transfected with two retroviral vectors, each encoding a single, complementary antibody chain. Hence, a target gene of the present embodiments that inhibits expression of ERV Env protein(s) provides for increasing retroviral vector multiplicity in host cells and increased yield of immunogenic agent.

[0518] Adenoviruses are also contemplated for use in delivery of RNA effector molecules. A suitable AV vector for expressing a RNA effector molecule featured in the invention, a method for constructing the recombinant AV vector, and a method for delivering the vector into target cells, are described in Xia et al., 20 Nat. Biotech. 1006-10 (2002).

[0519] Use of Adeno-associated virus (AAV) vectors is also contemplated (Walsh et al., 204 Proc. Soc. Exp. Biol. Med. 289-300 (1993); U.S. Pat. No. 5,436,146. In one embodiment, the RNA effector molecule can be expressed as two separate, complementary single-stranded RNA molecules from a recombinant AAV vector having, for example, either the U6 or H1 RNA promoters, or the cytomegalovirus (CMV) promoter. Suitable AAV vectors for expressing the dsRNA featured in the invention, methods for constructing the recombinant AV vector, and methods for delivering the vectors into target cells are described in Samulski et al., 61 J. Virol. 3096-101 (1987); Fisher et al., 70 J. Virol, 70: 520-32 (1996); Samulski et al., 63 J. Virol. 3822-26 (1989); U.S. Pat. No. 5,252,479 and No. 5,139,941; WO 94/13788; WO 93/24641.

[0520] Another viral vector is a pox virus such as a vaccinia virus, for example an attenuated vaccinia such as Modified Virus Ankara (MVA) or NYVAC, an avipox such as fowl pox or canary pox.

[0521] The tropism of viral vectors can be modified by pseudotyping the vectors with envelope proteins or other surface antigens from other viruses, or by substituting different viral capsid proteins, as appropriate. For example, lentiviral vectors can be pseudotyped with surface proteins from vesicular stomatitis virus (VSV), rabies, Ebola, Mokola, Baculovirus, and the like. Mononegavirales, e.g., VSV or respiratory syncytial virus (RSV) can be pseudotyped with Baculovirus. U.S. Pat. No. 7,041,489. AAV vectors can be made to target different cells by engineering the vectors to express different capsid protein serotypes. See, e.g., Rabinowitz et al., 76 J. Virol. 791-801 (2002).

[0522] In one embodiment, the invention provides compositions containing a RNA effector molecule, as described herein, and an acceptable carrier. The composition containing the RNA effector molecule is useful for enhancing the production of an immunogenic agent by a cell by modulating the expression or activity of a target gene in the cell. Such compositions are formulated based on the mode of delivery. Provided herein are exemplary RNA effector molecules useful in improving the production of an immunogenic agent. In one embodiment, the RNA effector molecule in the composition is a siRNA. Alternatively, the RNA effector molecule in the composition is not a siRNA.

[0523] In another embodiment, a composition is provided herein comprising a plurality of RNA effector molecules that permit inhibition of expression of an immune response pathway and a cellular process; such as INFRA1 or IFNB genes, and PTEN, BAK, FN1 or LDHA genes. The composition can optionally be combined (or administered) with at least one additional RNA effector molecule targeting an additional cellular process including, but not limited to: carbon metabolism and transport, apoptosis, RNAi uptake and/or efficiency, reactive oxygen species production, cell cycle control, protein folding, pyroglutamation protein modification, deamidase, glycosylation, disulfide bond formation, protein secretion, gene amplification, viral replication, viral infection, viral particle release, control of pH, and protein production.

[0524] In one embodiment, the compositions described herein comprise a plurality of RNA effector molecules. In one embodiment of this aspect, each of the plurality of RNA effector molecules is provided at a different concentration. In another embodiment of this aspect, each of the plurality of RNA effector molecules is provided at the same concentration. In another embodiment of this aspect, at least two of the plurality of RNA effector molecules are provided at the same concentration, while at least one other RNA effector molecule in the plurality is provided at a different concentration. It is appreciated one of skill in the art that a variety of combinations of RNA effector molecules and concentrations can be provided to a cell in culture to produce the desired effects described herein.

[0525] In one embodiment, a first RNA effector molecule is administered to a cultured cell, and then a second RNA effector molecule is administered to the cell (or vice versa). In a further embodiment, the first and second RNA effector molecules are administered to a cultured cell substantially simultaneously.

[0526] In another embodiment, a composition containing a RNA effector molecule described herein, e.g., a dsRNA directed against a host cell target gene, is administered to a cultured cell with a non-RNA agent useful for enhancing the production of an immunogenic by the cell.

[0527] The compositions featured herein are administered in amounts sufficient to inhibit expression of target genes. In general, a suitable dose of RNA effector molecule will be in the range of 0.001 to 200.0 milligrams per unit volume per day. In another embodiment, the RNA effector molecule is provided in the range of 0.001 nM to 200 mM per day, generally in the range of 0.1 nM to 500 nM, inclusive. For example, the dsRNA can be administered at 0.01 nM, 0.05 nM, 0.1 nM, 0.5 nM, 0.75 nM, 1 nM, 1.5 nM, 2 nM, 3 nM, 10 nM, 20 nM, 30 nM, 40 nM, 50 nM, 100 nM, 200 nM, 400 nM, or 500 nM per single dose.

[0528] The composition can be administered once daily, or the RNA effector molecule can be administered as two, three, or more sub-doses at appropriate intervals throughout the day or delivery through a controlled release formulation. In that case, the RNA effector molecule contained in each sub-dose must be correspondingly smaller in order to achieve the total daily dosage. The dosage unit can also be compounded for delivery over several days, e.g., using a conventional sustained release formulation, which provides sustained release of the RNA effector molecule over a several-day-period. Sustained release formulations are well known in the art and are particularly useful for delivery of agents to a particular site, such as could be used with the agents of the present invention. It should be noted that when administering a plurality of RNA effector molecules, one should consider that the total dose of RNA effector molecules will be higher than when each is administered alone. For example, administration of three RNA effector molecules each at 1 nM (e.g., for effective inhibition of target gene expression) will necessarily result in a total dose of 3 nM to the cell. One of skill in the art can modify the necessary amount of each RNA effector molecule to produce effective inhibition of each target gene while preventing any unwanted toxic effects to the embryo resulting from high concentrations of either the RNA effector molecules or delivery agent.

[0529] The effect of a single dose on target gene transcript levels can be long-lasting, such that subsequent doses are administered at not more than 3-, 4-, or 5-day intervals, or at not more than 1-, 2-, 3-, or 4-week intervals.

[0530] In one embodiment, the administration of the RNA effector molecule is ceased at least 6 hr, at least 12 hr, at least 18 hr, at least 36 hr, at least 48 hr, at least 60 hr, at least 72 hr, at least 96 hr, or at least 120 hr, or at least 1 week, before isolation of the immunogenic agent. Thus in one embodiment, contacting a host cell (e.g. in a large scale host cell culture) with a RNA effector molecule is complete at least 6 hr, at least 12 hr, at least 18 hr, at least 36 hr, at least 48 hr, at least 60 hr, at least 72 hr, at least 96 hr, or at least 120 hr, or at least 1 week, before isolation of the immunogenic agent.

[0531] It is also noted that, in certain embodiments, it can be beneficial to contact the cells in culture with a RNA effector molecule such that a constant number (or at least a minimum number) of RNA effector molecules per each cell is maintained. Maintaining the levels of the RNA effector molecule as such can ensure that modulation of target gene expression is maintained even at high cell densities.

[0532] Alternatively, the amount of a RNA effector molecule can be administered according to the cell density. In such embodiments, the RNA effector molecule(s) is added at a concentration of at least 0.01 fmol/10⁶ cells, at least 0.1 fmol/10⁶ cells, at least 0.5 fmol/10⁶ cells, at least 0.75 fmol/10⁶ cells, at least 1 fmol/10⁶ cells, at least 2 fmol/10⁶ cells, at least 5 fmol/10⁶ cells, at least 10 fmol/10⁶ cells, at least 20 fmol/10⁶ cells, at least 30 fmol/10⁶ cells, at least 40 fmol/10⁶ cells, at least 50 fmol/10⁶ cells, at least 60 fmol/10⁶ cells, at least 100 fmol/10⁶ cells, at least 200 fmol/10⁶ cells, at least 300 fmol/10⁶ cells, at least 400 fmol/10⁶ cells, at least 500 fmol/10⁶ cells, at least 700 fmol/10⁶ cells, at least 800 fmol/10⁶ cells, at least 900 fmol/10⁶ cells, or at least 1 pmol/10⁶ cells, or more.

[0533] In an alternate embodiment, the RNA effector molecule is administered at a dose of at least 10 molecules per cell, at least 20 molecules per cell (molecules/cell), at least 30 molecules/cell, at least 40 molecules/cell, at least 50 molecules/cell, at least 60 molecules/cell, at least 70 molecules/cell, at least 80 molecules/cell, at least 90 molecules/cell at least 100 molecules/cell, at least 200 molecules/cell, at least 300 molecules/cell, at least 400 molecules/cell, at least 500 molecules/cell, at least 600 molecules/cell, at least 700 molecules/cell, at least 800 molecules/cell, at least 900 molecules/cell, at least 1000 molecules/cell, at least 2000 molecules/cell, at least 5000 molecules/cell or more, inclusive.

[0534] In some embodiments, the RNA effector molecule is administered at a dose within the range of 10-100 molecules/cell, 10-90 molecules/cell, 10-80 molecules/cell, 10-70 molecules/cell, 10-60 molecules/cell, 10-50 molecules/cell, 10-40 molecules/cell, 10-30 molecules/cell, 10-20 molecules/cell, 90-100 molecules/cell, 80-100 molecules/cell, 70-100 molecules/cell, 60-100 molecules/cell, 50-100 molecules/cell, 40-100 molecules/cell, 30-100 molecules/cell, 20-100 molecules/cell, 30-60 molecules/cell, 30-50 molecules/cell, 40-50 molecules/cell, 40-60 molecules/cell, or any range there between.

[0535] In one embodiment of the methods described herein, the RNA effector molecule is provided to the cells in a continuous infusion. The continuous infusion can be initiated at day zero (e.g., the first day of cell culture or day of inoculation with a RNA effector molecule) or can be initiated at any time period during the immunogen production process. Similarly, the continuous infusion can be stopped at any time point during the immunogenic agent production process. Thus, the infusion of a RNA effector molecule or composition can be provided and/or removed at a particular phase of cell growth, a window of time in the production process, or at any other desired time point. The continuous infusion can also be provided to achieve a “desired average percent inhibition” for a target gene, as that term is used herein.

[0536] In one embodiment, a continuous infusion can be used following an initial bolus administration of a RNA effector molecule to a cell culture. In this embodiment, the continuous infusion maintains the concentration of RNA effector molecule above a minimum level over a desired period of time. The continuous infusion can be delivered at a rate of 0.03 pmol/L of culture/hour to 3 pmol/L of culture/hour, for example, at 0.03 pmol/L/hr, 0.05 pmol/L/hr, 0.08 pmol/L/hr, 0.1 pmol/L/hr, 0.2 pmol/L/hr, 0.3 pmol/L/hr, 0.5 pmol/L/hr, 1.0 pmol/L/hr, 2 pmol/L/hr, or 3 pmol/L/hr, or any value there between.

[0537] In one embodiment, the RNA effector molecule is administered as a sterile aqueous solution. In one embodiment, the RNA effector molecule is formulated in a non-lipid formulation. In another embodiment, the RNA effector molecule is formulated in a cationic or non-cationic lipid formulation. In still another embodiment, the RNA effector molecule is formulated in a cell medium suitable for culturing a host cell (e.g., a serum-free medium). In one embodiment, an initial concentration of RNA effector molecule(s) is supplemented with a continuous infusion of the RNA effector molecule to maintain modulation of expression of a target gene. In another embodiment, the RNA effector molecule is applied to cells in culture at a particular stage of cell growth (e.g., early log phase) in a bolus dosage to achieve a certain concentration (e.g., 1 nM), and provided with a continuous infusion of the RNA effector molecule.

[0538] The RNA effector molecule(s) can be administered once daily, or the RNA effector molecule treatment can be repeated (e.g., two, three, or more doses) by adding the composition to the culture medium at appropriate intervals/frequencies throughout the production of the immunogenic agent. As used herein the term “frequency” refers to the interval at which transfection of the cell culture occurs and can be optimized by one of skill in the art to maintain the desired level of inhibition for each target gene. In one embodiment, RNA effector molecules are contacted with cells in culture at a frequency of every 48 hours. In other embodiments, the RNA effector molecules are administered at a frequency of e.g., every 4 hr, every 6 hr, every 12 hr, every 18 hr, every 24 hr, every 36 hr, every 72 hr, every 84 hr, every 96 hr, every 5 days, every 7 days, every 10 days, every 14 days, every 3 weeks, or more during the production of the immunogenic agent. The frequency can also vary, such that the interval between each dose is different (e.g., first interval 36 hr; second interval 48 hr; third interval 72 hr, etc).

[0539] The term “frequency” can be similarly applied to nutrient feeding of a cell culture during the production of an immunogenic agent. The frequency of treatment with RNA effector molecule(s) and nutrient feeding need not be the same. To be clear, nutrients can be added at the time of RNA effector treatment or at an alternate time. The frequency of nutrient feeding can be a shorter interval or a longer interval tha RNA effector molecule treatment. For example, the dose of RNA effector molecule can be applied at a 48-hour-interval while nutrient feeding can be applied at a 24-hour-interval. During the entire length of the interval for producing the immunogenic product (e.g., 3 weeks) there can be more doses of nutrients than RNA effector molecules or less doses of nutrients than RNA effector molecules. Alternatively, the amount of treatments with RNA effector molecule(s) is equal to that of nutrient feedings.

[0540] The frequency of RNA effector molecule treatment can be optimized to maintain an “average percent inhibition” of a particular target gene. As used herein, the term “desired average percent inhibition” refers to the average degree of inhibition of target gene expression over time that is necessary to produce the desired effect and which is below the degree of inhibition that produces any unwanted or negative effects. For example, the desired inhibition of Bax/Bak is typically >80% inhibition to effect a decrease in apoptosis, while the desired average inhibition of LDH can be less (e.g., 70%) as high degrees of LDH average inhibition (e.g., 90%) decrease cell viability. In some embodiments, the desired average percent inhibition is at least 20%, at least 30%, at least 40%, at least 50%, at least 60%, at least 70%, at least 80%, at least 85%, at least 90%, at least 95%, at least 99%, or even 100% (i.e., absent). One of skill in the art can use routine cell death assays to determine the upper limit for desired percent inhibition (e.g., level of inhibition that produces unwanted effects). One of skill in the art can also use methods to detect target gene expression (e.g., PERT) to determine an amount of a RNA effector molecule that produces gene modulation. See Zhang et al., 102 Biotech. Bioeng. 1438-47 (2009). The percent inhibition is described herein as an average value over time, since the amount of inhibition is dynamic and can fluctuate slightly between doses of the RNA effector molecule.

[0541] In one embodiment of the methods described herein, the RNA effector molecule is added to the culture medium of the cells in culture. The methods described herein can be applied to any size of cell culture flask and/or bioreactor. For example, the methods can be applied in bioreactors or cell cultures of 1 L, 3 L, 5 L, 10 L, 15 L, 40 L, 100 L, 500 L, 1000 L, 2000 L, 3000 L, 4000 L, 5000 L or larger. In some embodiments, the cell culture size can range from 0.01 L to 5000 L, from 0.1 L to 5000 L, from 1 L to 5000 L, from 5 L to 5000 L, from 40 L to 5000 L, from 100 L-5000 L, from 500 L to 5000 L, from 1000-5000 L, from 2000-5000 L, from 3000-5000 L, from 4000-5000 L, from 4500-5000 L, from 0.01 L to 1000 L, from 0.01-500 L, from 0.01-100 L, from 0.01-40 L, from 15-2000 L, from 40-1000 L, from 100-500 L, from 200-400 L, or any integer there between.

[0542] The RNA effector molecule(s) can be added during any phase of cell growth including, but not limited to, lag phase, stationary phase, early log phase, mid-log phase, late-log phase, exponential phase, or death phase. It is preferred that the cells are contacted with the RNA effector molecules prior to their entry into the death phase. In some embodiments, such as when targeting an apoptotic pathway, it may be desired to contact the cell in an earlier growth phase such as the lag phase, early log phase, mid-log phase or late-log phase (e.g., Bax/Bak inhibition). In other embodiments, it may be desired or acceptable to inhibit target gene expression at a later phase in the cell growth cycle (e.g., late-log phase or stationary phase), for example when growth-limiting products such as lactate are formed (e.g., LDH inhibition).

[0543] Compositions

[0544] Compositions for enhancing production of an immunogenic agent in cell culture by modulating the expression of a target gene in a host cell are also provided.

[0545] In one embodiment, the invention provides compositions containing a RNA effector molecule, as described herein, and an acceptable carrier. The composition containing the RNA effector molecule is useful for enhancing the production of an immunogenic agent by a cell by modulating the expression or activity of a target gene in the cell. Such compositions are formulated based on the mode of delivery. Provided herein are exemplary RNA effector molecules useful in improving the production of an immunogenic agent. In one embodiment, the RNA effector molecule in the composition is a siRNA. Alternatively, the RNA effector molecule in the composition is not a siRNA.

[0546] The RNA effector molecule compositions of the invention can be formulated as suspension in aqueous, non-aqueous, or mixed media and can be formulated in a lipid or non-lipid formulations, e.g., as described herein (see, e.g., the instant specification under section headings: ligand, lipid/oligonucleotide complexes, emulsions, surfactants, penetration enhancers, and additional carriers).

[0547] In one embodiment, the composition comprises at least one RNA effector molecule and a reagent that facilitates RNA effector molecule uptake, for example, an emulsion, a cationic lipid, a non-cationic lipid, a charged lipid, a liposome, an anionic lipid, a penetration enhancer, a transfection reagent or a modification to the RNA effector molecule for attachment, e.g., a ligand, a targeting moiety, a peptide, a lipophillic group, etc.

[0548] In some embodiments, the RNA effector molecule composition comprises a reagent that facilitates RNA effector molecule uptake which comprises “Lipid H” also known as lipid No. 200, “Lipid K” also known as lipid No. 201 or K8; “Lipid L” also known as lipid No. 202 or L8; “Lipid M” also known as lipid No. 203; “Lipid P” also known as lipid No. 204 or P8; or “Lipid R” also known as lipid No. 205, whose formulas are indicated as follows:

[chemical structure]

[0549] In another embodiment, the composition comprising a RNA effector molecule further comprises a growth medium, e.g. suitable for growth of the host cell. In one embodiment, the growth medium is a chemically defined media such as Biowhittaker® POWERCHO® (Lonza, Basel, Switzerland), HYCLONE PF CHO™ (Thermo Scientific, Fisher Scientific), GISCO®CD DG44 (Invitrogen, Carlsbad, Calif.), Medium M199 (Sigma-Aldrich), OPTIPRO™ SFM (Gibco), etc.). The RNA effector is ideally present in a concentration such that, when reconstituted, provides the optimal formulation.

[0550] In still another embodiment, the RNA effector molecule composition comprises a growth media supplement, e.g. an agent selected from the group consisting of essential amino acids (e.g., glutamine), 2-mercapto-ethanol, bovine serum albumin (BSA), lipid concentrate, cholesterol, catalase, insulin, human transferrin, superoxide dismutase, biotin, DL α-tocopherol acetate, DL α-tocopherol, vitamins (e.g., Vitamin A (acetate), choline chloride, D-calcium pantothenate, folic acid, Nicotinamide, pyridoxal hydrochloride, riboflavin, thiamine hydrochloride, i-Inositol), corticosterone, D-galactose, ethanolamine HCl, glutathione (reduced), L-carnitine HCl, linoleic acid, linolenic acid, progesterone, putrescine 2HCl, sodium selenite, T3 (triodo-1-thyronine), growth factors (e.g., EGF), iron, L-glutamine, L-alanyl-L-glutamine, sodium hypoxanthine, aminopterin and thymidine, arachidonic acid, ethyl Alcohol 100%, myristic acid, oleic acid, palmitic acid, almitoleic acid, pluronic F-68® (Invitrogen, Carlsbad, Calif.), stearic acid 10, TWEEN 80® nonionic surfactant (Invitrogen), sodium pyruvate, and glucose.

[0551] The RNA effector molecule composition can be provided in a sterile solution or lyophilized. In one embodiment the composition is packaged in discrete units by concentration and/or volume, e.g. to supply RNA effector molecule suitable for administration at various frequencies of administration and dosages, e.g. frequencies and dosages described herein.

[0552] In one embodiment, the composition is formulated for administration to cells according to a dosage regimen described herein, e.g., at a frequency of 6 hr, 12 hr, 24 hr, 36 hr, 48 hr, 72 hr, 84 hr, 96 hr, 108 hr, or more. Alternatively the composition is formulated at a dosage for continuous infusion.

[0553] Compositions containing two or more RNA effector molecules directed against separate target genes are also provided. The compositions can be used to enhance production of an immunogenic agent in cell culture by modulating expression of a first target gene and at least a second target gene in the cultured cells. In another embodiment, compositions containing two or more RNA effector molecules directed against the same target gene are provided.

[0554] Lipid/Oligonucleotide Complexes

[0555] In some embodiments, a reagent that facilitates RNA effector molecule uptake comprises a charged lipid, an emulsion, a liposome, a cationic or non-cationic lipid, an anionic lipid, a transfection reagent or a penetration enhancer as described herein. In one embodiment, the reagent that facilitates RNA effector molecule uptake used herein comprises a charged lipid as described in U.S. Application Ser. No. 61/267,419, filed 7 Dec. 2009.

[0556] The oligonucleotides of the present invention can be encapsulated within liposomes or can form complexes thereto, in particular to cationic liposomes. Alternatively, RNA effector molecules can be complexed to lipids, in particular to cationic lipids. Suitable fatty acids and esters include but are not limited to arachidonic acid, oleic acid, eicosanoic acid, lauric acid, caprylic acid, capric acid, myristic acid, palmitic acid, stearic acid, linoleic acid, linolenic acid, dicaprate, tricaprate, monoolein, dilaurin, glyceryl 1-monocaprate, 1-dodecylazacycloheptan-2-one, an acylcarnitine, an acylcholine, or a C1-20 alkyl ester (e.g., isopropylmyristate IPM), monoglyceride, diglyceride, or acceptable salts thereof.

[0557] In one embodiment, the RNA effector molecules are fully encapsulated in the lipid formulation (e.g., to form a SPLP, pSPLP, SNALP, or other nucleic acid-lipid particle). The term “SNALP” refers to a stable nucleic acid-lipid particle: a vesicle of lipids coating a reduced aqueous interior comprising a nucleic acid such as a RNA effector molecule or a plasmid from which a RNA effector molecule is transcribed. SNALPs are described, e.g., in U.S. Patent Pubs. No. 2006/0240093, No. 2007/0135372; No. 2009/0291131; U.S. patent application Ser. No. 12/343,342; No. 12/424,367. The term “SPLP” refers to a nucleic acid-lipid particle comprising plasmid DNA encapsulated within a lipid vesicle. SNALPs and SPLPs typically contain a cationic lipid, a non-cationic lipid, and a lipid that prevents aggregation of the particle (e.g., a PEG-lipid conjugate). SPLPs include “pSPLP,” which include an encapsulated condensing agent-nucleic acid complex as set forth in WO 00/03683. The particles in this embodiment typically have a mean diameter of about 50 nm to about 150 nm, or about 60 nm to about 130 nm, or about 70 nm to about 110 nm, or typically about 70 nm to about 90 nm, inclusive, and are substantially nontoxic. In addition, the nucleic acids when present in the nucleic acid-lipid particles of the present invention are resistant in aqueous solution to degradation with a nuclease. Nucleic acid-lipid particles and their method of preparation are reported in, e.g., U.S. Pat. No. 5,976,567; No. 5,981,501; No. 6,534,484; No. 6,586,410; No. 6,815,432; and WO 96/40964.

[0558] The lipid to drug ratio (mass/mass ratio) (e.g., lipid to dsRNA ratio) can be in ranges of from about 1:1 to about 50:1, from about 1:1 to about 25:1, from about 3:1 to about 15:1, from about 4:1 to about 10:1, from about 5:1 to about 9:1, or about 6:1 to about 9:1, inclusive.

[0559] A cationic lipid of the formulation can comprise at least one protonatable group having a pKa of from 4 to 15. The cationic lipid can be, for example, N,N-dioleyl-N,N-dimethylammonium chloride (DODAC), N,N-distearyl-N,N-dimethylammonium bromide (DDAB), N-(1-(2,3-dioleoyloxy)propyl)-N,N,N-trimethylammonium chloride (DOTAP), N-(I-(2,3-dioleyloxy)propyl)-N,N,N-trimethylammonium chloride (DOTMA), N,N-dimethyl-2,3-dioleyloxy)propylamine (DODMA), 1,2-DiLinoleyloxy-N,N-dimethylaminopropane (DLinDMA), 1,2-Dilinolenyloxy-N,N-dimethylaminopropane (DLenDMA), 1,2-Dilinoleylcarbamoyloxy-3-dimethylaminopropane (DLin-C-DAP), 1,2-Dilinoleyoxy-3-(dimethylamino)acetoxypropane (DLin-DAC), 1,2-Dilinoleyoxy-3-morpholinopropane (DLin-MA), 1,2-Dilinoleoyl-3-dimethylaminopropane (DLinDAP), 1,2-Dilinoleylthio-3-dimethylaminopropane (DLin-S-DMA), 1-Linoleoyl-2-linoleyloxy-3-dimethylaminopropane (DLin-2-DMAP), 1,2-Dilinoleyloxy-3-trimethylaminopropane chloride salt (DLin-TMA.C1), 1,2-Dilinoleoyl-3-trimethylaminopropane chloride salt (DLin-TAP.C1), 1,2-Dilinoleyloxy-3-(N-methylpiperazino)propane (DLin-MPZ), or 3-(N,N-Dilinoleylamino)-1,2-propanediol (DLinAP), 3-(N,N-Dioleylamino)-1,2-propanedio (DOAP), 1,2-Dilinoleyloxo-3-(2-N,N-dimethylamino)ethoxypropane (DLin-EG-DMA), 2,2-Dilinoleyl-4-dimethylaminomethyl-[1,3]-dioxolane (DLin-K-DMA), 2,2-Dilinoleyl-4-dimethylaminoethyl-[1,3]-dioxolane, or a mixture thereof. The cationic lipid can comprise from about 20 mol % to about 70 mol %, inclusive, or about 40 mol % to about 60 mol %, inclusive, of the total lipid present in the particle. In one embodiment, cationic lipid can be further conjugated to a ligand.

[0560] A non-cationic lipid can be an anionic lipid or a neutral lipid, such as distearoyl-phosphatidylcholine (DSPC), dioleoylphosphatidylcholine (DOPC), dipalmitoyl-phosphatidylcholine (DPPC), dioleoylphosphatidylglycerol (DOPG), dipalmitoyl-phosphatidylglycerol (DPPG), dioleoyl-phosphatidylethanolamine (DOPE), palmitoyloleoyl-phosphatidylcholine (POPC), palmitoyloleoyl-phosphatidylethanolamine (POPE), dioleoyl-phosphatidylethanolamine 4-(N-maleimidomethyl)-cyclohexane-1-carboxylate (DOPE-mal), dipalmitoyl phosphatidyl ethanolamine (DPPE), dimyristoylphosphoethanolamine (DMPE), distearoyl-phosphatidyl-ethanolamine (DSPE),16-O-monomethyl PE, 16-O-dimethyl PE, 18-1-trans PE, 1-stearoyl-2-oleoyl-phosphatidyethanolamine (SOPE), cholesterol, or a mixture thereof. The non-cationic lipid can be from about 5 mol % to about 90 mol %, inclusive, of about 10 mol %, to about 58 mol %, inclusive, if cholesterol is included, of the total lipid present in the particle.

[0561] The lipid that inhibits aggregation of particles can be, for example, a polyethyleneglycol (PEG)-lipid including, without limitation, a PEG-diacylglycerol (DAG), a PEG-dialkyloxypropyl (DAA), a PEG-phospholipid, a PEG-ceramide (Cer), or a mixture thereof. The PEG-DAA can be, for example, a PEG-dilauryloxypropyl (C12), a PEG-dimyristyloxypropyl (C14), a PEG-dipalmityloxypropyl (C16), or a PEG-distearyloxypropyl (C18). The lipid that prevents aggregation of particles can be from 0 mol % to about 20 mol % or about 2 mol % of the total lipid present in the particle. In one embodiment, PEG lipid can be further conjugated to a ligand.

[0562] In some embodiments, the nucleic acid-lipid particle further includes a steroid such as, cholesterol at, e.g., about 10 mol % to about 60 mol %, inclusive, or about 48 mol % of the total lipid present in the particle.

[0563] In one embodiment, the lipid particle comprises a steroid, a PEG lipid and a cationic lipid of formula (I):

[chemical structure]

[0564] wherein each Xa and Xb, for each occurrence, is independently C₁₋₆ alkylene;

[0565] n is 0, 1, 2, 3, 4, or 5; each R is independently H,

[chemical structure]

[0566] m is 0, 1, 2, 3 or 4; Y is absent, O, NR², or S; R¹ is alkyl alkenyl or alkynyl; each of which is optionally substituted with one or more substituents; and R² is H, alkyl alkenyl or alkynyl; each of which is optionally substituted each of which is optionally substituted with one or more substituents.

[0567] In one example, the lipidoid ND98.4HCl(MW 1487) (Formula 2), Cholesterol (Sigma-Aldrich), and PEG-Ceramide C16 (Avanti Polar Lipids) can be used to prepare lipid RNA effector molecule nanoparticles (e.g., LNP01 particles). Stock solutions of each in ethanol can be prepared as follows: ND98, 133 mg/mL; Cholesterol, 25 mg/mL; PEG-Ceramide C16, 100 mg/mL. The ND98, Cholesterol, and PEG-Ceramide C16 stock solutions can then be combined, for example, in a 42:48:10 molar ratio. The combined lipid solution can be mixed with aqueous RNA effector molecule (e.g., in sodium acetate pH 5) such that the final ethanol concentration is about 35% to 45% and the final sodium acetate concentration is about 100 mM to 300 mM, inclusive. Lipid RNA effector molecule nanoparticles typically form spontaneously upon mixing. Depending on the desired particle size distribution, the resultant nanoparticle mixture can be extruded through a polycarbonate membrane (e.g., 100 nm cut-off) using, for example, a thermobarrel extruder, such as Lipex Extruder (Northern Lipids, Inc). In some cases, the extrusion step can be omitted. Ethanol removal and simultaneous buffer exchange can be accomplished by, for example, dialysis or tangential flow filtration. Buffer can be exchanged with, for example, phosphate buffered saline (PBS) at about pH 7, e.g., about pH 6.9, about pH 7.0, about pH 7.1, about pH 7.2, about pH 7.3, or about pH 7.4.

[chemical structure]

[0568] LNP01 formulations are described elsewhere, e.g., WO 2008/042973.

[0569] In one embodiment, the reagent that facilitates RNA effector molecule uptake used herein comprises a charged lipid as described in U.S. Application Ser. No. 61/267,419, filed 7 Dec. 2009, and U.S. Application Ser. No. 61/334,398, filed 13 May 2010. In various embodiments, the RNA effector molecule composition described herein comprises “Lipid H” also known as lipid No. 200, “Lipid K” also known as lipid No. 201 or K8; “Lipid L” also known as lipid No. 202 or L8; “Lipid M” also known as lipid No. 203; “Lipid P” also known as lipid No. 204 or P8; or “Lipid R” also known as lipid No. 205, whose formulas are indicated as follows:

[chemical structure]

TABLE 19
Example lipid formulations

| Formulation | Cationic Lipid | Cationic Lipid | DOPE | Cholesterol |
|---|---|---|---|---|
| Number | Number | Mol % | % | % |
| 1 | 200 (Lipid H) | 48.08 | 51.92 | — |
| 2 | 200 (Lipid H) | 47.94 | 47.06 | 5 |
| 3 | 201 (Lipid K) | 45.56 | 54.44 | — |
| 4 (K8) | 201 (Lipid K) | 47.94 | 47.06 | 5 |
| 5 (L8) | 202 (Lipid L) | 47.94 | 47.06 | 5 |
| 6 | 203 (Lipid M) | 53.01 | 44.49 | 2.5 |
| 7 | 203 (Lipid M) | 47.94 | 47.06 | 5 |
| 8 (P8) | 204 (Lipid P) | 47.94 | 47.06 | 5 |
| 9 | 205 (Lipid R) | 47.94 | 47.06 | 5 |

[0570] In another embodiment, the RNA effector molecule composition described herein further comprises a lipid formulation comprising a lipid selected from the group consisting of Lipid H, Lipid K, Lipid L, Lipid M, Lipid P, and Lipid R, and further comprises a neutral lipid and a sterol. In particular embodiments, the lipid formulation comprises between approximately 25 mol %-100 mol % of the lipid. In another embodiment, the lipid formulation comprises between 0 mol %-50 mol % cholesterol. In still another embodiment, the lipid formulation comprises between 30 mol %-65 mol % of a neutral lipid. In particular embodiments, the lipid formulation comprises the relative mol % of the components as listed in Table 20 as follows:

TABLE 20
Example lipid formulae

| Series | Lipid (Mol %) | DOPE | Chol |
|---|---|---|---|
| 1 | 45.56 | 54.44 | 0 |
| 2 | 48.08 | 51.92 | 0 |
| 3 | 50.60 | 49.40 | 0 |
| 4 | 53.10 | 46.90 | 0 |
| 5 | 52.73 | 37.27 | 10 |
| 6 | 52.92 | 42.08 | 5 |
| 7 | 53.01 | 44.49 | 2.5 |
| 8 | 47.94 | 47.06 | 5 |

[0571] Additional exemplary lipid-siRNA formulations are as shown in Table 69, as follows:

TABLE 69
Lipid-siRNA formulations

| | | cationic lipid/non-cationic | |
|---|---|---|---|
| | | lipid/cholesterol/PEG-lipid | |
| | | conjugate | |
| | Cationic Lipid | Lipid:siRNA ratio | Process |
| SNALP | 1,2-Dilinolenyloxy-N,N- | DLinDMA/DPPC/Cholesterol/PEG-cDMA | |
| | dimethylaminopropane (DLinDMA) | (57.1/7.1/34.4/1.4) | |
| | | lipid:siRNA~7:1 | |
| SNALP-XTC | 2,2-Dilinoleyl-4-dimethylaminoethyl-[1,3]- | XTC/DPPC/Cholesterol/PEG-cDMA | |
| | dioxolane (XTC) | 57.1/7.1/34.4/1.4 | |
| | | lipid:siRNA~7:1 | |
| LNP05 | 2,2-Dilinoleyl-4-dimethylaminoethyl-[1,3]- | XTC/DSPC/Cholesterol/PEG-DMG | Extrusion |
| | dioxolane (XTC) | 57.5/7.5/31.5/3.5 | |
| | | lipid:siRNA~6:1 | |
| LNP06 | 2,2-Dilinoleyl-4-dimethylaminoethyl-[1,3]- | XTC/DSPC/Cholesterol/PEG-DMG | Extrusion |
| | dioxolane (XTC) | 57.5/7.5/31.5/3.5 | |
| | | lipid:siRNA~11:1 | |
| LNP07 | 2,2-Dilinoleyl-4-dimethylaminoethyl-[1,3]- | XTC/DSPC/Cholesterol/PEG-DMG | In-line |
| | dioxolane (XTC) | 60/7.5/31/1.5, | mixing |
| | | lipid:siRNA~6:1 | |
| LNP08 | 2,2-Dilinoleyl-4-dimethylaminoethyl-[1,3]- | XTC/DSPC/Cholesterol/PEG-DMG | In-line |
| | dioxolane (XTC) | 60/7.5/31/1.5, | mixing |
| | | lipid:siRNA~11:1 | |
| LNP09 | 2,2-Dilinoleyl-4-dimethylaminoethyl-[1,3]- | XTC/DSPC/Cholesterol/PEG-DMG | In-line |
| | dioxolane (XTC) | 50/10/38.5/1.5 | mixing |
| | | Lipid:siRNA 10:1 | |
| LNP10 | (3aR,5s,6aS)-N,N-dimethyl-2,2-di((9Z,12Z)- | ALN100/DSPC/Cholesterol/PEG-DMG | In-line |
| | octadeca-9,12-dienyl)tetrahydro-3aH- | 50/10/38.5/1.5 | mixing |
| | cyclopenta[d][1,3]dioxol-5-amine (ALN100) | Lipid:siRNA 10:1 | |
| LNP11 | (6Z,9Z,28Z,31Z)-heptatriaconta-6,9,28,31- | MC-3/DSPC/Cholesterol/PEG-DMG | In-line |
| | tetraen-19-yl 4-(dimethylamino)butanoate | 50/10/38.5/1.5 | mixing |
| | (MC3) | Lipid:siRNA 10:1 | |
| LNP12 | 1,1′-(2-(4-(2-((2-(bis(2- | Tech G1/DSPC/Cholesterol/PEG-DMG | In-line |
| | hydroxydodecyl)amino)ethyl)(2- | 50/10/38.5/1.5 | mixing |
| | hydroxydodecyl)amino)ethyl)piperazin-1- | Lipid:siRNA 10:1 | |
| | yl)ethylazanediyl)didodecan-2-ol (Tech G1) | | |

[0572] LNP09 formulations and XTC comprising formulations are described, e.g., in U.S. Provisional Ser. No. 61/239,686, filed Sep. 3, 2009. LNP11 formulations and MC3 comprising formulations are described, e.g., in U.S. Provisional Ser. No. 61/244,834, filed Sep. 22, 2009. LNP12 formulations and TechG1 comprising formulations are described, e.g., in U.S. Provisional Ser. No. 61/175,770, filed May 5, 2009.

[0573] Formulations prepared by either the standard or extrusion-free method can be characterized in similar manners. For example, formulations are typically characterized by visual inspection. They should be whitish translucent solutions free from aggregates or sediment. Particle size and particle size distribution of lipid-nanoparticles can be measured by light scattering using, for example, a Malvern Zetasizer Nano ZS (Malvern, Pa.). Particles should be about 20 nm to 300 nm, such as 40 nm to 100 nm in size. The particle size distribution should be unimodal. The total RNA effector molecule concentration in the formulation, as well as the entrapped fraction, is estimated using a dye exclusion assay. A sample of the formulated RNA effector molecule can be incubated with a RNA-binding dye, such as Ribogreen (Molecular Probes) in the presence or absence of a formulation disrupting surfactant, e.g., 0.5% Triton-X100. The total RNA effector molecule in the formulation can be determined by the signal from the sample containing the surfactant, relative to a standard curve. The entrapped fraction is determined by subtracting the “free” RNA effector molecule content (as measured by the signal in the absence of surfactant) from the total RNA effector molecule content. Percent entrapped RNA effector molecule is typically >85%. For lipid nanoparticle formulation, the particle size is at least 30 nm, at least 40 nm, at least 50 nm, at least 60 nm, at least 70 nm, at least 80 nm, at least 90 nm, at least 100 nm, at least 110 nm, or at least 120 nm. The suitable range is typically about at least 50 nm to about at least 110 nm, about at least 60 nm to about at least 100 nm, or about at least 80 nm to about at least 90 nm, inclusive.

[0574] Liposomes are unilamellar or multilamellar vesicles which have a membrane formed from a lipophilic material and an aqueous interior. The aqueous portion contains the composition to be delivered. Cationic liposomes possess the advantage of being able to fuse to the cell wall. Non-cationic liposomes, although not able to fuse as efficiently with the cell wall, are taken up by macrophages in vivo. In order to cross intact cell membranes, lipid vesicles must pass through a series of fine pores, each with a diameter less than 50 nm, under the influence of a suitable transdermal gradient. Therefore, it is desirable to use a liposome which is highly deformable and able to pass through such fine pores.

[0575] Further advantages of liposomes include: liposomes obtained from natural phospholipids are biocompatible and biodegradable; liposomes can incorporate a wide range of water and lipid soluble drugs; and liposomes can protect encapsulated drugs in their internal compartments from metabolism and degradation. See, e.g., Wang et al., DRUG DELIV. PRINCIPLES & APPL. (John Wiley & Sons, Hoboken, N.J., 2005); Rosoff, 1988. Important considerations in the preparation of liposome formulations are the lipid surface charge, vesicle size and the aqueous volume of the liposomes.

[0576] Liposomes are useful for the transfer and delivery of active ingredients to the site of action. Because the liposomal membrane is structurally similar to biological membranes, when liposomes are applied to a tissue, the liposomes start to merge with the cellular membranes and as the merging of the liposome and cell progresses, the liposomal contents are emptied into the cell where the active agent can act. Liposomal formulations have been the focus of extensive investigation as the mode of delivery for many drugs. There is growing evidence that for topical administration, liposomes present several advantages over other formulations. Such advantages include reduced side-effects related to high systemic absorption of the administered drug, increased accumulation of the administered drug at the desired target, and the ability to administer a wide variety of drugs, both hydrophilic and hydrophobic, into the skin.

[0577] Liposomes fall into two broad classes. Cationic liposomes are positively charged liposomes which interact with the negatively charged polynucleotide molecules to form a stable complex. The positively charged polynucleotide/liposome complex binds to the negatively charged cell surface and is internalized in an endosome. Due to the acidic pH within the endosome, the liposomes are ruptured, releasing their contents into the cell cytoplasm. Wang et al., 147 Biochem. Biophys. Res. Commun, 980-85 (1987).

[0578] Liposomes which are pH-sensitive or negatively-charged, entrap polynucleotide rather than complex with it. Because both the polynucleotide and the lipid are similarly charged, repulsion rather than complex formation occurs. Nevertheless, some polynucleotide is entrapped within the aqueous interior of these liposomes. pH-sensitive liposomes have been used to deliver DNA encoding the thymidine kinase gene to cell monolayers in culture. Expression of the exogenous gene was detected in the target cells. Zhou et al., 19 J. Controlled Rel. 269-74 (1992).

[0579] One major type of liposomal composition includes phospholipids other than naturally-derived phosphatidylcholine. Neutral liposome compositions, for example, can be formed from dimyristoyl phosphatidylcholine (DMPC) or dipalmitoyl phosphatidylcholine (DPPC). Anionic liposome compositions generally are formed from dimyristoyl phosphatidylglycerol, while anionic fusogenic liposomes are formed primarily from dioleoyl phosphatidylethanolamine (DOPE). Another type of liposomal composition is formed from phosphatidylcholine (PC) such as, for example, soybean PC, and egg PC. Another type is formed from mixtures of phospholipid and/or phosphatidylcholine and/or cholesterol.

[0580] Liposomes also include “sterically stabilized” liposomes, a term which, as used herein, refers to liposomes comprising one or more specialized lipids that, when incorporated into liposomes, result in enhanced circulation lifetimes relative to liposomes lacking such specialized lipids. Examples of sterically stabilized liposomes are those in which part of the vesicle-forming lipid portion of the liposome (A) comprises one or more glycolipids, such as monosialoganglioside GM1, or (B) is derivatized with one or more hydrophilic polymers, such as a polyethylene glycol (PEG) moiety. While not wishing to be bound by any particular theory, it is thought in the art that, at least for sterically stabilized liposomes containing gangliosides, sphingomyelin, or PEG-derivatized lipids, the enhanced circulation half-life of these sterically stabilized liposomes derives from a reduced uptake into cells of the reticuloendothelial system (RES). Allen et al., 223 FEBS Lett. 42 (1987); Wu et al., 53 Cancer Res. 3765 (1993).

[0581] Various liposomes comprising one or more glycolipids are known in the art. Papahadjopoulos et al. (507 Ann. N.Y. Acad. Sci. 64 (1987)), reported the ability of monosialoganglioside GM1, galactocerebroside sulfate and phosphatidylinositol to improve blood half-lives of liposomes. These findings were expounded upon by Gabizon et al. (85 PNAS 6949 (1988)). U.S. Pat. No. 4,837,028 and WO 88/04924, both to Allen et al., disclose liposomes comprising (1) sphingomyelin and (2) the ganglioside GM1 or a galactocerebroside sulfate ester. U.S. Pat. No. 5,543,152 (Webb et al.) discloses liposomes comprising sphingomyelin. Liposomes comprising 1,2-sn-dimyristoylphosphatidylcholine are disclosed in WO 97/13499 (Lim et al.).

[0582] Many liposomes comprising lipids derivatized with one or more hydrophilic polymers, and methods of preparation thereof, are known in the art. Sunamoto et al. (53 Bull. Chem. Soc. Jpn. 2778 (1980)) described liposomes comprising a nonionic detergent, 2C1215G, that contains a PEG moiety. Illum et al. (167 FEBS Lett. 79 (1984)), noted that hydrophilic coating of polystyrene particles with polymeric glycols results in significantly enhanced blood half-lives. Synthetic phospholipids modified by the attachment of carboxylic groups of polyalkylene glycols (e.g., PEG) are described by Sears (U.S. Pat. No. 4,426,330 and No. 4,534,899). In addition, antibodies can be conjugated to a polyakylene derivatized liposome (see e.g., U.S. Application Pub. No. 2008/0014255). Klibanov et al. (268 FEBS Lett. 235 (1990)), described experiments demonstrating that liposomes comprising phosphatidylethanolamine (PE) derivatized with PEG or PEG stearate have significant increases in blood circulation half-lives. Blume et al. (1029 Biochim. Biophys. Acta 1029, (1990)), extended such observations to other PEG-derivatized phospholipids, e.g., DSPE-PEG, formed from the combination of distearoylphosphatidylethanolamine (DSPE) and PEG. Liposomes having covalently bound PEG moieties on their external surface are described in European Patent No. 0 445 131 B1 and WO 90/04384 to Fisher.

[0583] Liposome compositions containing 1 mol % to 20 mol % of PE derivatized with PEG, and methods of use thereof, are described by Woodle et al. (U.S. Pat. No. 5,013,556; No. 5,356,633) and Martin et al. (U.S. Pat. No. 5,213,804; European Patent No. 0 496813 B1). Liposomes comprising a number of other lipid-polymer conjugates are disclosed in WO 91/05545 and U.S. Pat. No. 5,225,212 and in WO 94/20073. Liposomes comprising PEG-modified ceramide lipids are described in WO 96/10391. U.S. Pat. No. 5,540,935 and No. 5,556,948 describe PEG-containing liposomes that can be further derivatized with functional moieties on their surfaces. Methods and compositions relating to liposomes comprising PEG can be found in, e.g., U.S. Pat. No. 6,049,094; No. 6,224,903; No. 6,270,806; No. 6,471,326; No. 6,958,241.

[0584] As noted above, liposomes can, optionally, be prepared to contain surface groups, such as antibodies or antibody fragments, small effector molecules for interacting with cell-surface receptors, antigens, and other like compounds, and these groups can facilitate delivery of liposomes and their contents to specific cell populations. Such ligands can be included in the liposomes by including in the liposomal lipids a lipid derivatized with the targeting molecule, or a lipid having a polar-head chemical group that can be derivatized with the targeting molecule in preformed liposomes. Alternatively, a targeting moiety can be inserted into preformed liposomes by incubating the preformed liposomes with a ligand-polymer-lipid conjugate.

[0585] Lipids can be derivatized using a variety of targeting moieties, such as ligands, cell surface receptors, glycoproteins, vitamins (e.g., riboflavin) and monoclonal antibodies by covalently attaching the ligand to the free distal end of a hydrophilic polymer chain, which is attached at its proximal end to a vesicle-forming lipid. There are a wide variety of techniques for attaching a selected hydrophilic polymer to a selected lipid and activating the free, unattached end of the polymer for reaction with a selected ligand, and as noted above, the hydrophilic polymer polyethyleneglycol (PEG) has been studied widely. Allen et al., 1237 Biochem. Biophys. Acta 99-108 (1995); Zalipsky, 4 Bioconj. Chem. 296-99 (1993); Zalipsky et al., 353 FEBS Lett. 1-74 (1994); Zalipsky et al., Bioconj. Chem. 705-08 (1995); Zalipsky, in STEALTH LIPOSOMES (Lasic & Martin, eds. CRC Press, Boca Raton, Fla., 1995).

[0586] A number of liposomes comprising nucleic acids are known in the art, such as methods for encapsulating high molecular weight nucleic acids in liposomes. WO 96/40062. U.S. Pat. No. 5,264,221 to Tagawa et al. discloses protein-bonded liposomes and asserts that the contents of such liposomes can include a dsRNA. U.S. Pat. No. 5,665,710 describes certain methods of encapsulating oligodeoxynucleotides in liposomes. WO 97/04787 refers to liposomes comprising dsRNAs targeted to the raf gene. In addition, methods for preparing a liposome composition comprising a nucleic acid can be found in, e.g., U.S. Pat. No. 6,011,020; No. 6,074,667; No. 6,110,490; No. 6,147,204; No. 6,271,206; No. 6,312,956; No. 6,465,188; No. 6,506,564; No. 6,750,016; No. 7,112,337.

[0587] Transfersomes are yet another type of liposomes, and are highly deformable lipid aggregates which are attractive candidates for drug delivery vehicles. Transfersomes can be described as lipid droplets which are so highly deformable that they are easily able to penetrate through pores which are smaller than the droplet. Transfersomes are adaptable to the environment in which they are used, e.g., they are self-optimizing, self-repairing, frequently reach their targets without fragmenting, and often self-loading. To make transfersomes it is possible to add surface edge-activators, usually surfactants, to a standard liposomal composition.

[0588] Encapsulated nanoparticles can also be used for delivery of RNA effector molecules. Examples of such encapsulated nanoparticles include those created using yeast cell wall particles (YCWP). For example, glucan-encapsulated siRNA particles (GeRPs) are payload delivery systems made up of a yeast cell wall particle (YCWP) exterior and a multilayered nanoparticle interior, wherein the multilayered nanoparticle interior has a core comprising a payload complexed with a trapping agent. Glucan-encapsulated delivery systems, such as those described in U.S. patent application Ser. No. 12/260,998, filed Oct. 29, 2008, can be used to deliver siRNA duplexes to achieve silencing in vitro and in vivo.

[0589] Emulsions

[0590] The compositions of the present invention can be prepared and formulated as emulsions. Emulsions are typically heterogenous systems of one liquid dispersed in another in the form of droplets usually exceeding 0.1 μm in diameter. See, e.g., Ansel's PHARM. DOSAGE FORMS & DRUG DELIV. SYS. (8th ed. Allen et al., eds., Lippincott Williams & Wilkins, NY, 2004); Idson, in 1 PHARM. DOSAGE FORMS 199 (Lieberman et al., eds., Marcel Dekker, Inc., NY, 1988); Rosoff, in 1 PHARM. DOSAGE FORMS 245 (Lieberman et al., eds., Marcel Dekker, Inc., NY, 1988); Block in 2 PHARM. DOSAGE FORMS 335 (Lieberman et al., eds., Marcel Dekker, Inc., NY, 1988); Higuchi et al., in REMINGTON'S PHARM. SCI. 301 (Mack Publishing Co., Easton, Pa., 1985). Emulsions are often biphasic systems comprising two immiscible liquid phases intimately mixed and dispersed with each other.

[0591] In general, emulsions can be of either the water-in-oil (w/o) or the oil-in-water (o/w) variety. When an aqueous phase is finely divided into and dispersed as minute droplets into a bulk oily phase, the resulting composition is called a water-in-oil (w/o) emulsion. Alternatively, when an oily phase is finely divided into and dispersed as minute droplets into a bulk aqueous phase, the resulting composition is called an oil-in-water (o/w) emulsion. Emulsions can contain additional components in addition to the dispersed phases, and the active drug which can be present as a solution in either the aqueous phase, oily phase or itself as a separate phase. Pharmaceutical excipients such as emulsifiers, stabilizers, dyes, and anti-oxidants can also be present in emulsions as needed. Pharmaceutical emulsions can also be multiple emulsions that are comprised of more than two phases such as, for example, in the case of oil-in-water-in-oil (o/w/o) and water-in-oil-in-water (w/o/w) emulsions. Such complex formulations often provide certain advantages that simple binary emulsions do not. Multiple emulsions in which individual oil droplets of an o/w emulsion enclose small water droplets constitute a w/o/w emulsion. Likewise a system of oil droplets enclosed in globules of water stabilized in an oily continuous phase provides an o/w/o emulsion.

[0592] Emulsions are characterized by little or no thermodynamic stability. Often, the dispersed or discontinuous phase of the emulsion is well dispersed into the external or continuous phase and maintained in this form through the means of emulsifiers or the viscosity of the formulation. Either of the phases of the emulsion can be a semisolid or a solid, as is the case of emulsion-style ointment bases and creams. Other means of stabilizing emulsions entail the use of emulsifiers that can be incorporated into either phase of the emulsion. Emulsifiers can broadly be classified into four categories: synthetic surfactants, naturally occurring emulsifiers, absorption bases, and finely dispersed solids. See, e.g., ANSEL'S PHARM. DOSAGE FORMS & DRUG DELIV. SYS., 2004; Idson, in PHARM. DOSAGE FORMS, 1988.

[0593] Synthetic surfactants, also known as surface active agents, have found wide applicability in the formulation of emulsions and have been reviewed in the literature. See, e.g., ANSEL'S PHARM. DOSAGE FORMS & DRUG DELIV. SYS., 2004; Idson, in PHARM. DOSAGE FORMS, 1988; Rieger, in PHARM. DOSAGE FORMS, 1988. Surfactants are typically amphiphilic and comprise a hydrophilic and a hydrophobic portion. The ratio of the hydrophilic to the hydrophobic nature of the surfactant has been termed the hydrophile/lipophile balance (HLB) and is a valuable tool in categorizing and selecting surfactants in the preparation of formulations. Surfactants can be classified into different classes based on the nature of the hydrophilic group: nonionic, anionic, cationic and amphoteric. See, e.g., ANSEL'S PHARM. DOSAGE FORMS & DRUG DELIV. SYS., 2004; Idson, in PHARM. DOSAGE FORMS, 1988; Rieger, in PHARM. DOSAGE FORMS, 1988.

[0594] Naturally occurring emulsifiers used in emulsion formulations include lanolin, beeswax, phosphatides, lecithin and acacia. Absorption bases possess hydrophilic properties such that they can soak up water to form w/o emulsions yet retain their semisolid consistencies, such as anhydrous lanolin and hydrophilic petrolatum. Finely divided solids have also been used as good emulsifiers especially in combination with surfactants and in viscous preparations. These include polar inorganic solids, such as heavy metal hydroxides, nonswelling clays such as bentonite, attapulgite, hectorite, kaolin, montmorillonite, colloidal aluminum silicate and colloidal magnesium aluminum silicate, pigments and nonpolar solids such as carbon or glyceryl tristearate.

[0595] A large variety of non-emulsifying materials are also included in emulsion formulations and contribute to the properties of emulsions. These include fats, oils, waxes, fatty acids, fatty alcohols, fatty esters, humectants, hydrophilic colloids, preservatives and antioxidants. Block, in 1 PHARM. DOSAGE FORMS 335 (Lieberman et al., eds., Marcel Dekker, Inc., NY, 1988); Idson, in PHARM. DOSAGE FORMS (1988).

[0596] Hydrophilic colloids or hydrocolloids include naturally occurring gums and synthetic polymers such as polysaccharides (for example, acacia, agar, alginic acid, carrageenan, guar gum, karaya gum, and tragacanth), cellulose derivatives (for example, carboxymethylcellulose and carboxypropylcellulose), and synthetic polymers (for example, carbomers, cellulose ethers, and carboxyvinyl polymers). These disperse or swell in water to form colloidal solutions that stabilize emulsions by forming strong interfacial films around the dispersed-phase droplets and by increasing the viscosity of the external phase.

[0597] Because emulsions often contain a number of ingredients such as carbohydrates, proteins, sterols and phosphatides that can readily support the growth of microbes, these formulations often incorporate preservatives. Commonly used preservatives included in emulsion formulations include methyl paraben, propyl paraben, quaternary ammonium salts, benzalkonium chloride, esters of p-hydroxybenzoic acid, and boric acid. Antioxidants are also commonly added to emulsion formulations to prevent deterioration of the formulation. Antioxidants used can be free radical scavengers such as tocopherols, alkyl gallates, butylated hydroxyanisole, butylated hydroxytoluene, or reducing agents such as ascorbic acid and sodium metabisulfite, and antioxidant synergists such as citric acid, tartaric acid, and lecithin.

[0598] In one embodiment, the compositions of RNA effector molecules and nucleic acids are formulated as microemulsions. A microemulsion can be defined as a system of water, oil and amphiphile which is a single optically isotropic and thermodynamically stable liquid solution. See, e.g., ANSEL'S PHARM. DOSAGE FORMS & DRUG DELIV. SYS. (8th ed., Allen et al, eds., Lippincott Williams & Wilkins, NY, 2004); Rosoff, in PHARM. DOSAGE FORMS, 1988. Typically, microemulsions are systems that are prepared by first dispersing an oil in an aqueous surfactant solution and then adding a sufficient amount of a fourth component, generally an intermediate chain-length alcohol to form a transparent system. Therefore, microemulsions have also been described as thermodynamically stable, isotropically clear dispersions of two immiscible liquids that are stabilized by interfacial films of surface-active molecules. Leung & Shah, in CONTROLLED RELEASE DRUGS: POLYMERS & AGGREGATE SYS. 185-215 (Rosoff, ed., VCH Publishers, NY, 1989). Microemulsions commonly are prepared via a combination of three to five components that include oil, water, surfactant, cosurfactant and electrolyte. Whether the microemulsion is of the water-in-oil (w/o) or an oil-in-water (o/w) type is dependent on the properties of the oil and surfactant used and on the structure and geometric packing of the polar heads and hydrocarbon tails of the surfactant molecules. Schott, in REMINGTON'S PHARM. SCI. 271 (1985).

[0599] The phenomenological approach utilizing phase diagrams has been extensively studied and has yielded a comprehensive knowledge, to one skilled in the art, of how to formulate microemulsions. See, e.g., ANSEL'S PHARM. DOSAGE FORMS & DRUG DELIV. SYS. (8th ed., Allen et al, eds., Lippincott Williams & Wilkins, NY, 2004); Rosoff, 1988; Block, 1988. Compared to conventional emulsions, microemulsions offer the advantage of solubilizing water-insoluble drugs in a formulation of thermodynamically stable droplets that are formed spontaneously.

[0600] Microemulsions can include surfactants, discussed further herein, not limited to ionic surfactants, non-ionic surfactants, Brij 96, polyoxyethylene oleyl ethers, polyglycerol fatty acid esters, tetraglycerol monolaurate (ML310), tetraglycerol monooleate (M0310), hexaglycerol monooleate (PO310), hexaglycerol pentaoleate (PO500), decaglycerol monocaprate (MCA750), decaglycerol monooleate (M0750), decaglycerol sequioleate (SO750), decaglycerol decaoleate (DA0750), alone or in combination with cosurfactants. The cosurfactant, usually a short-chain alcohol such as ethanol, 1-propanol, and 1-butanol, serves to increase the interfacial fluidity by penetrating into the surfactant film and consequently creating a disordered film because of the void space generated among surfactant molecules. Microemulsions can, however, be prepared without the use of cosurfactants and alcohol-free self-emulsifying microemulsion systems are known in the art. The aqueous phase can typically be, but is not limited to, water, an aqueous solution of the drug, glycerol, PEG300, PEG400, polyglycerols, propylene glycols, and derivatives of ethylene glycol. The oil phase can include, but is not limited to, materials such as Captex 300, Captex 355, Capmul MCM, fatty acid esters, medium chain (C8-C12) mono, di, and tri-glycerides, polyoxyethylated glyceryl fatty acid esters, fatty alcohols, polyglycolized glycerides, saturated polyglycolized C8-C10 glycerides, vegetable oils and silicone oil.

[0601] Microemulsions afford advantages of better drug solubilization, protection of drug from enzymatic hydrolysis, possible enhancement of drug absorption due to surfactant-induced alterations in membrane fluidity and permeability, ease of preparation, and decreased toxicity. See, e.g., U.S. Pat. No. 6,191,105; No. 7,063,860; No. 7,070,802; No. 7,157,099; Constantinides et al., 11 Pharm. Res. 1385 (1994); Ho et al., 85 J. Pharm. Sci. 138-43 (1996). Often, microemulsions can form spontaneously when their components are brought together at ambient temperature. This can be particularly advantageous when formulating thermolabile drugs, peptides or RNA effector molecules.

[0602] Microemulsions of the present invention can also contain additional components and additives such as sorbitan monostearate (Grill 3), Labrasol, and penetration enhancers to improve the properties of the formulation and to enhance the absorption of the RNA effector molecules and nucleic acids of the present invention. Penetration enhancers used in the microemulsions of the present invention can be classified as belonging to one of five broad categories—surfactants, fatty acids, bile salts, chelating agents, and non-chelating non-surfactants. Lee et al., Crit. Rev. Therapeutic Drug Carrier Sys. 92 (1991).

[0603] There are many organized surfactant structures besides microemulsions that have been studied and used for the formulation of drugs. These include monolayers, micelles, bilayers and vesicles. Vesicles, such as liposomes, have attracted great interest because of their specificity and the duration of action they offer from the standpoint of drug delivery. As used in the present invention, the term “liposome” means a vesicle composed of amphiphilic lipids arranged in a spherical bilayer or bilayers.

[0604] Surfactants

[0605] In some embodiments, RNA effector molecules featured in the invention are formulated in conjunction with one or more penetration enhancers, surfactants and/or chelators. Suitable surfactants include fatty acids and/or esters or salts thereof, bile acids and/or salts thereof. Suitable bile acids/salts include chenodeoxycholic acid (CDCA) and ursodeoxychenodeoxy-cholic acid (UDCA), cholic acid, dehydrocholic acid, deoxycholic acid, glucholic acid, glycholic acid, glycodeoxycholic acid, taurocholic acid, taurodeoxycholic acid, sodium tauro-24,25-dihydro-fusidate and sodium glycodihydrofusidate. Suitable fatty acids include arachidonic acid, undecanoic acid, oleic acid, lauric acid, caprylic acid, capric acid, myristic acid, palmitic acid, stearic acid, linoleic acid, linolenic acid, dicaprate, tricaprate, monoolein, dilaurin, glyceryl 1-monocaprate, 1-dodecylazacycloheptan-2-one, an acylcarnitine, an acylcholine, or a monoglyceride, a diglyceride or a pharmaceutically acceptable salt thereof (e.g., sodium). In some embodiments, combinations of penetration enhancers are used, for example, fatty acids/salts in combination with bile acids/salts. One exemplary combination is the sodium salt of lauric acid, capric acid and UDCA. Further penetration enhancers include polyoxyethylene-9-lauryl ether, polyoxyethylene-20-cetyl ether.

[0606] Surfactants find wide application in formulations such as emulsions (including microemulsions) and liposomes. The most common way of classifying and ranking the properties of the many different types of surfactants, both natural and synthetic, is by the use of the hydrophile/lipophile balance (HLB). The nature of the hydrophilic group (also known as the “head”) provides the most useful means for categorizing the different surfactants used in formulations. See e.g., Malmsten, SURFACTANTS & POLYMERS IN DRUG DELIV. (Informa Health Care, NY, 2002); Rieger, in PHARM. DOSAGE FORMS 285 (Marcel Dekker, Inc., NY, 1988).

[0607] If the surfactant molecule is not ionized, it is classified as a nonionic surfactant. Nonionic surfactants find wide application in pharmaceutical and cosmetic products and are usable over a wide range of pH values. In general their HLB values range from 2 to about 18 depending on their structure. Nonionic surfactants include nonionic esters such as ethylene glycol esters, propylene glycol esters, glyceryl esters, polyglyceryl esters, sorbitan esters, sucrose esters, and ethoxylated esters. Nonionic alkanolamides and ethers such as fatty alcohol ethoxylates, propoxylated alcohols, and ethoxylated/propoxylated block polymers are also included in this class. The polyoxyethylene surfactants are the most popular members of the nonionic surfactant class.

[0608] If the surfactant molecule carries a negative charge when it is dissolved or dispersed in water, the surfactant is classified as anionic. Anionic surfactants include carboxylates such as soaps, acyl lactylates, acyl amides of amino acids, esters of sulfuric acid such as alkyl sulfates and ethoxylated alkyl sulfates, sulfonates such as alkyl benzene sulfonates, acyl isethionates, acyl taurates and sulfosuccinates, and phosphates. The most important members of the anionic surfactant class are the alkyl sulfates and the soaps.

[0609] If the surfactant molecule carries a positive charge when it is dissolved or dispersed in water, the surfactant is classified as cationic. Cationic surfactants include quaternary ammonium salts and ethoxylated amines. The quaternary ammonium salts are the most used members of this class. If the surfactant molecule has the ability to carry either a positive or negative charge, the surfactant is classified as amphoteric. Amphoteric surfactants include acrylic acid derivatives, substituted alkylamides, N-alkylbetaines and phosphatides.

[0610] Penetration Enhancers

[0611] In one embodiment, the present invention employs various penetration enhancers to effect the efficient delivery of nucleic acids, particularly RNA effector molecules, to the cell. Most drugs are present in solution in both ionized and nonionized forms. Usually, only lipid soluble or lipophilic drugs readily cross cell membranes. It has been discovered that even non-lipophilic drugs can cross cell membranes if the membrane to be crossed is treated with a penetration enhancer. In addition to aiding the diffusion of non-lipophilic drugs across cell membranes, penetration enhancers also enhance the permeability of lipophilic drugs.

[0612] Penetration enhancers can be classified as belonging to one of five broad categories: surfactants, fatty acids, bile salts, chelating agents, and non-chelating non-surfactants. See, e.g., Malmsten, 2002; Lee et al., Crit. Rev. Therapeutic Drug Carrier Sys. 92 (1991).

[0613] In connection with the present invention, penetration enhancers include surfactants (or “surface-active agents”), which are chemical entities that, when dissolved in an aqueous solution, reduce the surface tension of the solution or the interfacial tension between the aqueous solution and another liquid, with the result that absorption of RNA effector molecules through cellular membranes and other biological barriers is enhanced. In addition to bile salts and fatty acids, these penetration enhancers include, for example, sodium lauryl sulfate, polyoxyethylene-9-lauryl ether and polyoxyethylene-20-cetyl ether) (see, e.g., Malmsten, 2002; Lee et al., 1991); and perfluorochemical emulsions, such as FC-43 (Takahashi et al., 40 J. Pharm. Pharmacol. 252 (1988)).

[0614] Various fatty acids and their derivatives which act as penetration enhancers include, for example, oleic acid, lauric acid, capric acid (n-decanoic acid), myristic acid, palmitic acid, stearic acid, linoleic acid, linolenic acid, dicaprate, tricaprate, monoolein (1-monooleoyl-rac-glycerol), dilaurin, caprylic acid, arachidonic acid, glycerol 1-monocaprate, 1-dodecylazacyclo-heptan-2-one, acylcarnitines, acylcholines, C1-20 alkyl esters thereof (e.g., methyl, isopropyl and t-butyl), and mono- and di-glycerides thereof (i.e., oleate, laurate, caprate, myristate, palmitate, stearate, linoleate, etc.). See, e.g., Touitou et al., ENHANCEMENT IN DRUG DELIV. (CRC Press, Danvers, Mass., 2006); Lee et al., 1991; Muranishi, 7 Crit. Rev. Therapeutic Drug Carrier Sys. 1-33 (1990); E1 Hariri et al., 44 J. Pharm. Pharmacol. 651-54 (1992).

[0615] The physiological role of bile includes the facilitation of dispersion and absorption of lipids and fat-soluble vitamins. See, e.g., Malmsten, 2002; Brunton, Chapt. 38 in GOODMAN & GILMAN'S PHARMACOLOGICAL BASIS THERAPEUTICS, 9TH ED. 934-35 (Hardman et al., eds., McGraw-Hill, NY, 1996). Various natural bile salts, and their synthetic derivatives, act as penetration enhancers. Thus the term “bile salts” includes any of the naturally occurring components of bile as well as any of their synthetic derivatives. Suitable bile salts include, for example, cholic acid (or its pharmaceutically acceptable sodium salt, sodium cholate), dehydrocholic acid (sodium dehydrocholate), deoxycholic acid (sodium deoxycholate), glucholic acid (sodium glucholate), glycholic acid (sodium glycocholate), glycodeoxycholic acid (sodium glycodeoxycholate), taurocholic acid (sodium taurocholate), taurodeoxycholic acid (sodium taurodeoxycholate), chenodeoxycholic acid (sodium chenodeoxycholate), ursodeoxycholic acid (UDCA), sodium tauro-24,25-dihydro-fusidate (STDHF), sodium glycodihydrofusidate and polyoxyethylene-9-lauryl ether (POE) (see e.g., Malmsten, 2002; Lee et al., 1991; Swinyard, Chapt. 39 in REMINGTON'S PHARM. SCI., 18th Ed. 782-83 (Gennaro, ed., Mack Publishing Co., Easton, Pa., 1990); Muranishi, 1990; Yamamoto et al., 263 J. Pharm. Exp. Ther. 25 (1992); Yamashita et al., 79 J. Pharm. Sci. 579-83 (1990).

[0616] Chelating agents, as used in connection with the present invention, can be defined as compounds that remove metallic ions from solution by forming complexes therewith, with the result that absorption of RNA effector molecules through the mucosa is enhanced. With regards to their use as penetration enhancers in the present invention, chelating agents have the added advantage of also serving as DNase inhibitors, as most characterized DNA nucleases require a divalent metal ion for catalysis and are thus inhibited by chelating agents. Jarrett, 618 J. Chromatogr. 315-39 (1993). Suitable chelating agents include but are not limited to disodium ethylenediaminetetraacetate (EDTA), citric acid, salicylates (e.g., sodium salicylate, 5-methoxysalicylate and homovanilate), N-acyl derivatives of collagen, laureth-9 and N-amino acyl derivatives of beta-diketones (enamines). See, e.g., Katdare et al., EXCIPIENT DEVEL. PHARM. BIOTECH. & DRUG DELIV. (CRC Press, Danvers, Mass., 2006); Lee et al., 1991; Muranishi, 1990; Buur et al., 14 J. Control Rel. 43-51 (1990).

[0617] As used herein, non-chelating non-surfactant penetration enhancing compounds can be defined as compounds that demonstrate insignificant activity as chelating agents or as surfactants but that nonetheless enhance absorption of RNA effector molecules through the alimentary mucosa. See e.g., Muranishi, 1990. This class of penetration enhancers include, for example, unsaturated cyclic ureas, 1-alkyl- and 1-alkenylazacyclo-alkanone derivatives (Lee et al., 1991); and non-steroidal anti-inflammatory agents such as diclofenac sodium, indomethacin and phenylbutazone (Yamashita et al., 1987).

[0618] Agents that enhance uptake of RNA effector molecules at the cellular level can also be added to the pharmaceutical and other compositions of the present invention. For example, cationic lipids, such as lipofectin (U.S. Pat. No. 5,705,188), cationic glycerol derivatives, and polycationic molecules, such as polylysine (WO 97/30731), are also known to enhance the cellular uptake of dsRNAs. Examples of commercially available transfection reagents include, for example LIPOFECTAMINE™, LIPOFECTAMINE 2000™, 293FECTIN™, CELLFECTIN™, DMRIE-C™, FREESTYLE™ MAX, LIPOFECTAMINE™2000 CD, LIPOFECTAMINE™, RNAiMAX, OLIGOFECTAMINE™, and OPTIFECT™ transfection reagents (each from Invitrogen); and X-tremeGENE Q2 Transfection Reagent (Roche Applied Science; Grenzacherstrasse, Switzerland), DOTAP Liposomal Transfection Reagent (Avante Polar Lipids, Inc., Alabaster, Ala.), DOSPER Liposomal Transfection Reagent (Roche), or FuGENE® (Promega; Madison, Wis.) or TRANSFECTAM® Reagent (Promega), TRANSFAST™ Transfection Reagent (Promega), TFX™-20 Reagent (Promega), TFX™-50 Reagent (Promega); DREAMFECT™ (OZ Biosciences; Marseille, France), EcoTransfect (OZ Biosciences); TRANSPASS® D1 Transfection Reagent (New England Biolabs; Ipswich, Mass.); LYOVEC™/LIPOGENT™ (InvivoGen; San Diego, Calif.); PerFectin Transfection Reagent (Genlantis; San Diego, Calif.), NEUROPORTER Transfection Reagent (Genlantis), GENEPORTER Transfection reagent (Genlanti), GENEPORTER 2 Transfection reagent (Genlantis), CYTOFECTIN Transfection Reagent (Genlantis), BACULOPORTER Transfection Reagent (Genlantis), TROGANPORTER™ transfection reagent (Genlantis); RIBOFECT (Bioline; Taunton, Mass., U.S.), PLASFECT (Bioline), UNIFECTOR (B-Bridge International; Mountain View, Calif.), SUREFECTOR (B-Bridge International), or HIFECT™ (B-Bridge Int'l), among others.

[0619] Additional Carriers

[0620] Other agents can be utilized to enhance the penetration of the administered nucleic acids, including glycols such as ethylene glycol and propylene glycol, pyrrols such as 2-pyrrol, azones, and terpenes such as limonene and menthone.

[0621] Certain compositions of the present invention also incorporate carrier compounds in the formulation. As used herein, “carrier compound” or “carrier” can refer to a nucleic acid, or analog thereof, which is inert (i.e., does not possess biological activity per se) but is recognized as a nucleic acid by in vivo processes that reduce the bioavailability of a nucleic acid having biological activity by, for example, degrading the biologically active nucleic acid or promoting its removal.

[0622] The compositions of the present invention can additionally contain other adjunct components so long as such materials, when added, do not unduly interfere with the biological activities of the components of the compositions of the present invention. The formulations can be sterilized and, if desired, mixed with auxiliary agents that do not deleteriously interact with the RNA effector molecules of the formulation.

[0623] Aqueous suspensions can contain substances which increase the viscosity of the suspension including, for example, sodium carboxymethylcellulose, sorbitol and/or dextran. The suspension can also contain stabilizers.

[0624] Toxicity and therapeutic efficacy of such compounds can be determined by standard pharmaceutical procedures in cell cultures or in cells, e.g., for determining the LD₅₀ (the dose lethal to 50% of the population) and the ED₅₀ (the dose therapeutically effective in 50% of the population). The dose ratio between toxic and therapeutic effects is the therapeutic index and it can be expressed as the ratio LD₅₀/ED₅₀. Compounds that exhibit high therapeutic indices are particularly useful. The data obtained from cell culture assays and animal studies can be used in formulating a range of dosages for use in the instant methods. The dosage of compositions featured in the invention lies generally within a range of concentrations that includes the ED₅₀ with little or no toxicity. The dosage can vary within this range depending upon the dosage form employed and the route of administration utilized.

[0625] In yet another aspect, the invention provides a method for inhibiting the expression of a target gene in a host cell by administering a composition featured in the invention to the host cell such that expression of the target gene is decreased for an extended duration, e.g., at least two, three, four days or more, e.g., one week, two weeks, three weeks, or four weeks or longer. The effect of the decreased expression of the target gene preferably results in a decrease in levels of the protein encoded by the target gene by at least 10%, at least 15%, at least 20%, at least 25%, at least 30%, at least 40%, at least 50%, or at least 60%, or more, as compared to pretreatment levels.

### VII. KITS AND ASSAYS

[0626] In some embodiments, kits are provided for testing the effect of a RNA effector molecule or a series of RNA effector molecules on the production of an immunogenic agent by the cell, where the kits comprise a substrate having one or more assay surfaces suitable for culturing cells under conditions that allow production of an immunogenic agent. In some embodiments, the exterior of the substrate comprises wells, indentations, demarcations, or the like at positions corresponding to the assay surfaces. In some embodiments, the wells, indentations, demarcations, or the like retain fluid, such as cell culture media, over the assay surfaces.

[0627] In some embodiments, the assay surfaces on the substrate are sterile and are suitable for culturing host cells under conditions representative of the culture conditions during large-scale (e.g., industrial scale) production of the immunogenic agent. Advantageously, kits provided herein offer a rapid, cost-effective means for testing a wide-range of agents and/or conditions on the production of an immunogenic agent, allowing the cell culture conditions to be established prior to full-scale production of the immunogenic agent.

[0628] In some embodiments, one or more assay surfaces of the substrate comprise a concentrated test agent, such as a RNA effector molecule, such that the addition of suitable media to the assay surfaces results in a desired concentration of the RNA effector molecule surrounding the assay surface. In some embodiments, the RNA effector molecules can be printed or ingrained onto the assay surface, or provided in a lyophilized form, e.g., within wells, such that the effector molecules can be reconstituted upon addition of an appropriate amount of media. In some embodiments, the RNA effector molecules are reconstituted by plating cells onto assay surfaces of the substrate.

[0629] In some embodiments, kits provided herein further comprise cell culture media suitable for culturing a cell under conditions allowing for the production of an immunogenic agent of interest. The media can be in a ready to use form or can be concentrated (e.g., as a stock solution), lyophilized, or provided in another reconstitutable form.

[0630] In further embodiments, kits provided herein further comprise one or more reagents suitable for detecting production of the immunogenic agent by the cell, cell culture, or tissue culture. In further embodiments, the reagent(s) are suitable for detecting a property of the cell, such as maximum cell density, cell viability, or the like, which is indicative of production of the desired immunogenic agent. In some embodiments, the reagent(s) are suitable for detecting the immunogenic agent or a property thereof, such as the in vitro or in vivo biological activity, homogeneity, or structure of the immunogenic agent.

[0631] In some embodiments, one or more assay surfaces of the substrate further comprise a carrier for which facilitates uptake of RNA effector molecules by cells. Carriers for RNA effector molecules are known in the art and are described herein. For example, in some embodiments, the carrier is a lipid formulation such as LIPOFECTAMINE™ transfection reagent (Invitrogen; Carlsbad, Calif.) or a related formulation. Examples of such carrier formulations are described herein. In some embodiments, the reagent that facilitates RNA effector molecule uptake comprises a charged lipid, an emulsion, a liposome, a cationic or non-cationic lipid, an anionic lipid, a transfection reagent or a penetration enhancer as described throughout the application herein. In particular embodiments, the reagent that facilitates RNA effector molecule uptake comprises a charged lipid as described in U.S. Application Ser. No. 61/267,419, filed on Dec. 7, 2009.

[0632] In some embodiments, one or more assay surfaces of the substrate comprise a RNA effector molecule or series of RNA effector molecules and a carrier, each in concentrated form, such that plating test cells onto the assay surface(s) results in a concentration the RNA effector molecule(s) and the carrier effective for facilitating uptake of the RNA effector molecule(s) by the cells and modulation of the expression of one or more genes targeted by the RNA effector molecules.

[0633] In some embodiments, the substrate further comprises a matrix which facilitates 3-dimensional (3-D) cell growth and/or production of the immunogenic agent by the cells. In further embodiments, the matrix facilitates anchorage-dependent growth of cells. Non-limiting examples of matrix materials suitable for use with various kits described herein include agar, agarose, methylcellulose, alginate hydrogel (e.g., 5% alginate+5% collagen type I), chitosan, hydroactive hydrocolloid polymer gels, polyvinyl alcohol-hydrogel (PVA-H), polylactide-co-glycolide (PLGA), collagen vitrigel, PHEMA (poly(2-hydroxylmethacrylate)) hydrogels, PVP/PEO hydrogels, BD PURAMATRIX™ hydrogels, and copolymers of 2-methacryloyloxyethyl phosphorylcholine (MPC).

[0634] In some embodiments, the substrate comprises a microarray plate, a biochip, or the like which allows for the high-throughput, automated testing of a range of test agents, conditions, and/or combinations thereof on the production of an immunogenic agent by cultured cells. For example, the substrate can comprise a 2-dimensional microarray plate or biochip having m columns and n rows of assay surfaces (e.g., residing within wells) which allow for the testing of m×n combinations of test agents and/or conditions (e.g., on a 24, 96 or 384-well microarray plate). The microarray substrates are preferably designed such that all necessary positive and negative controls can be carried out in parallel with testing of the agents and/or conditions.

[0635] In further embodiments, kits are provided comprising one or more microarray substrates seeded with a set of RNA effector molecules designed to modulate a particular pathway, function, or property of a cell which affects the production of the immunogenic agent. For example, in some embodiments, the RNA effector molecules are directed against target genes comprising a pathway involved in the expression, folding, secretion, or post-translational modification of a recombinant immunogenic agent by the cell.

[0636] In further embodiments, kits are provided herein comprising one or more microarray substrates seeded with a set of RNA effector molecules designed to address a particular problem or class of problems associated with the production of an immunogenic agent in cell-based systems. For example, in some embodiments, the RNA effector molecules are directed against target genes expressed by latent or endogenous viruses; or involved in cell processes, such as cell cycle progression, cell metabolism or apoptosis which inhibit or interfere production or purification of the immunogenic agent. In further embodiments, the RNA effector molecules are directed against target genes that mediate enzymatic degradation, aggregation, misfolding, or other processes that reduce the activity, homogeneity, stability, and/or other qualities of the immunogenic agent. In yet further embodiments, the effector molecules are directed against target genes that affect the infectivity of exogenous or adventitious contaminating microbes. In one embodiment, the immunogenic agent includes a glycoprotein, and the RNA effector molecules are directed against target genes involved in glycosylation (e.g., fucosylation) and/or proteolytic processing of glycoproteins by the host cell. In another embodiment, the immunogenic agent is a multi-subunit recombinant protein and the RNA effector molecules are directed against target genes involved in the folding and/or secretion of the protein by the host cell. In another embodiment, the RNA effector molecules are directed against target genes involved in post-translation modification of the immunogenic agent in the cells, such as methionine oxidation, glycosylation, disulfide bond formation, pyroglutamation and/or protein deamidation.

[0637] In some embodiments, kits provided herein allow for the selection or optimization of a combination o two or more factors in production of the immunogenic agent. For example, the kits can allow for the selection of a suitable RNA effector molecule from among a series of candidate RNA effector molecules as well as a concentration of the RNA effector molecule. In further embodiments, kits provided herein allow for the selection of a first RNA effector molecule from a first series of candidate RNA effector molecules and a second RNA effector molecule from a second series of candidate RNA effector molecules. In some embodiments, the first and/or second series of candidate RNA effector molecules are directed against a common target gene. In further embodiments, the first and/or second series of RNA effector molecules are directed against two or more functionally related target genes or two or more target genes of a common host cell pathway.

[0638] In another embodiment, a kit for enhancing production of an immunogenic agent in a cell, comprising at least a first RNA effector molecule, a portion of which is complementary to at least a first target gene of a latent or endogenous virus; a second RNA effector molecule, a portion of which is complementary to at least a secon target gene of the cellular immune response; and, optionally, a third RNA effector molecule, a portion of which is complementary to at least a third target gene of a cellular process. For example, the first target gene is an ERV env gene, the second target gene is a IFNAR1 or IFNB gene, and the third target gene is a PTEN, BAK1, FN1, or LDHA gene. The kit can further comprise at least additional RNA effector molecule that targets a cellular process including, but not limited to, carbon metabolism and transport, apoptosis, RNAi uptake and/or efficiency, reactive oxygen species production, cell cycle control, protein folding, pyroglutamation protein modification, deamidase, glycosylation, disulfide bond formation, protein secretion, gene amplification, viral replication, viral infection, viral particle release, control of cellular pH, and protein production.

[0639] In yet another aspect, the invention provides a method for inhibiting the expression of a target gene in a cell. The method includes administering a composition featured in the invention to the cell such that expression of the target gene is decreased, such as for an extended duration, e.g., at least two, three, four days or more. The RNA effector molecules useful for the methods and compositions featured in the invention specifically target RNAs (primary or processed) of the target gene. Compositions and methods for inhibiting the expression of these target genes using RNA effector molecules can be prepared and performed as described herein.

[0640] The present invention may be as defined in any one of the following numbered paragraphs:

[0641] 1. A method for producing an immunogenic agent in a large scale host cell culture, comprising: (a) contacting a host cell in a large scale host cell culture with at least a first RNA effector molecule, a portion of which is complementary to at least one target gene of a host cell, (b) maintaining the host cell culture for a time sufficient to modulate expression of the at least one first target gene, wherein the modulation of expression improves production of an immunogenic agent in the host cell; (c) isolating the immunogenic agent from the host cell; wherein the large scale host cell culture is at least 1 Liter in size, and wherein the host cell is contacted with at least a first RNA effector molecule by addition of the RNA effector molecule to a culture medium of the large scale host cell culture such that the target gene expression is transiently inhibited.

[0642] 2. A method for producing an immunogenic agent in a large scale host cell culture, comprising: (a) contacting a host cell in a large scale host cell culture with at least a first RNA effector molecule, a portion of which is complementary to at least one target gene of a host cell; (b) maintaining the host cell culture for a time sufficient to modulate expression of the at least one first target gene, wherein the modulation of expression improves production of an immunogenic agent in the host cell; (c) isolating the immunogenic agent from the host cell; wherein the host cell is contacted with at least a first RNA effector molecule by addition of the RNA effector molecule to a culture medium of the large scale host cell culture multiple times throughout production of the immunogenic agent such that the target gene expression is transiently inhibited.

[0643] 3. The method of paragraph 1 or 2, wherein the host cell in the large scale host cell culture is contacted with a plurality of RNA effector molecules, wherein the plurality of RNA effector molecules modulate expression of at least one target gene, at least two target genes, or a plurality of target genes.

[0644] 4. A method for production of an immunogenic agent in a cell, the method comprising: (a) contacting a host cell with a plurality of RNA effector molecules, wherein the two or more RNA effector molecules modulate expression of a plurality of target genes; (b) maintaining the cell for a time sufficient to modulate expression of the plurality of target genes, wherein the modulation of expression improves production of the immunogenic agent in the cell; and (c) isolating the immunogenic agent from the cell, wherein the plurality of target genes comprises at least Bax, Bak, and LDH.

[0645] 5. The method of paragraph 4, wherein the host cell is contacted with the plurality of RNA effector molecules by addition of the RNA effector molecule to a culture medium of the large scale host cell culture such that the target gene expression is transiently inhibited.

[0646] 6. The method of paragraphs 1 to 5, wherein the RNA effector molecule, or plurality of RNA effector molecules, comprises a double-stranded ribonucleic acid (dsRNA), wherein said dsRNA comprises at least two sequences that are complementary to each other and wherein a sense strand comprises a first sequence and an antisense strand comprises a second sequence comprising a region of complementarity which is substantially complementary to at least part of a target gene, and wherein said region of complementarity is 10-30 nucleotides in length.

[0647] 7. The method of any of paragraphs 1 to 6, wherein the contacting step is performed by continuous infusion of the RNA effector molecule, or plurality of RNA effector molecules, into the culture medium used for maintaining the host cell culture to produce the immunogenic agent.

[0648] 8. The method of any of paragraphs 1 to 7, wherein the modulation of expression is inhibition of expression, and wherein the inhibition is a partial inhibition.

[0649] 9. The method of paragraph 7, wherein the partial inhibition is no greater than a percent inhibition selected from the group consisting of: 10%, 15%, 20%, 25%, 30%, 35%, 40%, 45%, 50%, 55%, 60%, 65%, 70%, 75%, 80%, and 85%.

[0650] 10. The method of any of paragraphs 1 to 6 or 8-9, wherein the contacting step is repeated at least once.

[0651] 11. The method of any of paragraphs 1 to 6 or 8-9, wherein the contacting step is repeated multiple times at a frequency selected from the group consisting of: 6 hr, 12 hr, 24 hr, 36 hr, 48 hr, 72 hr, 84 hr, 96 hr, and 108 hr.

[0652] 12. The method of any of paragraphs 1 to 11, wherein the modulation of expression is inhibition of expression and wherein the contacting step is repeated multiple times, or continuously infused, to maintain an average percent inhibition of at least 50% for the target gene(s) throughout the production of the immunogenic agent.

[0653] 13. The method of paragraph 12, wherein the average percent inhibition is selected from the group consisting of at least 50%, at least 60%, at least 70%, at least 80%, at least 90%, at least 95%, at least 99%, or 100%.

[0654] 14. The method of any of paragraphs 1 to 13, wherein the RNA effector molecule is contacted at a concentration of less than 100 nM.

[0655] 15. The method of any of paragraphs 1 to 14, wherein the RNA effector molecule is contacted at a concentration of less than 20 nM.

[0656] 16. The method of any of paragraphs 1 to 15, wherein said contacting a host cell in a large scale host cell culture with a RNA effector molecule is done at least 6 hr, at least 12 hr, at least 18 hr, at least 36 hr, at least 48 hr, at least 60 hr, at least 72 hr, at least 96 hr, or at least 120 hr, or at least 1 week, before isolation of the immunogenic agent or prior to harvesting the supernatant.

[0657] 17. The method of any of paragraphs 1 to 16, wherein the RNA effector molecule is composition formulated in a lipid formulation.

[0658] 18. The method of any of paragraphs 1 to 17, wherein the RNA effector molecule is a composition formulated in a non-lipid formulation.

[0659] 19. The method of any of paragraphs 1 to 18, wherein the RNA effector molecule is not shRNA.

[0660] 20. The method of any of paragraphs 1 to 19, wherein the RNA effector molecule is siRNA.

[0661] 21. The method of any of paragraphs 1 to 20, wherein the RNA effector molecule is chemically modified.

[0662] 22. The method of any of paragraphs 1 to 21, wherein the RNA effector molecule is not chemically modified.

[0663] 23. The method of any of paragraphs 1 to 22, further comprising monitoring at least one measurable parameter selected from the group consisting of cell density, medium pH, oxygen levels, glucose levels, lactic acid levels, temperature, and protein production.

[0664] 24. The method of any of paragraphs 2 to 23, wherein each of the plurality of different RNA effector molecules is added simultaneously or at different times.

[0665] 25. The method of any of paragraphs 2 to 23, wherein each of the plurality of different RNA effector molecules is added at the same or different concentrations.

[0666] 26. The method of any of paragraphs 2 to 6 or 8 to 25, wherein the plurality of different RNA effector molecules is added at the same or different frequencies.

[0667] 27. The method of any of paragraphs 1 to 26, further comprising contacting the cell with a second agent.

[0668] 28. The method of paragraph 27, wherein the second agent is selected from the group consisting of: an antibody, a growth factor, an apoptosis inhibitor, a kinase inhibitor, a phosphatase inhibitor, a protease inhibitor, and a histone demethylating agent.

[0669] 29. The method of paragraph 28, wherein the kinase inhibitor is selected from the group consisting of: a MAP kinase inhibitor, a CDK inhibitor, and K252a.

[0670] 30. The method of paragraph 28, wherein the phosphatase inhibitor is selected from the group consisting of: sodium vanadate and okadaic acid.

[0671] 31. The method of paragraph 28, wherein the histone demethylating agent is 5-azacytidine.

[0672] 32. The method of any of paragraphs 1 to 31, wherein the immunogenic agent is a polypeptide.

[0673] 33. The method of any of paragraphs 1 to 31, wherein the immunogenic agent is a virus.

[0674] 34. The method of paragraph 33, wherein the virus is PCV.

[0675] 35. The method of any of paragraphs 1 to 34, wherein the cell is contacted with the RNA effector molecule at a phase of cell growth selected from the group consisting of: stationary phase, early log phase, mid-log phase, late-log phase, lag phase, and death phase.

[0676] 36. The method of any of paragraphs 1 to 35, wherein the at least first RNA effector molecule, or at least one of the plurality of RNA effector molecules, comprises a duplex region.

[0677] 37. The method of any of paragraphs 1 to 36, wherein the at least first RNA effector molecule, or at least one of the plurality of RNA effector molecules, is 15 to 30 nucleotides in length.

[0678] 38. The method of any of paragraphs 1 to 37, the at least first RNA effector molecule, or at least one of the plurality of RNA effector molecules, is 17 to 28 nucleotides in length.

[0679] 39. The method of any one of paragraphs 1 to 38, wherein the at least first RNA effector molecule, or at least one of the plurality of RNA effector molecules, comprises at least one modified nucleotide.

[0680] 40. The method of any of paragraphs 1 to 39, wherein the cell is a plant cell, a fungal cell, or an animal cell.

[0681] 41. The method of any of paragraphs 1 to 40, wherein the cell is a mammalian cell.

[0682] 42. The method of paragraph 41, wherein the mammalian cell is a human cell.

[0683] 43. The method of paragraph 42, wherein the human cell is an adherent cell selected from the group consisting of: SH-SY5Y cells, IMR32 cells, LANS cells, HeLa cells, MCFlOA cells, 293T cells, and SK-BR3 cells.

[0684] 44. The method of paragraph 42, wherein the human cell is a primary cell selected from the group consisting of: HuVEC cells, HuASMC cells, HKB-II cells, and hMSC cells.

[0685] 45. The method of paragraph 42, wherein the human cell is selected from the group consisting of: U293 cells, HEK 293 cells, PERC6® cells, Jurkat cells, HT-29 cells, LNCap.FGC cells, A549 cells, MDA MB453 cells, HepG2 cells, THP-I cells, MCF7 cells, BxPC-3 cells, Capan-1 cells, DU145 cells, and PC-3 cells.

[0686] 46. The method of paragraph 41, wherein the mammalian cell is a rodent cell selected from the group consisting of: BHK21 cells, BHK(TK−) cells, NS0 cells, Sp2/0 cells, EL4 cells, CHO cells, CHO cell derivatives, NIH/3T3 cells, 3T3-L1 cells, ES-D3 cells, H9c2 cells, C2C12 cells, Madin Darby canine kidney (MDCK) cells and miMCD 3 cells.

[0687] 47. The method of paragraph 46, wherein the CHO cell derivative is selected from the group consisting of: CHO-K1 cells, CHO-DUKX, CHO-DUKX B1, and CHO-DG44 cells.

[0688] 48. The method of paragraph 42, wherein the cell is selected from the group consisting of: PERC6 cells, HT-29 cells, LNCaP-FGC cells A549 cells, MDA MB453 cells, HepG2 cells, THP-1 cells, miMCD-3 cells, HEK 293 cells, HeLaS3 cells, MCF7 cells, Cos-7 cells, BxPC-3 cells, DU145 cells, Jurkat cells, PC-3 cells, and Capan-1 cells,

[0689] 49. The method of paragraph 41, wherein the cell is a rodent cell selected from the group consisting of: BHK21, BHK(TK−), NS0 cells, Sp2/0 cells, U293 cells, EL4 cells, CHO cells, and CHO cell derivatives.

[0690] 50. The method of any of paragraphs 1 to 49, wherein the cell further comprises a genetic construct encoding the immunogenic agent.

[0691] 51. The method of any of paragraphs 1 to 50, wherein the cell further comprises a genetic construct encoding a viral receptor.

[0692] 52. The method of any of paragraphs 1 to 51, wherein the target gene encodes a protein that affects protein glycosylation.

[0693] 53. The method of any of paragraphs 1 to 52, wherein the target gene encodes the immunogenic agent.

[0694] 54. The method of any of paragraphs 1 to 53, wherein the at least first RNA effector molecule, or at least one of the plurality of RNA effector molecules, is added at a concentration selected from the group consisting of 0.1 nM, 0.5 nM, 0.75 nM, 1 nM, 2 nM, 5 nM, 10 nM, 20 nM, 30 nM, 40 nM, 50 nM, 75 nM, and 100 nM.

[0695] 55. The method of any of paragraphs 1 to 53, wherein the at least first RNA effector molecule, or at least one of the plurality of RNA effector molecules, is added at an amount of 50 molecules per cell, 100 molecules/cell, 200 molecules/cell, 300 molecules/cell, 400 molecules/cell, 500 molecules/cell, 600 molecules/cell, 700 molecules/cell, 800 molecules/cell, 900 molecules/cell, 1000 molecules/cell, 2000 molecules/cell, or 5000 molecules/cell.

[0696] 56. The method of any of paragraphs 1 to 53, wherein the at least first RNA effector molecule, or at least one of the plurality of RNA effector molecules, is added at a concentration selected from the group consisting of: 0.01 fmol/106 cells, 0.1 fmol/106 cells, 0.5 fmol/106 cells, 0.75 fmol/106 cells, 1 fmol/106 cells, 2 fmol/106 cells, 5 fmol/106 cells, 10 fmol/106 cells, 20 fmol/106 cells, 30 fmol/106 cells, 40 fmol/106 cells, 50 fmol/106 cells, 60 fmol/106 cells, 100 fmol/106 cells, 200 fmol/106 cells, 300 fmol/106 cells, 400 fmol/106 cells, 500 fmol/106 cells, 700 fmol/106 cells, 800 fmol/106 cells, 900 fmol/106 cells, and 1 pmol/106 cells.

[0697] 57. The method of any of paragraphs 1 to 56, wherein the at least first RNA effector molecule, or at least one of the plurality of RNA effector molecules, is selected from the group consisting of siRNA, miRNA, dsRNA, saRNA, shRNA, piRNA, tkRNAi, eiRNA, pdRNA, a gapmer, an antagomir, a ribozyme, and any combination thereof.

[0698] 58. The method of any of paragraphs 1 to 57, wherein the method further comprises contacting the cell with at least one additional RNA effector molecule, or agent, that modulates a cellular process selected from the group consisting of: carbon metabolism and transport, apoptosis, RNAi uptake and/or efficiency, reactive oxygen species production, control of cell cycle, protein folding, protein pyroglutamation, protein deamidation, protein glycosylation, disulfide bond formation, protein secretion, gene amplification, viral replication, viral infection, viral particle release, control of cellular pH, and protein production.

[0699] 59. The method of any of paragraphs 1 to 3, or 6 to 58, wherein the at least one target gene, is selected from the group consisting of: GLUT1, GLUT2, GLUT3, GLUT4, phosphatidylinositol-3,4,5-trisphosphate 3-phosphatase (PTEN), and lactate dehydrogenase (LDH), and wherein the modulation of expression improves production of a immunogenic agent in the cell by modulating carbon metabolism or transport in the cell.

[0700] 60. The method of any of paragraphs 1 to 3, or 6 to 58, wherein the at least one target gene is lactate dehydrogenase (LDH) and the RNA effector molecule comprises a sequence selected from SEQ ID NOs:3152540-3152603.

[0701] 61. The method of any of paragraphs 1 to 3, or 6 to 58, wherein the at least one target gene selected from the group consisting of: Bcl-G, Bax, Bak, Bok, Bad, Bid, Bik, Blk, Hrk, BNIP3, PUMA, NOXA, BimL, Bcl-2, Bcl-xL, Bcl-B, Bcl-w, Boo, Mcl-1, CASP2, CASP3, CASP6, CASP7, CASP8, CASP9, and CASP10; and wherein the modulation of expression improves production of the immunogenic agent in the cell by modulating apoptosis of the cell.

[0702] 62. The method of claim any of paragraphs 1 to 3, or 6 to 58, wherein the at least one target gene is Bak and the RNA effector molecule comprises a sequence selected from SEQ ID NOs:3152412-3152475.

[0703] 63. The method of any of paragraphs 1 to 3, or 6 to 58, wherein the at least one target gene is Bax and the RNA effector molecule comprises a sequence selected from SEQ ID NOs:3152476-3152539.

[0704] 64. The method of paragraph 16 or 17, wherein the RNA effector molecule significantly decreases the fraction of cells that enter early apoptosis.

[0705] 65. The method of paragraph 3, wherein the plurality of target genes are at least Bax and Bak.

[0706] 66. The method of paragraph 3, wherein the plurality of target genes are at least Bax, Bac, and LDH.

[0707] 67. The method of any of paragraphs 4, 5, 65, or 66, wherein the RNA effector molecule, a portion of which is complementary to Bax comprises a sequence selected from SEQ ID NOs:3152476-3152539, wherein the RNA effector molecule, a portion of which is complementary to Bak, comprises a sequence selected from SEQ ID NOs:3152412-3152475.

[0708] 68. The method of paragraph 4 or 66, wherein the RNA effector molecule, a portion of which is complementary to LDH, comprises a sequence selected from SEQ ID NOs:3152540-3152603

[0709] 69. The method of any of paragraphs 1 to 3, or 6 to 58, wherein the expression of at least two target genes is modulated and the at least two target genes are selected from the group consisting of: Bcl-G, Bax, Bak, Bok, Bad, Bid, Bik, Blk, Hrk, BNIP3, PUMA, NOXA, and BimL.

[0710] 70. The method of claim any of paragraphs 1 to 3, 6 to 58, further comprising contacting the cell with a RNA effector molecule comprising a sequence complementary to lactate dehydrogenase (LDH).

[0711] 71. The method of any of paragraphs 1 to 3, or 6 to 58, wherein the at least one target gene selected from the group consisting of: Ago1, Ago2, Ago3, Ago4, HIWI1, HIWI2, HIWI3, HILI, interferon receptor, ApoE, Eri1 and mannose/GalNAc-receptor, and wherein the modulation of expression improves production of the immunogenic agent in the cell by modulating RNAi uptake and/or efficacy in the cell.

[0712] 72. The method of any of paragraphs 1 to 3, or 6 to 58, wherein the at least one target gene is selected from the group consisting of NAD(p)H oxidase, peroxidase, constitutive neuronal nitric oxide synthase (cnNOS), myeloperoxidase (MPO), xanthine oxidase (XO), 15-lipoxygenase-1, NADPH cytochrome c2 reductase, NAPH cytochrome c reductase, NADH cytochrome b5 reductase, and cytochrome P4502E1, and wherein the modulation of expression improves production of the immunogenic agent in the cell by inhibiting production of reactive oxygen species in the cell.

[0713] 73. The method of any of paragraphs 1 to 3, or 6 to 58, wherein the at least one target gene is selected from the group consisting of: MuLV protein, MVM protein, Reo-3 protein, PRV protein, and vesivirus protein; and wherein the modulation of expression improves production of the immunogenic agent in the cell by inhibiting viral infection of the cell.

[0714] 74. The method of any of paragraphs 1 to 3, or 6 to 58, wherein the at least one target gene is xylose transferase.

[0715] 75. The method of paragraph 73, wherein the at least one target gene is a vesivirus protein and the at least one RNA effector molecule comprises at least one strand that comprises at least 16 contiguous nucleotides of an oligonucleotide having a sequence selected from SEQ ID NOs:3152604-3152713.

[0716] 76. The method of any of paragraphs 1 to 3, or 6 to 58, wherein the at least one target gene is selected from the group consisting of: CCNA1, CCNA2, CCNB1, CCNB2, CCNB3, CCND1, CCND2, CCND3, CCNE1, CCNE2, cyclin B, cyclin D, cyclin E, CDK2, CDK4, P10, P21, P27, p53, P57, p161NK4a, P14ARF, and CDK4, and wherein the modulation of expression improves production of the immunogenic agent in the cell by modulating the cell cycle of the cell.

[0717] 77. The method of any of paragraphs 1 to 3, or 6 to 58, wherein the at least one target gene is selected from the group consisting of: IRE1, PERK, ATF4, ATF6, eIF2alpha, GRP78, GRP94, Bip, Hsp40, HSP47, HSP60, Hsp70, HSP90, HSP100, protein disulfide isomerase, peptidyl prolyl isomerase, calreticulin, calnexin, Erp57, and BAG-1; and wherein the modulation of expression improves production of the protein in the cell by enhancing folding of the protein.

[0718] 78. The method of any of paragraphs 1 to 3, or 6 to 58, wherein the at least one target gene is a methionine sulfoxide reductase gene in the host cell, and wherein the modulation of expression improves production of the protein in the cell by inhibiting modification of the protein by methionine oxidation.

[0719] 79. The method of any of paragraphs 1 to 3, or 6 to 58, wherein the target gene is a glutaminyl cyclase gene in the host cell, and wherein the modulation of expression improves production of the protein in the cell by inhibiting modification of the protein by pyroglutamation.

[0720] 80. The method of any of paragraphs 1 to 3, or 6 to 58, wherein the at least one target gene is selected from the group consisting of: asparagine deamidase and glutamine deamidase; and wherein the modulation of expression improves production of the protein in the cell by inhibiting modification of the protein by deamidation.

[0721] 81. The method of any of paragraphs 1 to 3, or 6 to 58, wherein the at least one target gene is selected from the group consisting of dolichyl-diphosphooligosaccharide-protein glycosyltransferase, UDP glycosyltransferase, UDP-Gal:βGlcNAcβ1,4-galactosyltransferase, UDP-galactose-ceramide galactosyltransferase, fucosyltransferase, protein O-fucosyltransferase, N-acetylgalactosaminytransferase T-4, O-GlcNAc transferase, oligosaccharyl transferase, O-linked N-acetylglucosamine transferase, α-galactosidase, and β-galactosidase; and wherein the modulation of expression improves production of the protein in the cell by modulating glycosylation of the protein.

[0722] 82. The method of any of paragraphs 1 to 3, or 6 to 58, wherein the at least one target gene is selected from the group consisting of protein disulfide isomerase and sulfhydryl oxidase; and wherein the modulation of expression improves production of the protein in the cell by modulating disulfide bond formation in the protein.

[0723] 83. The method of any of paragraphs 1 to 3, or 6 to 58, wherein the at least one target gene is selected from the group consisting of gamma-secretase, p115, a signal recognition particle (SRP) protein, secretin, and a kinase; and wherein the modulation of expression improves production of the protein in the cell by modulating secretion of the protein.

[0724] 84. The method of any of paragraphs 1 to 3, or 6 to 58, wherein the at least one target gene is a dehydrofolate reductase gene in the host cell, wherein the modulation of expression improves production of the protein in the cell by enhancing gene amplification in the cell.

[0725] 85. The method of any of paragraphs 1 to 3, or 6 to 58, wherein the at least one target gene is a gene of a virus or a target gene of a cell, thereby producing an immunogenic agent from a host cell having a reduced viral load.

[0726] 86. The method of paragraph 85, wherein said virus is selected from the group consisting of: vesivirus, MMV, MuLV, PRV, and Reo-3.

[0727] 87. The method of paragraph 85, wherein said at least one target gene encodes a viral protein.

[0728] 88. The method of paragraph 85, wherein said at least one target gene encodes a non-viral protein.

[0729] 89. The method of any of paragraphs 1 to 3, or 6 to 58, wherein the at least one target gene is selected from the group consisting of: pro-oxidant enzymes, BIK, BAD, BIM, HRK, BCLG, HR, NOXA, PUMA, BOK, BOO, BCLB, CASP2, CASP3, CASP6, CASP7, CASP8, CASP9, CASP10, BAX, BAK, BCL2, p53, APAFI, and HSP70; and wherein the modulation of expression improves production of the immunogenic agent in the cell by enhancing the viability of the cell.

[0730] 90. The method of any of paragraphs 1 to 3, or 6 to 58, wherein the at least one target gene is selected from the group consisting of: CCNA1, CCNA2, CCNB1, CCNB2, CCNB3, CCND1, CCND2, CCND3, CCNE1, CCNE2, cyclin B, cyclin D, cyclin E, CDK2, CDK4, P10, P21, P27, p53, P57, p161NK4a, P14ARF, CDK4, Bcl-G, Bax, Bak, Bok, Bad, Bid, Bik, Blk, Hrk, BNIP3, PUMA, NOXA, BimL, Bcl-2, Bcl-xL, Bcl-B, Bcl-w, Boo, Mcl-1, A1, CASP2, CASP3, CASP6, CASP7, CASP8, CASP9, CASP10, GLUT1, GLUT2, GLUT3, GLUT4, phosphatidylinositol-3,4,5-trisphosphate 3-phosphatase (PTEN), and lactate dehydrogenase (LDH); and wherein the modulation of expression improves production of the immunogenic agent in the cell by enhancing the specific productivity of the cell.

[0731] 91. The method of any of paragraphs 1 to 3, or 6 to 58, wherein the at least one target gene is selected from the group consisting of: GLUT1, GLUT2, GLUT3, GLUT4, phosphatidylinositol-3,4,5-trisphosphate 3-phosphatase (PTEN), lactate dehydrogenase (LDH), CCNA1, CCNA2, CCNB1, CCNB2, CCNB3, CCND1, CCND2, CCND3, CCNE1, CCNE2, cyclin B, cyclin D, cyclin E, CDK2, CDK4, P10, P21, P27, p53, P57, p161NK4a, P14ARF, and CDK4; wherein the modulation of expression improves production of the immunogenic agent in the cell by modulating nutrient requirements of the cell.

[0732] 92. The method of any of paragraphs 1 to 3, or 6 to 58, wherein the at least one target gene is selected from the group consisting of: lactate dehydrogenase and lysosomal V-type ATPase; and wherein the modulation of expression improves production of the immunogenic agent in the cell by modulating the pH of the cell.

[0733] 93. The method of any of paragraphs 1 to 3, or 6 to 58, wherein the at least one target gene is selected from the group consisting of: cytoplasmic actin capping protein (CapZ), Ezrin (VIL2), Laminin A, and Cofilin (CFL1); and wherein the modulation of gene expression improves production of the immunogenic agent in the cell by modulating actin dynamics of the cell

[0734] 94. The method of paragraph 93, wherein at least one RNA effector molecule inhibits expression of the target gene Cofilin.

[0735] 95. The method of paragraph 93, wherein at least one RNA effector molecule increases expression of a target gene selected from the group consisting of: cytoplasmic actin capping protein (CapZ), Ezrin (VIL2), and Laminin A.

[0736] 96. The method of any of paragraphs 1 to 3, or 6 to 58, wherein the at least one target gene is a gene of a host cell latent virus, an adventitious virus, a host cell endogenous retrovirus, or a host cell binding-ligand of such virus.

[0737] 97. The method of paragraph 96, wherein the target gene is a gene of an endogenous retrovirus (ERV) selected from HERV-K, pt01-Chr10r-17119458, pt01-Chr5-53871501, BaEV, GaLV, HERV-T, ERV-3, HERV-E, HERV-ADP, HERV-I, MER4like, HERV-FRD, HERV-W, HERVH-RTVLH2, HERVH-RGH2, HERV-Hconsensus, HERV-Fcl, hg15-chr3-152465283, HERVL66, HSRV, HFV, HERV-S, HERV-L, HERVL40, HERVL74, HTLV-1, HTLV-2, HIV-1, HIV-2, MPMV, MMTV, HML1, HML2, HML3, HML4, HML7, HML8, HML5, HML10, HML6, HML9, MMTV, FLV, PERV, BLV, EIAV, JSRV, gg01-chr7-7163462, gg01-chrU-52190725, gg01-Chr4-48130894, ALV, gg01-chr1-15168845, gg01-chr4-77338201, gg01-ChrU-163504869, gg01-chr7-5733782, Python-molurus, WDSV, SnRV, Xen1, Gypsy, and Tyl.

[0738] 98. The method of paragraph 96, wherein the target gene is a gene of a latent virus selected from the group consisting of C serotype adenovirus, avian adenovirus, avian adenovirus-associated virus, human herpesvirus-4 (EBV), and circovirus.

[0739] 99. The method of paragraph 98, wherein the latent virus is a circovirus, and the target gene is the rep gene of porcine circovirus type 1 (PCV1) or circovirus type 2 (PCV2).

[0740] 100. The method of paragraph 98, wherein the latent virus is EBV and the target gene is latent membrane protein (LMP)-2A.

[0741] 101. The method of paragraph 96, wherein the target gene is a gene of an adventitious virus selected from the group consisting of: exogenous retrovirus, human immunodeficiency virus type 1 (HIV-1), HIV-2, human T-cell lymphotropic virus type I (HTLV-I), HTLV-II, human hepatitis A (HHA), HHB, HHC, human cytomegalovirus, EBV, herpesvirus, human herpesvirus 6 (HHV6), HHV7, HHV8, human parvovirus B19, reovirus, polyoma (JC/BK) virus, SV40, human coronavirus, papillomavirus, human papillomavirus, influenza A, B, and C viruses, human enterovirus, human parainfluenza virus, human respiratory syncytial virus, vesivirus, porcine circovirus, lymphocytic choriomeningitis virus (LCMV), lactate dehydrogenase virus, porcine parvovirus, adeno-associated virus, reovirus, rabies virus, leporipoxviruse, avian leukosis virus (ALV), hantaan virus, Marburg virus, SV20, Semliki Forest virus, feline sarcoma virus, porcine parvovirus, mouse hepatitis virus (MHV), murine leukemia virus (MuLV), pneumonia virus of mice (PVM), Theiler's encephalomyelitis virus, murine minute virus, mouse adenovirus (MAV); mouse cytomegalovirus, mouse rotavirus (EDIM), Kilham rat virus, Toolan's H-1 virus, Sendai virus, rat coronavirus, pseudorabies virus, Cache Valley virus, bovine viral diarrhoea virus, bovine parainfluenza virus type 3, bovine respiratory syncytial virus, bovine adenovirus, bovine parvovirus, infectious bovine rhinotracheitis virus, bovine herpesvirus, bovine reovirus, bluetongue virus, bovine polyoma virus, bovine circovirus, vaccinia, orthopoxviruses other than vaccinia, pseudocowpox virus, and leporipoxvirus.

[0742] 102. The method of paragraph 96, wherein target gene is a host cell binding ligand for an endogenous virus, a latent virus, or an adventitious virus.

[0743] 103. The method of paragraph 102, wherein the target gene is SLC35A1, Gne, Cmas, B4GalT1, or B4GalT6.

[0744] 104. The method of any of paragraphs 1 to 3, or 6 to 58, wherein the at least one target gene is selected from the group consisting of FUT8, TSTA3, and GMDS; and wherein the modulation of expression improves production of the immunogenic agent in the cell by modulating fucosylation.

[0745] 105. The method of paragraph 104, further comprising contacting a host cell with at least one RNA effector molecule that targets a gene that encodes a sialytransferase.

[0746] 106. The method of paragraph 105, wherein the sialytransferase is selected from the group consisting of ST3 β-galactoside α-2,3-sialyltransferase 1, ST3 β-galactoside α-2,3-sialyltransferase 4, ST3 β-galactoside α-2,3-sialyltransferase 3, ST3 β-galactoside α-2,3-sialyltransferase 5, ST6 (α-N-acetyl-neuraminyl-2,3-β-galactosyl-1,3)-N-acetylgalactosaminide α-2,6-sialyltransferase 6, and ST3 β-galactoside α-2,3-sialyltransferase 2.

[0747] 107. The method of any of paragraphs 1 to 3, or 6 to 58, wherein the at least one target gene is selected from the group consisting of glutaminase and glutamine dehydrogenase; and wherein the modulation of expression improves production of the immunogenic agent in the cell by modulating ammonia buildup.

[0748] 108. The method of any of paragraphs 1 to 108, further comprising contacting the host cell with at least one RNA effector molecule that modulates expression of glutaminase.

[0749] 109. The method of any of paragraphs 1 to 108, further comprising contacting the host cell with at least one RNA effector molecule that modulates expression of glutamine synthetase.

[0750] 110. A composition comprising: at least one RNA effector molecule, a portion of which is complementary to at least one target gene of a host cell, and a cell medium suitable for culturing the host cell, wherein the RNA effector molecule is capable of modulating expression of the target gene and the modulation of expression enhances production of an immunogenic agent, wherein the at least one RNA effector molecule is an siRNA that comprises an antisense strand comprising at least 16 contiguous nucleotides of the nucleotide sequence selected from the group consisting of SEQ ID NOs:9772-3152339 and SEQ ID NOs:3161121-3176783.

[0751] 111. The composition of paragraph 110, comprising two or more RNA effector molecules, wherein the two or more RNA effector molecules are each complementary to different target genes.

[0752] 112. A composition comprising: a plurality of RNA effector molecules, wherein a portion of each RNA effector molecule is complementary to at least one target gene of a host cell, and wherein the composition is capable of modulating expression of Bax, Bak, and LDH, and the modulation of expression enhances production of an immunogenic agent.

[0753] 113. The composition of paragraph 110 or 112, further comprising at least one additional RNA effector molecule or agent

[0754] 114. The composition of paragraph 110 or 112, wherein the at least one RNA effector molecule is siRNA.

[0755] 115. The composition of paragraph 110 or 112, wherein the at least one RNA effector molecule comprises a duplex region.

[0756] 116. The composition of paragraph 110 or 112, wherein the at least one RNA effector molecule is 15-30 nucleotides in length.

[0757] 117. The composition of paragraph 110 or 112, wherein the at least one RNA effector molecule is 17-28 nucleotides in length.

[0758] 118. The composition of paragraph 110 or 112, wherein the at least one RNA effector molecule comprises a modified nucleotide.

[0759] 119. The composition of paragraph 110, wherein the cell medium is a serum-free medium.

[0760] 120. The composition of any of paragraphs 110 to 119, wherein the composition is formulated in a non-lipid formulation.

[0761] 121. The composition of any of paragraphs 110 to 119, wherein the composition is formulated in a lipid formulation.

[0762] 122. The composition of paragraph 121, wherein the lipid in the formulation comprises a cationic or non-ionic lipid.

[0763] 123. The composition of any of paragraphs 110 to 122, wherein the composition further comprises one or more cell culture media supplements.

[0764] 124. The composition of any of paragraphs 110 to 123, wherein the at least one RNA effector molecule comprises a double-stranded ribonucleic acid (dsRNA), wherein said dsRNA comprises at least two sequences that are complementary to each other and wherein a sense strand comprises a first sequence and an antisense strand comprises a second sequence comprising a region of complementarity which is substantially complementary to at least part of a target gene, and wherein said region of complementarity is 10 to 30 nucleotides in length.

[0765] 125. A kit for enhancing production of an immunogenic agent by a cultured cell, comprising: (a) a substrate comprising one or more assay surfaces suitable for culturing the cell under conditions in which the immunogenic agent is produced; (b) one or more RNA effector molecules, wherein at least a portion of each RNA effector molecule is complementary to a target gene; and (c) a reagent for detecting the immunogenic agent or production thereof by the cell, wherein the one or more RNA effector molecules is an siRNA comprising an antisense strand that comprises at least 16 contiguous nucleotides of the nucleotide sequence selected from the group consisting of: SEQ ID NOs:9772-3152339 and SEQ ID NOs:3161121-3176783.

[0766] 126. The kit of paragraph 125, wherein the one or more assay surfaces further comprises a matrix for supporting the growth and maintenance of host cells.

[0767] 127. The kit of paragraph 125, wherein the one or more RNA effector molecules are deposited on the substrate.

[0768] 128. The kit of paragraph 125, further comprising a carrier for promoting uptake of the RNA effector molecules by the host cell.

[0769] 129. The kit of paragraph 128, wherein the carrier comprises a cationic lipid composition.

[0770] 130. The kit of paragraph 128, wherein the carrier is deposited on the substrate.

[0771] 131. The kit of paragraph 125, further comprising cell culture media suitable for culturing the host cell.

[0772] 132. The kit of paragraph 125, further comprising instructions for culturing a host cell in the presence of one or more RNA effector molecules and assaying the cell for production of the immunogenic agent.

[0773] 133. A kit for optimizing production of an immunogenic agent by cultured cells, comprising: (a) a microarray substrate comprising a plurality of assay surfaces, the assay surfaces being suitable for culturing the cells under conditions in which the immunogenic agent is produced; (b) one or more RNA effector molecules, wherein at least a portion of each RNA effector molecule is complementary to a target gene; and (c) a reagent for detecting the effect of the one or more RNA effector molecules on production of the immunogenic agent, wherein the one or more RNA effector molecules is an siRNA comprising an antisense strand that comprises at least 16 contiguous nucleotides of the nucleotide sequence selected from the group consisting of SEQ ID NOs:9772-3152339 and SEQ ID NOs:3161121-3176783.

[0774] 134. The kit of paragraph 133, wherein the substrate is a multi-well plate or biochip.

[0775] 135. The kit of paragraph 133, wherein the substrate is a two-dimensional microarray plate or biochip.

[0776] 136. The kit of paragraph 133, wherein the one or more RNA effector molecules are deposited on the assay surfaces of the substrate.

[0777] 137. The kit of paragraph 135, wherein a plurality of different RNA effector molecules are deposited on assay surfaces across a first dimension of the microarray.

[0778] 138. The kit of paragraph 137, wherein the plurality of RNA effector molecules are each complementary to a different target gene.

[0779] 139. The kit of paragraph wherein the different target genes are Bax, Bak, and LDH.

[0780] 140. The kit of paragraph 137, wherein a plurality of RNA effector molecules are each complementary to a different region of the same target gene.

[0781] 141. The kit of paragraph 137, wherein each of the RNA effector molecules comprising the plurality is deposited at varying concentrations on assay surfaces along the second dimension of the microarray.

[0782] 142. The method of any of paragraphs 1-109, wherein the RNA effector molecule, a portion of which is complementary to the target gene, is a corresponding siRNA that comprises an antisense strand comprising at least 16 contiguous nucleotides of a nucleotide sequence, wherein the nucleotide sequence is set forth in the tables herein.

[0783] 143. The method of paragraph 121, wherein the lipid formulation comprises a lipid having the following formula:

[chemical structure]

[0784] wherein:

[0785] R₁ and R₂ are each independently for each occurrence optionally substituted C₁₀-C₃₀ alkyl, optionally substituted C₁₀-C₃₀ alkoxy, optionally substituted C₁₀-C₁₀ alkenyl, optionally substituted C₁₀-C₃₀ alkenyloxy, optionally substituted C₁₀-C₃₀ alkynyl, optionally substituted C₁₀-C₃₀ alkynyloxy, or optionally substituted C₁₀-C₃₀ acyl;

[chemical structure]

represents a connection between L₂ and L₁ which is:

[0786] (1) a single bond between one atom of L₂ and one atom of L₁, wherein
[0787] L₁ is C(Rₓ), O, S or N(Q);
[0788] L₂ is —CR₅R₆—, —O—, —S—, —N(Q)-, ═C(R₅)—, —C(O)N(Q)-, —C(O)O—, —N(O)C(Q)-, —OC(O)—, or —C(O)—;

[0789] (2) a double bond between one atom of L₂ and one atom of L₁; wherein

[0790] L₁ is C;
[0791] L₂ is —CR₅═, —N(Q)═, —N—, —O—N═, —N(O)—N═, or —C(O)N(Q)—N═;

[0792] (3) a single bond between a first atom of L₂ and a first atom of L₁, and a single bond between a second atom of L₂ and the first atom of L₁, wherein
[0793] L₁ is C;
[0794] L₂ has the formula

[chemical structure]

wherein
[0795] X is the first atom of L₂, Y is the second atom of L₂, - - - - - represents a single bond to the first atom of L₁, and X and Y are each, independently, selected from the group consisting of —O—, —S—, alkylene, —N(Q)—, —C(O)—, —O(CO)—, —OC(O)N(Q)—, —N(Q)C(O)O—, —C(O)O, —OC(O)O—, —OS(O)(Q₂)O—, and —OP(O)(Q₂)O—;
[0796] Z₁ and Z₄ are each, independently, —O—, —S—, —CH₂—, —CHR⁵—, or —CR⁵R⁵—;
[0797] Z₂ is CH or N;
[0798] Z₃ is CH or N;
[0799] or Z₂ and Z₃, taken together, are a single C atom;
[0800] Aₜ and A₂ are each, independently, —O—, —S—, —CH₂—, —CHR⁵—, or —CR⁵R⁵—;
[0801] each Z is N, C(R₅), or C(R₃);
[0802] k is 0, 1, or 2;
[0803] each m, independently, is 0 to 5;
[0804] each n, independently, is 0 to 5;

[0805] where m and n taken together result in a 3, 4, 5, 6, 7 or 8 member ring;

[0806] (4) a single bond between a first atom of L₂ and a first atom of L₁, and a single bond between the first atom of L₂ and a second atom of L₁, wherein

[0807] (A) L₁ has the formula:

[chemical structure]

wherein
[0808] X is the first atom of L₁, Y is the second atom of L₁, - - - - - represents a single bond to the first atom of L₂, and X and Y are each, independently, selected from the group consisting of —O—, —S—, alkylene, —N(Q)—, —C(O)—, —O(CO)—, —OC(O)N(Q)-, —N(Q)C(O)O—, —C(O)O, —OC(O)O—, —S(O)(Q₂)O—, and —OP(O)(Q₂)O—;
[0809] T₁ is CH or N;
[0810] T₂ is CH or N;
[0811] or T₁ and T₂ taken together are C═C;
[0812] L₂ is CR₅; or

[0813] (B) L₁ has the formula:

[chemical structure]

wherein

[0814] X is the first atom of L₁, Y is the second atom of L₁, - - - - - represents a single bond to the first atom of L₂, and X and Y are each, independently, selected from the group consisting of —O—, —S—, alkylene, —N(Q)—, —C(O)—, —O(CO)—, —OC(O)N(Q)-, —N(Q)C(O)O—, —C(O)O, —OC(O)O—, —S(O)(Q₂)O—, and —OP(O)(Q₂)O—;
[0815] T₁ is —CR₅R₅—, —N(Q)—, —O—, or —S—;
[0816] T₂ is —CR₅R₅—, —N(O)—, —O—, or —S—;
[0817] L₂ is CR₅ or N;

[0818] R₃ has the formula:

[chemical structure]

[0819] wherein

[0820] each of Y₁, Y₂, Y₃, and Y₄, independently, is alkyl, cycloalkyl, aryl, aralkyl, or alkynyl; or

[0821] any two of Y₁, Y₂, and Y₃ are taken together with the N atom to which they are attached to form a 3- to 8-member heterocycle; or

[0822] Y₁, Y₂, and Y₃ are all be taken together with the N atom to which they are attached to form a bicyclic 5- to 12-member heterocycle;

[0823] each Rₙ, independently, is H, halo, cyano, hydroxy, amino, alkyl, alkoxy, cycloalkyl, aryl, heteroaryl, or heterocyclyl;

[0824] L₃ is a bond, —N(Q)—, —O—, —S—, —(CR₅R₆)ₐ—, —C(O)—, or a combination of any two of these;

[0825] L₄ is a bond, —N(Q)—, —O—, —S—, —(CR₅R₆)ₐ—, —C(O)—, or a combination of any two of these;

[0826] L₅ is a bond, —N(Q)—, —O—, —S—, —(CR₅R₆)ₐ—, —C(O)—, or a combination of any two of these;

[0827] each occurrence of R₅ and R₆ is, independently, H, halo, cyano, hydroxy, amino, alkyl, alkoxy, cycloalkyl, aryl, heteroaryl, or heterocyclyl; or two R₅ groups on adjacent carbon atoms are taken together to form a double bond between their respective carbon atoms; or two R₅ groups on adjacent carbon atoms and two R₆ groups on the same adjacent carbon atoms are taken together to form a triple bond between their respective carbon atoms;

[0828] each a, independently, is 0, 1, 2, or 3;

[0829] wherein

[0830] an R₅ or R₆ substituent from any of L₃, L₄, or L₅ is optionally taken with an R₅ or R₆ substituent from any of L₃, L₄, or L₅ to form a 3- to 8-member cycloalkyl, heterocyclyl, aryl, or heteroaryl group; and

[0831] any one of Y₁, Y₂, or Y₃, is optionally taken together with an R₅ or R₆ group from any of L₃, L₄, and L₅, and atoms to which they are attached, to form a 3- to 8-member heterocyclyl group;

[0832] each Q, independently, is H, alkyl, acyl, cycloalkyl, alkenyl, alkynyl, aryl, heteroaryl or heterocyclyl; and

[0833] each Q₂, independently, is O, S, N(Q)(Q), alkyl or alkoxy.

### EXAMPLES

### Example 1

### RNA Effector Molecule Synthesis

[0834] Where the source of a reagent is not specifically given herein, such reagent can be obtained from any supplier of reagents for molecular biology at a quality/purity standard for application in molecular biology.

[0835] Oligonucleotide Synthesis:

[0836] All oligonucleotides are synthesized on an AKTAoligopilot synthesizer. Commercially available controlled pore glass solid support (dT-CPG, 500 Å, Prime Synthesis) and RNA phosphoramidites with standard protecting groups, 5′-O-dimethoxytrityl N6-benzoyl-2′-t-butyldimethylsilyl-adenosine-3′-O—N,N′-diisopropyl-2-cyanoethylphosphoramidite, 5′-O-dimethoxytrityl-N4-acetyl-2′-t-butyldimethylsilyl-cytidine-3′-O—N,N′-diisopropyl-2-cyanoethylphosphoramidite, 5′-O-dimethoxytrityl-N2-isobutyl-2′-t-butyldimethylsilyl-guanosine-3′-O—N,N′-diisopropyl-2-cyanoethylphosphoramidite, and 5′-O-dimethoxytrityl-2′-t-butyldimethylsilyl-uridine-3′-O—N,N′-diisopropyl-2-cyanoethylphosphoramidite (Pierce Nucleic Acids Technologies) were used for the oligonucleotide synthesis. The 2′-F phosphoramidites, 5′-O-dimethoxytrityl-N4-acetyl-2′-fluoro-cytidine-3′-O—N,N′-diisopropyl-2-cyanoethyl-phosphoramidite and 5′-O-dimethoxytrityl-2′-fluoro-uridine-3′-O—N,N′-diisopropyl-2-cyanoethyl-phosphoramidite are purchased from (Promega). All phosphoramidites are used at a concentration of 0.2M in acetonitrile (CH₃CN) except for guanosine which is used at 0.2M concentration in 10% THF/ANC (v/v). Coupling/recycling time of 16 min is used. The activator is 5-ethyl thiotetrazole (0.75M, American International Chemicals); for the PO-oxidation iodine/water/pyridine is used and for the PS-oxidation PADS (2%) in 2,6-lutidine/ACN (1:1 v/v) is used.

[0837] The 3′-ligand conjugated strands are synthesized using solid support containing the corresponding ligand. For example, the introduction of cholesterol unit in the sequence is performed from a hydroxyprolinol-cholesterol phosphoramidite. Cholesterol is tethered to trans-4-hydroxyprolinol via a 6-aminohexanoate linkage to obtain a hydroxyprolinol-cholesterol moiety. The 5′-end Cy-3 and Cy-5.5 (fluorophore) labeled RNA effector molecules are synthesized from the corresponding Quasar®570 indocarbocyanine Cy™3 phosphoramidite are purchased from Biosearch Technologies (Novato, Calif.). Conjugation of ligands to 5′-end and or internal position is achieved by using appropriately protected ligand-phosphoramidite building block. An extended 15 min coupling of 0.1 M solution of phosphoramidite in anhydrous CH₃CN in the presence of 5-(ethylthio)-1H-tetrazole activator to a solid-support-bound oligonucleotide. Oxidation of the internucleotide phosphite to the phosphate is carried out using standard iodine-water, as reported in the literature, or by treatment with tert-butyl hydroperoxide/acetonitrile/water (10:87:3) with 10 min oxidation wait time conjugated oligonucleotide. Phosphorothioate is introduced by the oxidation of phosphite to phosphorothioate by using a sulfur transfer reagent such as DDTT (purchased from AM Chemicals), PADS and or Beaucage reagent. The cholesterol phosphoramidite is synthesized in house and used at a concentration of 0.1 M in dichloromethane. Coupling time for the cholesterol phosphoramidite is 16 min.

[0838] Deprotection I (Nucleobase Deprotection):

[0839] After completion of synthesis, the support is transferred to a 100 mL glass bottle (VWR). The oligonucleotide is cleaved from the support with simultaneous deprotection of base and phosphate groups with 80 mL of a mixture of ethanolic ammonia [ammonia:ethanol (3:1)] for 6.5 h at 55° C. The bottle is cooled briefly on ice and then the ethanolic ammonia mixture is filtered into a new 250-mL bottle. The CPG is washed with 2×40 mL portions of ethanol/water (1:1 v/v). The volume of the mixture is then reduced to ˜30 mL by roto-vap. The mixture is then frozen on dry ice and dried under vacuum on a speed vac.

[0840] Deprotection II (Removal of 2′-TBDMS Group):

[0841] The dried residue is resuspended in 26 mL of triethylamine, triethylamine trihydrofluoride (TEA•3HF) or pyridine-HF and DMSO (3:4:6) and heated at 60° C. for 90 minutes to remove the tert-butyldimethylsilyl (TBDMS) groups at the 2′ position. The reaction is then quenched with 50 mL of 20 mM sodium acetate and the pH is adjusted to 6.5. Oligonucleotide is stored in a freezer until purification.

[0842] Analysis:

[0843] The oligonucleotides are analyzed by high-performance liquid chromatography (HPLC) prior to purification and selection of buffer and column depends on nature of the sequence and or conjugated ligand.

[0844] HPLC Purification:

[0845] The ligand-conjugated oligonucleotides are purified by reverse-phase preparative HPLC. The unconjugated oligonucleotides are purified by anion-exchange HPLC on a TSK gel column packed in house. The buffers are 20 mM sodium phosphate (pH 8.5) in 10% CH₃CN (buffer A); and 20 mM sodium phosphate (pH 8.5) in 10% CH₃CN, 1 M NaBr (buffer B). Fractions containing full-length oligonucleotides are pooled, desalted, and lyophilized. Approximately 0.15 OD of desalted oligonucleotides are diluted in water to 150 μL and then pipetted into special vials for CGE and LC/MS analysis. Compounds are then analyzed by LC-ESMS and CGE.

[0846] RNA Effector Molecule Preparation:

[0847] For the general preparation of RNA effector molecules, equimolar amounts of sense and antisense strand are heated in 1×PBS at 95° C. for 5 min and slowly cooled to room temperature. Integrity of the duplex is confirmed by HPLC analysis.

[0848] siRNAs designed to degrade hamster Bax, Bak, and LDH mRNA were synthesized based on publicly available sequence data. A set of approximately 32 siRNAs was designed and synthesized for each target. Each siRNA was added to cell media at 10 nM for 3 days to screen for effect. In a 96 well plate, 29.5 μL of CD CHO media (Gibco) was added to test wells and 47 μL to control wells. To this, 17.5 μL of 100 nM siRNAs in CD CHO media was added to the test wells. To all wells, 3 μL of Lipofectamine™ RNAiMAX transfection reagent (Invitrogen) diluted 1:10 in CD CHO media was added. The mixture was allowed to incubate at room temperature for 15 min and then 125 μL of CD CHO media containing 20,000-30,000 cells was added to all wells. The plates were then placed in a 37° C. CO₂ incubator for 3 days.

[0849] After three days, cells were visually inspected for toxicity and then RNA was extracted using a MagMAX™ 96-well RNA extraction kit (Applied Biosys./Ambion®, Austin, Tex.) following manufacturer's instructions. cDNA was made from the RNA using a High Capacity cDNA Reverse Transcription Kit (Applied Biosys.) according to manufacturer's instructions. Finally, qPCR was used to quantify a 25-fold dilution of the target cDNA with a Roche Lightcycler 480 PCR instrument and Roche PCR Probes master mix. Relative knockdown of target genes was calculated using the ΔΔCt method using GAPDH as the internal standard.

[0850] For qPCR the following primers and probes were used:

| | | |
|---|---|---|
| Bax | | |
| Forward primer | 5′-GGAGCAGCTCGGAGGCG-3′ | (SEQ ID NO: 3152400) |
| Reverse primer | 5′-AAAAGGCCCCTGTCTTCATGA-3′ | (SEQ ID NO: 3152401) |
| Probe | 5′-6FAM-CGGGCCCACCAGCTCTGAGCA-TAMRA-3′ | (SEQ ID NO: 3152402) |
| Bak | | |
| Forward primer | 5′-CCTCCTAGGCAGGACTGTGA-3′ | (SEQ ID NO: 3152403) |
| Reverse primer | 5′-CCAAGATGCTGTTGGGTTCT-3′ | (SEQ ID NO: 3152404) |
| Probe | 5′-6FAM-TCAGGAACAAGAGACCCAGG-TAMRA-3′ | (SEQ ID NO: 3152405) |
| LDH | | |
| Forward primer | 5′-TCTGTCTGTGGCTGACTTGG-3′ | (SEQ ID NO: 3152406) |
| Reverse primer | 5′-TCACAACATCGGAGATTCCA-3′ | (SEQ ID NO: 3152407) |
| Probe | 5′-6FAM-TGAAGAATCTTAGGCGGGTG-TAMRA-3′ | (SEQ ID NO: 3152408) |
| GAPDH | | |
| Forward primer | 5′-TGGCTACAGCAACAGAGTGG-3′ | (SEQ ID NO: 3152409) |
| Reverse primer | 5′-GTGAGGGAGATGATCGGTGT-3′ | (SEQ ID NO: 3152410) |
| Probe | 5′-VIC-AGTCCCTGTCCAATAACCCC-TAMRA-3′ | (SEQ ID NO: 3152411) |

[0851] Following the initial screen at 10 nM, the most potent siRNAs were further tested at concentrations ranging from 100 nM to 1 μM under identical conditions as described above except that the concentrations of siRNAs in the 17.5 μL CD CHO media was modified as needed to obtain the desired final concentration.

[0852] An LDH activity assay kit (Cayman Chemical, Ann Arbor, Mich.) was used to test for reduced levels of LDH after 3 to 4 days of treatment with LDH siRNAs. To lyse cells in the 175 μL of media in the 96-well plate wells, 20 μL of 1% TritonX-100 was added and the plates shaken for 10 min at room temperature. The assay was carried out according to manufacturer's protocol.

TABLE 22
dsRNA against hamster Bak1

| start | SEQ | | | SEQ |
|---|---|---|---|---|
| pos. | ID NO | sense (5′-3′) | antisense (5′-3′) | ID NO |
| 89 | | AGGAGGUCUUUCGAAGCUA | UAGCUUCGAAAGACCUCCU | 2260032 |
| 90 | | GGAGGUCUUUCGAAGCUAU | AUAGCUUCGAAAGACCUCC | 2259864 |
| 93 | | GGUCUUUCGAAGCUAUGUU | AACAUAGCUUCGAAAGACC | 2259871 |
| 95 | | UCUUUCGAAGCUAUGUUUU | AAAACAUAGCUUCGAAAGA | |
| 99 | | UCGAAGCUAUGUUUUCCAU | AUGGAAAACAUAGCUUCGA | 2259966 |
| 163 | | AACCCCGAGAUGGACAAUU | AAUUGUCCAUCUCGGGGUU | |
| 185 | | UCCUAGAACCCAACAGCAU | AUGCUGUUGGGUUCUAGGA | |
| 188 | | UAGAACCCAACAGCAUCUU | AAGAUGCUGUUGGGUUCUA | |
| 232 | | AUCAUUGGAGAUGACAUUA | UAAUGUCAUCUCCAAUGAU | |
| 241 | | GAUGACAUUAACCGGAGAU | AUCUCCGGUUAAUGUCAUC | 2260016 |
| 262 | | GACACAGAGUUCCAGAAUU | AAUUCUGGAACUCUGUGUC | |
| 318 | | CGAACUCUUCACCAAGAUU | AAUCUUGGUGAAGAGUUCG | 2259868 |
| 331 | | AAGAUUGCCUCCAGCCUAU | AUAGGCUGGAGGCAAUCUU | 2259985 |
| 333 | | GAUUGCCUCCAGCCUAUUU | AAAUAGGCUGGAGGCAAUC | 2259918 |
| 334 | | AUUGCCUCCAGCCUAUUUA | UAAAUAGGCUGGAGGCAAU | 2259976 |
| 335 | | UUGCCUCCAGCCUAUUUAA | UUAAAUAGGCUGGAGGCAA | 2259895 |
| 415 | | UAUGUCUACCAACGUGGUU | AACCACGUUGGUAGACAUA | 2260083 |
| 476 | | UCAUACUGCACCAUUGCAU | AUGCAAUGGUGCAGUAUGA | |
| 546 | | CAGAGACCCAAUCCUGAUU | AAUCAGGAUUGGGUCUCUG | |
| 551 | | ACCCAAUCCUGAUUGUGAU | AUCACAAUCAGGAUUGGGU | 2259907 |
| 561 | | GAUUGUGAUGACAAUUCUU | AAGAAUUGUCAUCACAAUC | 2259857 |
| 599 | | AGUACGUGGUACACAGAUU | AAUCUGUGUACCACGUACU | 2259943 |
| 607 | | GUACACAGAUUCUUCAGAU | AUCUGAAGAAUCUGUGUAC | |

[0853] Exemplary dsRNA sequences against hamster (Cricetulus griseus) Bax are disclosed herein as SEQ ID NOs:3152476-3152539, wherein the even numbered SEQ ID NOs (e.g., NO:3152476) represent the sense strand and the odd numbered SEQ ID NOs (e.g., NO:3152477) represent the complementary antisense strand; in embodiments described herein, the RNA effector molecule can comprise at least 16 contiguous nucleotides of these sequences.

[0854] Exemplary dsRNA sequences against hamster (Cricetulus griseus) LDH-A are disclosed herein as SEQ ID NOs:3152540-3152603, wherein the even numbered SEQ ID NOs (e.g., NO:3152540) represent the sense strand and the odd numbered SEQ ID NOs (e.g., NO:3152541) represent the complementary antisense strand; in embodiments described herein, the RNA effector molecule can comprise at least 16 contiguous nucleotides of these sequences.

TABLE 25
Sense and antisense exemplary dsRNA against hamster Bax, Bak, and LDH-A.

| | | | | | |
|---|---|---|---|---|---|
| | SEQ | | | SEQ | IC₅₀ |
| Target | ID NO | Sense (3′ to 5′) | AntiSense (5′ to 3′) | ID NO | (nM) |

Bax Duplex

| | | | | | |
|---|---|---|---|---|---|
| A7 | 3152794 | CCGUCUACCAAGAAGUU | UCAACUUCUUGGUAGAC | 3152795 | 0.38 |
| | | GAdTdT | GGdTdT | | |
| B2 | 3152796 | CAGCUGACAUGUUUGCU | UCAGCAAACAUGUCAGC | 3152797 | 1.46 |
| | | GAdTdT | UGdTdT | | |
| B4 | 3152798 | GUUGUUGCCCUUUUCUA | AGUAGAAAAGGGCAAC | 3152799 | 0.08 |
| | | CUdTdT | AACdTdT | | |
| B11 | 3152800 | GACAGUGACUAUCUUUG | CACAAAGAUAGUCACUG | 3152801 | 0.22 |
| | | UGdTdT | UCdTdT | | |
| C6 | 3152802 | AGCUCUGAGCAGAUCAU | UCAUGAUCUGCUCAGAG | 3152803 | 0.17 |
| | | GAdTdT | CUdTdT | | |

Bak Duplex

| | | | | | |
|---|---|---|---|---|---|
| A2 | 3152804 | GUCUUUCGAAGCUAUGU | AAACAUAGCUUCGAAA | 3152805 | 0.07 |
| | | UUdTdT | GACdTdT | | |
| A10 | 3152806 | GCAGCUUGCUAUCAUUG | UCCAAUGAUAGCAAGCU | 3152807 | 0.38 |
| | | GAdTdT | GCdTdT | | |
| A11 | 3152808 | GCUAUCAUUGGAGAUGA | UGUCAUCUCCAAUGAUA | 3152809 | 0.14 |
| | | CAdTdT | GCdTdT | | |
| B9 | 3152810 | GCCUAUUUAAGAGCGGC | AUGCCGCUCUUAAAUAG | 3152811 | 0.08 |
| | | AUdTdT | GCdTdT | | |
| C7 | 3152812 | CGUGGUACACAGAUUCU | GAAGAAUCUGUGUACC | 3152813 | 0.04 |
| | | UCdTdT | ACGdTdT | | |

LDH Duplex

| | | | | | |
|---|---|---|---|---|---|
| C10 | 3152814 | CUACUUAAGGAAGAACA | UCUGUUCUUCCUUAAGU | 3152815 | 0.06 |
| | | GAdTdT | AGdTdT | | |
| D5 | 3152816 | CAAGCUGGUCAUUGUCA | UGUGACAAUGACCAGCU | 3152817 | 0.06 |
| | | CAdTdT | UGdTdT | | |
| D7 | 3152818 | UCAUCAUUCCCAACGUU | ACAACGUUGGGAAUGA | 3152819 | 0.13 |
| | | GUdTdT | UGAdTdT | | |
| E2 | 3152820 | GAGUGGAGUGAAUGUAG | AGCUACAUUCACUCCAC | 3152821 | 0.40 |
| | | CUdTdT | UCdTdT | | |
| E4 | 3152822 | ACAAGGAGCAGUGGAAU | UCAUUCCACUGCUCCUU | 3152823 | 0.15 |
| | | GAdTdT | GUdTdT | | |

### Example 2

### Enhanced Production of Glucocerebrosidase in Human HT-1080 Cells

[0855] The production of human glucocerebrosidase is enhanced in human HT-1080 cells in which the glucocerebrosidase gene has been activated as described in U.S. Pat. No. 5,641,670 (Gene-Activated® GCB (GA-GCB)) by contacting the cells with one or more RNA effector molecules, wherein at least a portion of each RNA effector molecule is complementary to a target gene encoding a host cell mannosidase. The RNA effector molecules inhibits expression of target genes encoding class 1 processing and/or class 2 processing mannosidases, such as Golgi mannosidase IA, Golgi mannosidase IB, Golgi mannosidase IC, and/or Golgi mannosidase II. The coding strand sequences of various mannosidases have been disclosed. See, e.g., Bause, 217 Eur. J. Biochem. 535-40 (1993); Gonzalez et al., 274 J. Biol. Chem. 21375-86 (1999); Misago et al., 92 PNAS 11766-70 (1995); Tremblay et al., 8 Glycobio. 585-95 (1998); Tremblay et al., 275 J. Biol. Chem. 31655-60 (2000). RNA effector molecules targeting the mannosidases can be designed according to the rules of Watson and Crick base pairing and other considerations as disclosed herein, or otherwise known in the art.

[0856] Effect of RNA Effector Molecules on GA-GCB Glycoforms:

[0857] HT-1080 cells producing GA-GCB are plated and the Production Medium is adjusted to provide RNA effector molecule concentrations ranging from 0 (no drug) to 10 ng/mL. The medium is harvested and the cells are re-fed every 24 hr for 3 days. Samples from the third day are subjected to isoelectric focusing (IEF) analysis to assay the effect of the RNA effector molecules on the expressed glucocerebrosidase. The apparent isoelectric point (pI) of the protein increases in a concentration dependent manner with the concentration of the RNA effector molecules. The RNA effector molecule(s) showing the steepest increase in pI are identified as preferred RNA effector molecules for enhancing production of glucocerebrosidase.

[0858] Effect of RNA Effector Molecules on GA-GCB Production:

[0859] Ten roller bottles (surface area, 1700 cm2 each) are seeded in Growth Medium (DMEM with 10% calf serum) with HT-1080 cells producing GA-GCB. Following 2 weeks of growth, the medium is aspirated and 200 mL of fresh Production Medium (DMEM/F12, 0% calf serum) is added to three sets of roller bottles. Two sets of four roller bottles are treated with ˜1 ng/mL of the RNA effector molecules. The third group of two roller bottles receives no drug treatment. After about 24 hr, the medium from each roller bottle is harvested and pooled, and a sample is taken for GA-GCB enzymatic activity analysis. The enzyme activity analysis is performed as follows: test article is mixed with the enzyme substrate (4-methylumbelliferyl-β-D-glucopyranoside) and incubated for 1 hr at 37° C. The reaction is stopped by the addition of NaOH/Glycine buffer and fluorescence is quantified by the use of a fluorescence spectrophotometer. Specific activities are expressed as 2,500 Units/mg, where one unit is defined as the conversion of 1 μMole of substrate in 1 hr at 37° C. The entire procedure is repeated for 7 days. Stable production of GA-GCB is observed for all roller bottles throughout the seven daily harvests. Absolute levels of the enzyme, however, may vary according to RNA effector molecule treatment group.

[0860] Purification and Characterization of hmGCB:

[0861] HmGCB is purified from the culture medium of human fibroblasts grown in the presence of RNA effector molecules. The four N-linked glycans present on hmGCB are released by peptide N-glycosidase F and purified using a Sep-pak C18 cartridge. Oligosaccharides eluting in the 5% acetic acid fraction are permethylated using sodium hydroxide and methyl iodide, dissolved in methanol:water (80:20), and portions of the permethylated glycan mixture are analyzed by matrix-assisted laser desorption ionization time-of-flight mass spectroscopy (MALDI-TOF-MS). The sample is analyzed on a VOYAGER™ STR BIOSPECTROMETRY™ Research Station laser-desorption mass spectrometer (Applied Biosys.) coupled with Delayed Extraction using a matrix of 2,5-dihydroxybenzoic acid. A pattern of pseudomolecular ions is seen in the range m/z 1500-2500, indicating the presence of high-mannose glycans ranging from Man₅GlcNAc₂ to Man₉GlcNAc₂.

[0862] The most abundant high mannose glycans present are Man₉GlcNAc₂ and Man₈GlcNAc₂, with decreasing abundances of Man₇GlcNAc₂, Man₆GlcNAc₂, and Man₅GlcNAc₂. A trace amount of a fucosylated biantennary complex glycan containing two sialic acid residues is observed. An approximate indication of the relative abundancy of each glycan is obtained by measuring the peak heights. A more accurate assessment of the average chain length of the high mannose glycans is obtained by MALDI-TOF-MS analysis of the intact glycoprotein. A sharp peak is obtained at about m/z 62,483.1 due to the homogeneity of the glycan chains. The mass of the mature peptide calculated from the amino acid sequence is about 55,577.6, indicating the four N-linked glycan chains contribute 6905.5 to the total mass of hmGCB. From this number, it can be calculated that the average glycan length is 8.15 mannose residues.

[0863] Effect of RNA Effector Molecules on GA-GCB Uptake into Macrophages:

[0864] GA-GCB produced in HT-1080 cells is used in an in vitro assay to determine uptake efficiency in a mouse macrophage cell line. The specific objective of the experiment is to determine the absolute and mannose receptor-specific uptake of GA-GCB in mouse J774E cells. One day prior to assay, J774E cells are plated at 50,000 cells/cm² in 12-well plates in Growth Medium. For the assay, 0.5 mL of Production Medium (DMEM/F12, 0% calf serum) containing 50 nM vitamin D3 (1, 2-5, Dihydroxy vitamin D3) is added to the cells. Unpurified GA-GCB is added to the test wells at a final concentration of 10 μg/mL in the presence or absence of 2 μg/mL mannan (a competitor for the mannose receptor).

[0865] The following forms of GA-GCB are used: GA-GCB from cells treated with a RNA effector molecule (1 μg/mL) and GA-GCB (1 μg/mL) from untreated cells. Control wells receive no GA-GCB. The wells are incubated for 4 hr at 37° C., and then are washed extensively in buffered saline, scraped into GA-GCB enzyme reaction buffer, passed through two freeze/thaw cycles, and clarified by centrifugation. The supernatant is then quantitatively tested for enzyme activity and total protein. Enzyme activity is determined as follows: sample is mixed with the enzyme substrate (4-methylumbelliferyl-β-D-glucopyranoside) and incubated for 1 hr at 37° C. The reaction is stopped by the addition of NaOH/Glycine buffer. Fluorescence is quantified by the use of a fluorescence spectrophotometer. Total protein is determined in freeze/thaw cell lysates by bicinchoninic acid (BCA). Activity is reported as units/mg total protein, where one Unit is defined as the conversion of 1 μMole of substrate in 1 hr at 37° C. Cells treated with a RNA effector molecule will receive the RNA effector molecule in the presence or absence of mannan (2 μg/mL). Internalization of GA-GCB into mouse J744E cells is reported as Units/mg of cell lysates.

[0866] The results demonstrate that uptake of GA-GCB from RNA effector molecule treated cells is about 7-fold to 14-fold over background and about 67%-73% inhibitable by mannan. In addition, they also demonstrate that uptake of GA-GCB from untreated cells is about 3-fold over background and 53% inhibitable by mannan. Thus, the inhibition of intracellular mannosidases by RNA effector molecules results in GA-GCB that can be transported into cells efficiently via the mannose receptor. Improvement in targeting of GA-GCB to cells via mannose receptors can therefore be optimized by production of GA-GCB in the presence of one or more RNA effector molecules.

### Example 3

### Growth Curves of Suspended CHO—S Cells Treated with Different siRNAs

[0867] Flasks were set up with approximately 400,000 cells/mL in 50 mL of total volume. First, 2.5 μL of 20 μM Invitrogen Stealth FITC-siRNA or 50 μL of 1 μM Bax siRNA and 50 μL of 1 μM Bak siRNA or 50 μL of 1 μM LDH siRNA were added to three different 14.3 mL volumes of CD CHO media (GIBCO). The solutions were gently mixed and then 85.5 μL of LIPOFECTAMINE™ RNAiMAX transfection reagent (Invitrogen) was added to each and the solutions gently mixed again. The solutions were allowed to incubate at room temperature for 15 min. After 15 min, 32.8 mL of warmed media was added to each solution. Finally, 2.9 mL of media with 7,000,000 cells/mL was added and the flasks put on a shaker plate set at 160 rpm in a 37° C. CO₂ incubator. Each following day an aliquot was taken from the media to count cells and determine their viability in a Beckman-Coulter cell counter.

[0868] On days 2 and 4, additional siRNAs were added. To do this, 25 mL was removed from each flask and spun at ˜400×g for 5 minutes to pellet the cells. Then, 14.3 mL of the cell-free media was removed to a separate tube and siRNAs and LIPOFECTAMINE™ RNAiMAX reagent were added as above. The solutions were gently mixed and allowed to incubate at room temperature for 15 min. The solutions were added back to their respective cell pellet, mixed with a pipette to break up cell clumps and then introduced back to their original flasks.

### Example 4

### Inhibition of Bax, Bak and LDH Enhances Viability of Cells in Culture

[0869] Bax and Bak are members of the mitochondrial-regulating BCL-2 protein family that play pivotal pro-apoptotic (capable of inducing programmed cell death) roles. As described herein, potent siRNAs directed against Bax and Bak with IC₅₀s in the low pico molar range were added at periodic intervals to CHO cells grown in a 1 L bioreactor. In addition, an siRNA directed against lactate dehydrogenase (LDH) was also included in the siRNA formulation. LDH catalyzes the conversion of pyruvate to lactate during times of anaerobic stress. Lactate is a major metabolic waste product produced in cells grown in culture and has been shown to inhibit both cell growth and metabolic pathways. Because the activation of the Bax/Bak and LDH pathways is thought to limit the growth potential of cells in culture, the effect of adding potent siRNAs directed against these genes to CHO cells grown in suspension under 1 L bioprocessing-like conditions was evaluated. When compared to CHO cells treated with a non-specific FITC-labeled siRNA, the Bax/Bak/LDH siRNA-treated cells grew to a cell density that was 90% greater than the control with a corresponding 2-fold decreased apoptotic death rate.

[0870] Materials and Methods:

[0871] Suspension-adapted CHO cells were obtained from Invitrogen and were grown (0.2×10⁶ cells/mL seed density) in a 1 L disposable bioreactor (Sartorius, Bohemia, N.Y.) at 37° C. and 5.5% CO₂ using DG44 chemically defined media (Invitrogen; #12610-010) with constant stirring at a rate suggested by the manufacturer. Starting on day-4 following seeding, the cell cultures were supplemented with 5% culture volume (30 mL) using CHO CD Efficient Feed media (Invitrogen; 10234, 10240). The cultures were then fed every 48 hr using the same feed media and volume.

[0872] Bax, Bak, and LDH siRNA sequences are provided in Table 10 and synthesized initially at small scale without modification (except for 3′ dTdT) by RLD small scale synthesis followed by medium scale synthesis. Control siRNA was purchased from Invitrogen (FITC-labeled oligo; #44-2926). Each siRNA was added to the 1 L bioreactor at a final concentration of 1 nM and formulated for transfection using Lipofectamine RNAiMax transfection reagent (Invitrogen). Bax, Bak, and LDH siRNAs were formulated together for a final combined siRNA concentration of 3 nM. The control siRNA formulation contained 6 mL DG44 media, 240 μL LIPOFECTAMINE™ RNAiMax reagent, and 30 μL FITC-labeled oligo (20 μM stock concentration). The experimental siRNA formulation contained 6 mL DG44 media, 240 μL LIPOFECTAMINE™ RNAiMax reagent, and 6 uL of each Bax, Bak, and LDH siRNA (100 μM stock concentrations). Both control and experimental siRNAs were incubated at room temperature for 15 min prior to addition to the culture media starting on day 0 and dosed again at similar concentrations every 48 hr for a total of six doses. Each day, 5 mL culture samples were removed, the cells counted and viability determined using Trypan blue dye (Sigma Aldrich) exclusion with a hemocytometer. All cell samples were taken before any further addition of siRNA or nutrient feeds. The remaining cells were aliquoted, spun down to form a cell pellet and frozen at −70° C. until needed for the following assays: qPCR, lactate, glucose, LDH, and caspase 3.

TABLE 26
Oligo sense strand sequences of siRNAs

| Target | SEQ ID NO | Strand | IC₅₀ | Sequence 5′ to 3′ |
|---|---|---|---|---|
| LDH C10 | 3152814 | sense | 16 pM | CUACUUAAGGAAGAACAGAdTdT |
| Bak A2 A-54123.1 | 3152804 | sense | 70 pM | GUCUUUCGAAGCUAUGUUUdTdT |
| Bax B4 A-54091.1 | 3152798 | sense | 80 pM | GUUGUUGCCCUUUUCUACUdTdT |

[0873] Results:

[0874] The addition of Bax/Bak/LDH siRNAs to CHO cell cultures improves viable cell density by approximately 2-fold (FIG. 6) when compared to a control transfection using a non-specific FITC-labeled siRNA. The control cell population reached a maximum cell density of ˜1.5×10⁶ cells per mL on day 6; whereas, the Bax/Bak/LDH siRNA-treated cells achieved a maximum cell density of ˜1.8×10⁶ cells per mL on day 7. The integral cell area (IGA) for the Bax/Bak/LDH-treated cells increased ˜90% over the control siRNA-treated cells (FIG. 6, inset).

[0875] Fifty percent viability of the control cells was observed on day 10 and on day 16 for the Bax/Bak/LDH-treated cells (FIG. 7). Both samples exhibited comparably high viability starting on day-0 until day-5. Cell viability started to decay below 90% starting on day 6 for the control-treated sample and on day 7 for the experimental. Cell death rates are directly proportional to the slope of the percent viability response curve. Sharper slopes indicate faster apoptotic death rates compared to shallower slopes. The rate of apoptotic cell death was 2.8-fold faster for the control compared to the Bax/Bak/LDH siRNA-treated culture (FIG. 7, inset).

[0876] These data strongly support the concept that soluble siRNAs when added to CHO cells grown in suspension in a 1 L bioreactor can have a positive effect on both cell density and viability when compared to a non-specific control siRNA.

[0877] Both lactate dehydrogenase enzyme activity and lactate levels are decreased in CHO cells following Bax/Bak/LDH siRNA treatment.

[0878] Lactate dehydrogenase enzyme activity was followed during the course of the cell growth curve (FIG. 8). Area under the curve (AUC) analysis indicated a 67% decrease in enzymatic activity in the Bax/Bak/LDH siRNA-treated cells compared to the control siRNA-treated cells. A corresponding decrease in lactate levels was observed (FIG. 9). The observed lactate level decrease in the Bax/Bak/LDH siRNA-treated culture as determined by AUC analysis was approximately 33%, about one-half that observed for the enzyme activity decrease, suggesting the LDH pyruvate to lactate conversion rate increased to compensate for decreased enzyme concentrations.

[0879] Glucose consumption in control siRNA-treated cells decreases following day 7 of the growth curve. Glucose was used as part of the culture feeding strategy and monitored throughout the growth curve. Prior to day 7, both the control and experimental cultures utilized glucose to the same extent (FIG. 10). After day 7, the Bax/Bak/LDH siRNA-treated cells continued to use glucose as they did prior to day 7 but the control cell population appeared to decrease their glucose consumption.

[0880] These data demonstrate that Bax/Bax/LDH siRNAs, when added to 1 L CHO bioprocessing cultures, promote glucose utilization post log phase growth compared to the control siRNA-treated culture that does not suggesting the control cells are dead or incapable of glucose metabolism.

[0881] Bax/Bak/LDH siRNAs when added to 1 L CHO bioprocessing cultures significantly decrease Caspase 3 activity compared to the control siRNA. Caspase 3 activation is the penultimate step that leads to DNA degradation in cells undergoing apoptotic death. Since both Bax and Bak proteins are upstream of this process, it is expected that a Bax/Bak knockdown would decrease Caspase 3 activity as well. A biphasic Caspase 3 activity response was observed (FIG. 11) for both the control and experimental conditions. During log phase growth, both the Bax/Bak/LDH-siRNA-treated and control siRNA-treated cell cultures had similar Caspase 3 levels. The reason for active Caspase 3 in non-apoptotic cells is uncertain; but during post log phase, the Bax/Bak/LDH siRNA-treated cell culture had markedly less Caspase 3 activity compared to the control cell population with no Caspase 3 activity observed on day 9 and <10% activity present the experimental cell population on day 12 compared to control.

[0882] These data demonstrate the Bax/Bak/LDH siRNAs block the ability of Bax and Bak to activate mitochondrial-induced apoptosis, confirming the appropriate target pathway has been affected.

[0883] Bax/Bak/LDH siRNAs, when dosed multiple times over a 2-week time course, can maintain >80% mRNA knockdown. A recent publication has reported that both Bax and Bak mRNA should be comparably knocked down to maintain a maximum block of apoptosis (Lim et al., 8 Metabolic Eng. 509-22 (2006)), although another group suggested >80% mRNA knockdown was sufficient for LDH (Kim & Lee, 74 Appl. Microbiol. Biotech. 152-59 (2007)) to reduce LDH activity. Therefore, the aim of multiple siRNA doses was to keep the percent knockdown for all three genes to be >80%. Bax and LDH message knockdown through most of the time course was in fact >80% (FIG. 12). The Bak mRNA knockdown hovered above and below the 80% mark through the time course. This siRNA appeared to benefit most from the multiple doses as suggested by the zigzag response pattern that seems to correlate with each new dose. A zigzag effect is also observed with the other siRNAs, but not as dramatic as the Bak siRNA.

[0884] These data demonstrate that all three siRNAs used in this study maintained target mRNA knockdown throughout the two week time course. Even though the message knockdown IC₅₀ for the Bak siRNA was similar to Bax, the mRNA knockdown maintenance during the time course was not comparable. The reason for this is uncertain but suggests that other Bak siRNAs should be evaluated.

[0885] Summary:

[0886] Silencing RNAs, directed against the apoptotic regulators Bax and Bak, in combination with an siRNA directed against a key metabolic enzyme, lactate dehydrogenase, were evaluated for knockdown activity in Chinese Hamster Ovary cells during a two week time course using a 1 L bioreactor. The results presented herein clearly support the concept that silencing RNAs can be appropriately formulated for efficient uptake into CHO cells grown in suspension under bioprocessing-like conditions. Bax/Bak/LDH siRNAs when dosed multiple times over the two week time course maintained >80% mRNA knockdown which was sufficient to lower both Caspase 3 and LDH activities resulting in increased cell density and viability compared to a non-specific siRNA control. Furthermore, these data demonstrate that multiple siRNAs (at least three) can be added simultaneously with multiple doses in suspension cell cultures with each having its desired knockdown effect and that transfection reagents can be identified that are well tolerated by CHO cells with minimal effect on viability.

### Example 5

### Improved ADCC of Antibodies by Use of RNA Effectors

[0887] Many therapeutic antibodies, particularly anticancer therapeutic antibodies, require antibody-dependent cellular cytotoxicity (ADCC) for efficacy. In order to achieve high ADCC, it is believed that proper glycosylation of the antibody is necessary. For example, antibodies lacking the core fucose of the Fc oligosaccharides have been found to exhibit much higher ADCC in humans than their fucosylated counterparts. In addition, extensive α 2,6-sialation of N-linked oligosaccharides in antibodies is also thought to reduce ADCC.

[0888] Therefore, it is desirable to produce antibodies with substantially reduced amounts of fucosylation, as well as reduced a 2,6-sialation.

[0889] Fucosylation, particularly a 1,6-fucosylation of antibodies is achieved through a number of enzymatic steps, including:

[0890] (i) GDP-mannose 4,6 dehydratase (encoded by GMDS), catalyzing the conversion of GDP-mannose to GDP-4-keto-6-deoxymannose;

[0891] (ii) GDP-4-keto-6-deoxy-D-mannose epimerase reductase (encoded by TSTA3), which catalyzes the two step epimerase and the reductase reactions in GDP-D-mannose metabolism, converting GDP-4-keto-6-D-deoxymannose to GDP-L-fucose, GDP-L-fucose is the substrate of several fucosyltransferases; and

[0892] (iii) Fucosyltransferase 8 (1,6 fucosyltransferase) (encoded by FUT8), which catalyzes the transfer of fucose from GDP-fucose to N-linked type complex glycopeptides.

[0893] Cells which are deleted or deficient in the 1,6, fucosyltransferases have been isolated, and are currently used to produce antibodies with reduced fucosylation. However, the cells have a slow doubling time, and require special conditions to grow. Furthermore, the cells are not available in many genetic backgrounds.

[0894] High sialation of antibodies has also been suggested to result in reduced ADCC. Sialation occurs through the action of sialyltransferases such as those described herein.

[0895] Therefore, increased ADCC of antibodies is achieved by producing the antibody in host cells using the methods described herein. For example, host cells expressing antibodies are contacted with siRNAs directed against any one of:
[0896] FUT8: Antisense sequence containing at least 16 contiguous nucleotides from SEQ ID NOs:209841-210227; or siRNAs comprising at least one strand selected from SEQ ID NOs:3152714-3152753, or those described herein;
[0897] GMDS: dsRNA comprising an antisense strand comprising at least 16 contiguous nucleotides (e.g., at least 17, at least 18, at least 19 nucleotides) of the oligonucleotide having a nucleotide sequence selected from the group consisting of SEQ ID NOs:1688202-1688519; and SEQ ID NOs:3152754-3152793;
[0898] TSTA3: a dsRNA molecule targeting TSTA3 can comprise an antisense strand comprising at least 16 contiguous nucleotides (e.g., at least 17, at least 18, at least 19 nucleotides) of an oligonucleotide molecule selected from the group consisting of SEQ ID NOs:1839578-1839937.

[0899] Twelve separate cultures CHO cells expressing a human anti-CD20 antibody are grown in culture flasks, initially seeded on day 1 at a density of ˜200,000 cells/ml, and on day 2 are given the following treatments:
[0900] Flask A: Transfection agent only;
[0901] Flask B: Transfection agent containing 1 nM (final concentration after addition)

[0902] Luciferase dsRNA as negative control;
[0903] Flask C: 1 nM FUT8 dsRNA in transfection reagent;
[0904] Flask D: 1 nM TSTA3 dsRNA in transfection reagent;
[0905] Flask E: 1 nM GMDS dsRNA in transfection reagent;
[0906] Flask F: 1 nM TSTA3 dsRNA+1 nM FUT8 dsRNAs in transfection reagent;
[0907] Flask G: 1 nM GMDS dsRNA+1 nM FUT8 dsRNAs in transfection reagent;
[0908] Flask H: 1 nM TSTA3 dsRNA+1 nM GMDS dsRNAs in transfection reagent;
[0909] Flask I: 1 nM St6GalNac6 dsRNA+1 nM FUT8 dsRNAs in transfection reagent;
[0910] Flask J: 1 nM St6GalNac6 dsRNA+1 nM GMDS dsRNAs in transfection reagent;
[0911] Flask K: 1 nM St6GalNac6 dsRNA+1 nM TSTA3 dsRNAs in transfection reagent;
[0912] Flask L: 1 nM St6GalNac6 dsRNA+1 nM FUT8 dsRNAs+1 nM GMDS dsRNA in transfection reagent;

[0913] Cells are grown for an additional 4 days, and supernatant of each flask is collected. Antibodies are isolated from the supernatant using protein A-sepharose chromatography. The partially purified antibodies are characterized for overall yield (by ELISA using anti-human Ab), antigen binding (e.g., CD20 binding), and for ADCC (using, for example, the lactate dehydrogenase release assay). The oligosaccharide structure of the antibodies isolated from the different cells are characterized MALDI-TOF mass spectrometry in positive-ion mode.

[0914] Exemplary dsRNA sequences against hamster (Cricetulus griseus) fucosyltransferase (FUT8) are disclosed herein as SEQ ID NOs:3152714-3152753, wherein the even numbered SEQ ID NOs (e.g., NO:3152714) represent the sense strand and the odd numbered SEQ ID NOs (e.g., NO:3152715) represent the complementary antisense strand; in embodiments described herein, the RNA effector molecule can comprise at least 16 contiguous nucleotides.

TABLE 43
Screen of FUT8 siRNAs at 1 nM with 1 day incubation on adherent DG44 cells

| SEQ ID NO. | Name | antisense sequence | % mRNA knockdown (1 nM) |
|---|---|---|---|
| 3157117 | AD-25348 | AUGCCCGCAUUUUCAGAGUdTdT | 94.8 |
| 209866 | AD-25349 | UAAUCCAACGCCAGGAACCdTdT | 96.6 |
| 3157118 | AD-25350 | AAAAGAAUGAGCAUAAUCCdTdT | 93.0 |
| 3157119 | AD-25351 | AAAUGACCACCUAUAUAAAdTdT | 28.9 |
| 3157120 | AD-25352 | AACCAAAUGACCACCUAUAdTdT | 83.8 |
| 3157121 | AD-25353 | UAUCUCGAACCAAAUGACCdTdT | 94.3 |
| 209898 | AD-25354 | UUAUCUCGAACCAAAUGACdTdT | 87.9 |
| 3157122 | AD-25357 | AACCAGAGCUCUUUAGCUCdTdT | 93.2 |
| 3157123 | AD-25358 | AUCUGUCAUGAUAGACCUUdTdT | 66.0 |
| 210049 | AD-25359 | UUAUUCUCCGCUGGACCAGdTdT | 80.3 |
| 3157124 | AD-25360 | AUGAGUGUUCGCUGGGUGCdTdT | 72.7 |
| 3157125 | AD-25361 | UUACAGGUCUAAACACAGUdTdT | 74.3 |
| 3157126 | AD-25362 | AACUGGAUGUUUGAAGCCAdTdT | 84.3 |
| 3157127 | AD-25363 | UUGGAGUACUUUGUCUUUGdTdT | 86.6 |
| 3157128 | AD-25364 | AAUUGGAGUACUUUGUCUUdTdT | 77.3 |
| 3125129 | AD-25365 | UAAUUGGAGUACUUUGUCUdTdT | 81.7 |
| 209878 | AD-25366 | AUAAUUGGAGUACUUUGUCdTdT | 77.9 |
| 209904 | AD-25367 | AAGUGUAUAUCCAGGAUCAdTdT | 81.7 |
| 3125130 | AD-25355 | UUGCAAGAAUCUUGGAGAGdTdT | 92.0 |
| 209885 | AD-25356 | AAAACACGGACUCUUCCUGdTdT | 93.3 |

TABLE 44
Dose-response of FUT8 siRNAs in DG44 cells

| | % mRNA knockdown | | | | |
|---|---|---|---|---|---|
| | 100 nM | 10 nM | 1 nM | 100 pM | 10 picom |
| AD-25348 | 97.4 | 93.7 | 83.0 | 47.6 | 24.6 |
| AD-25349 | 99.2 | 97.4 | 87.0 | 74.3 | 22.8 |
| AD-25353 | 96.5 | 97.0 | 89.9 | 57.2 | 67.2 |
| AD-25357 | 94.0 | 91.5 | 55.1 | 51.9 | 14.9 |
| AD-25356 | 96.1 | 95.6 | 92.7 | 75.0 | 26.7 |

### Example 6

### Use of Bax/Bak in High-Glucose Culture

[0915] In general, inclusion of high concentrations of glucose (e.g., at least 15 mM) during growth of cells in bioprocessing results in accumulation of lactic acid in the growth media which can be deleterious to cell growth. Lactic acid accumulation results in premature apoptosis. Since providing high levels of a carbon source such as glucose would be otherwise highly advantageous, a method of growing cells in high glucose without triggering lactic acid accumulation and subsequent apoptosis would be highly desirable.

[0916] In this example, a RNA effector molecule targeting pro-apoptotic genes are used to allow cells to grow at higher glucose concentrations of at least 10 mM (for example, at least 15 mM, at least 20 mM, at least 25 mM, at least 30 mM or more) in the growth medium without undergoing apoptosis.

[0917] On day 0, host cells capable of expressing the immunogenic agent are contacted with 1 nM each of RNA effectors targeting Bax and Bak (optionally also with 1 nM dsRNA targeting LDH) in growth medium containing normal levels (˜4-6 mM) of glucose. Approximately 24 hr afterwards, cells are switched to media containing 15 mM glucose. Subsequently, RNA effectors targeting Bax and Bak are further provided at 1 nM every 3-5 days. Protein production in these cells is compared with those from cells not transfected with RNA effector molecules (or transfected with an unspecific control RNA effector).

[0918] Other RNA effectors useful to permit growth in high glucose can include those targeting any pro-apoptotic genes, including those described herein. Other examples include RNA effector molecules comprising an an antisense strand comprising at least 16 contiguous nucleotides (e.g., at least 17, at least 18, at least 19 nucleotides) of an oligonucleotide nucleotide having a sequence selected from the group consisting of the following:

TABLE 30
Caspase

| SEQ | | | Avg | siRNA |
|---|---|---|---|---|
| ID NO: | consL | Descrption | Coverage | SEQ ID NOs: |
| 5854 | 1136 | caspase 1 | 2.306 | 1964106-1964500 |
| 8056 | 612 | caspase 2 | 1.166 | 2718675-2719039 |
| 5746 | 1157 | caspase 3 | 11.813 | 1924836-1925195 |
| 7120 | 855 | caspase 6 | 4.965 | 2408466-2408843 |
| 6798 | 926 | caspase 7 | 0.436 | 2301618-2301960 |
| 8917 | 414 | caspase 8 | 0.2 | 2995593-2995870 |
| 4250 | 1492 | caspase 9 | 1.769 | 1412589-1412860 |
| 5608 | 1188 | caspase 12 | 0.856 | 1875252-1875646 |

### Example 7

### Efficacy of siRNA's in PK15 Cells and in DG44 Cells

[0919] siRNA Screening in DG44 Cells:

[0920] siRNAs against CHO targets of interest are designed and synthesized. Sets of siRNAs (duplex) to be screened are added to cell media at between 100 μM and 10 nM for between 1 and 4 days for effect. In a 96 well plate, 29.5 μL of CD DG44 media (GIBCO™ Invitrogen) supplemented with 8 mM L-glutamine and 0.18% PLURONIC F68® is added to test wells and 47 μL to control wells. To this, 17.5 μL of siRNA at 10 times the final desired concentration in CD DG44 media is added to the test wells. To all wells, 3 μL of LIPOFECTAMINE® transfection reagent RNAiMAx (Invitrogen) diluted 1:10 in CD DG44 media is added. The mixture is allowed to incubate at room temperature for 15 min and then 125 μL of CD DG44 media containing approximately 20,000 DG44 cells is added to all wells. The plates are then placed in a 37° C. CO₂ incubator for between 1 and 4 days.

[0921] After incubation, cells are visually inspected for toxicity and RNA extracted using a MagMax 96-well RNA extraction kit (Ambion, Life Technologies Corp., Carlsbad, Calif.) following the manufacturer's instructions. cDNA is made from the RNA using a High Capacity cDNA Reverse Transcription Kit (Applied Biosystems, Life Technologies Corp.) according to the manufacturer's instructions. Finally, qPCR is used to quantify an appropriate dilution of the target cDNA with a Roche Lightcycler 480 PCR instrument and Roche PCR Probes master mix. Relative knockdown of target genes was calculated using the ΔΔCt method using GAPDH as the internal standard. The % mRNA knockdown for target genes cofilinl, LDLR, GNE, SLC35A1,GALE, FUT8, GMDS, and XYLAT are shown elsewhere herein.

[0922] The most potent siRNAs are tested further in a range of concentrations. The method for this testing was the same as above except that a range of siRNA concentrations were tested simultaneously.

[0923] siRNA Screening in PK15 Cells:

[0924] siRNAs against PCV 1 targets of interest are designed and synthesized. Sets of siRNAs to be screened are added to cell media at 10 nM for 1 day for effect. In a 96-well plate, 29.5 μL of Minimum Essential Medium, Eagle's, with Earle's Balanced Salt (EMEM) media (ATCC) are added to test wells and 47 μL to control wells. To this, 17.5 μL of siRNA at 100 nM in CD DG44 media is added to the test wells. To all wells, 4 μL of LIPOFECTAMINE® RNAiMAx reagent (Invitrogen) diluted 1:10 in EMEM media is added. The mixture is allowed to incubate at room temperature for 15 min and then 125 μL of EMEM media containing approximately 20,000 PK15 cells is added to all wells. The plates were then placed in a 37° C. CO₂ incubator for 1 day.

[0925] After incubation, cells are visually inspected for toxicity and then RNA is extracted using a MagMax 96-well RNA extraction kit (Ambion) following the manufacturer's instructions. cDNA was made from the RNA using a High Capacity cDNA Reverse Transcription Kit (Applied Biosystems) according to the manufacturer's instructions. Finally, qPCR is used to quantify an appropriate dilution of the target cDNA with a Roche Lightcycler 480 PCR instrument and Roche PCR Probes master mix. Relative knockdown of target genes is calculated using the ΔΔCt method using GAPDH as the internal standard.

TABLE 31
Screen of cofilin1 siRNAs in DG44 cells

| | | | % mRNA | % mRNA |
|---|---|---|---|---|
| SEQ | | | knockdown | knockdown |
| ID NO. | Name | antisense sequence | (1 nM) | (100 pM) |
| 1914036 | AD-30721 | UUCAUUUACACACAGAACUdTdT | 95.2 | 89.3 |
| 1914037 | AD-30722 | GAAUCAGAGGAUCAGAAGCdTdT | 96.4 | 74.2 |
| 1914038 | AD-30723 | AAGAGCACUGCCUUCUUGCdTdT | 76.7 | 42.6 |
| 1914039 | AD-30724 | UGUAAUUCGUGCUUGAUUCdTdT | 96.8 | 82.2 |
| 1914040 | AD-30725 | UUAGAAGUUGGCAGCAUGGdTdT | 87.5 | 66.3 |
| 1914041 | AD-30726 | UCCGCUUCAACCCAAGAGGdTdT | 95.7 | 71.1 |
| 1914042 | AD-30727 | AAGGGGUGCACUCUCAGGGdTdT | 92.6 | 60.5 |
| 1914043 | AD-30728 | UGUGGUUAGAAGUUGGCAGdTdT | 88.8 | 70.0 |
| 1914044 | AD-30729 | UUCCGUUUAAGUAGGAGCCdTdT | 17.4 | 16.5 |
| 1914045 | AD-30730 | GACACCAUCAGAGACAGCCdTdT | 90.8 | 48.6 |
| 1914046 | AD-30731 | UAUUGUGGUUAGAAGUUGGdTdT | 92.4 | 75.4 |
| 1914047 | AD-30732 | ACUUGGUCCGCUUCAACCCdTdT | 91.8 | 75.2 |
| 1914048 | AD-30733 | AAAGGCUUGCCCUCCAGAGdTdT | 40.2 | 9.0 |
| 1914050 | AD-30734 | CUUCCGUUUAAGUAGGAGCdTdT | −18.8 | −5.6 |
| 1914051 | AD-30735 | AGCACAGUCACUAUUGUGGdTdT | 93.8 | 71.2 |
| 1914052 | AD-30736 | UUGAACACUUUGAUGACACdTdT | 88.2 | 73.9 |
| 1914053 | AD-30737 | UUUGCUUGUAAUUCGUGCUdTdT | 91.6 | 76.1 |
| 1914054 | AD-30738 | UUGACAAAAGUGGUGUAGGdTdT | 83.9 | 49.9 |
| 1914055 | AD-30739 | AUAGCGGCAGUCCUUGUCGdTdT | 77.9 | 45.1 |
| 1914056 | AD-30740 | UAAAUUGAAGGUCCCUUACdTdT | 94.3 | 84.5 |
| 1914057 | AD-30741 | UAUCAUUGAACACUUUGAUdTdT | 83.9 | 51.6 |
| 1914058 | AD-30742 | UCGUAGAGAGCAUAGCGGCdTdT | 77.3 | 14.8 |
| 1914060 | AD-30743 | UGACAAAAGUGGUGUAGGGdTdT | 85.6 | 58.6 |
| 1914061 | AD-30744 | UGCAACACCCAUGAGCAGGdTdT | 81.4 | 39.5 |

TABLE 32
Dose-response of cofilin1 siRNAs in DG44 cells

| | % mRNA knockdown | | | | | |
|---|---|---|---|---|---|---|
| | 10 nM | 1 nM | 100 pM | 10 picom | 1 picom | 0.1 picom |
| AD-30721 | 99.2 | 98.8 | 97.4 | 92.9 | 63.4 | 7.7 |
| AD-30724 | 99.3 | 99.0 | 99.0 | 95.5 | 62.1 | 9.0 |
| AD-30731 | 97.1 | 98.7 | 97.5 | 92.7 | 58.7 | −3.1 |
| AD-30737 | 99.3 | 99.4 | 98.8 | 87.7 | 36.3 | −1.7 |
| AD-30740 | 97.9 | 97.6 | 96.2 | 94.6 | 76.8 | 33.1 |

TABLE 33
Screen of LDLR siRNAs in DG44 cells at 1 nM

| SEQ ID | | | % mRNA knockdown |
|---|---|---|---|
| NO. | Name | antisense sequence | (1 nM) |
| 1522123 | AD-29793 | AAAUAUAUAAAACAGAGCCdTdT | 57.7 |
| 1522125 | AD-29794 | AACAGUGCAAUCUAAGAGCdTdT | 64.9 |
| 1522126 | AD-29795 | AUAUCUACACCAUUCAGGCdTdT | 33.5 |
| 1522127 | AD-29796 | GAAUCAACCCAAUAGAGGCdTdT | 40.8 |
| 1522128 | AD-29797 | CUUGCUUUGAGCAACACAGdTdT | 26.9 |
| 1522129 | AD-29798 | ACCAAAUUAACAUCUGAGCdTdT | 23.0 |
| 1522130 | AD-29799 | UCAUUUAUGACAUCCGUCCdTdT | 71.7 |
| 1522131 | AD-29800 | UCAUCUUCCAAAAUGGUCUdTdT | 71.3 |
| 1522132 | AD-29801 | ACUGGAAGCCGACUGAUCCdTdT | 57.7 |
| 1522133 | AD-29802 | AGUGUGAUGCCAUUUGGCCdTdT | 64.9 |
| 1522134 | AD-29803 | AAUUGUGGCAAUUCUAAGUdTdT | 33.5 |
| 1522135 | AD-29804 | AAAAUGGUCUUCCGAUUGCdTdT | 40.8 |
| 1522136 | AD-29805 | UCUUAUCUUGCUUUGAGCAdTdT | 78.1 |
| 1522137 | AD-29806 | AGGGUGAUGGACAAGACCCdTdT | 6.9 |
| 1522138 | AD-29807 | UGUUCAUGCCACAUCAUCCdTdT | 67.5 |
| 1522139 | AD-29808 | UAAAUUGUGGCAAUUCUAAdTdT | 3.2 |
| 1522140 | AD-29809 | AAAUUAACAUCUGAGCCUGdTdT | 16.3 |
| 1522141 | AD-29810 | AAGGAGGAUGACCAGUGCGdTdT | 23.0 |
| 1522142 | AD-29811 | UCUAAGAGCACAGAUGCAGdTdT | 81.3 |
| 1522143 | AD-29812 | AAGAGAAGGUUCUCACAGCdTdT | 48.0 |
| 1522145 | AD-29813 | UUGGAAUCAACCCAAUAGAdTdT | 36.6 |
| 1522146 | AD-29814 | GUGAUCUCAGGCCUGAUGGdTdT | 39.8 |
| 1522148 | AD-29815 | AAAGUGCGAAGAGAGAAUCdTdT | 66.7 |

TABLE 34
Dose response of LDLR siRNAs in DG44 cells

| | % mRNA knockdown | | | | | |
|---|---|---|---|---|---|---|
| | 10 nM | 1 nM | 100 pM | 10 picom | 1 picom | 0.1 picom |
| AD-29799 | 91.9 | 91.3 | 83.0 | 43.5 | 17.6 | −8.7 |
| AD-29800 | 87.9 | 84.4 | 66.5 | 9.8 | −10.3 | −18.6 |
| AD-29805 | 89.1 | 87.4 | 83.6 | 55.2 | 15.6 | −11.4 |
| AD-29807 | 95.8 | 93.2 | 83.1 | 45.3 | 4.4 | −15.3 |
| AD-29811 | 93.8 | 89.1 | 85.7 | 69.1 | 33.3 | 3.4 |

TABLE 35
Screen of GNE siRNAs in DG44 cells at 1 nM

| SEQ | | | % mRNA knockdown |
|---|---|---|---|
| ID NO. | Name | antisense sequence | (1 nM) |
| 420095 | AD-29121 | UACUGACUCUACCAUGGCUdTdT | 89.2 |
| 419972 | AD-29122 | UCCAUGAACAAUCAUGAUGdTdT | 94.7 |
| 420052 | AD-29123 | AGUUUGUCAUAGGAAGGGCdTdT | 85.7 |
| 419975 | AD-29124 | AGCAGUUUGUCAUAGGAAGdTdT | 97.5 |
| 420033 | AD-29125 | AUCCGAAUGAUGCUCAUAUdTdT | 80.0 |
| 420029 | AD-29126 | AGUGCAACAAUGUAAUCUUdTdT | 38.4 |
| 420005 | AD-29127 | AAUGAGAUAAGUGCAUCCAdTdT | 66.8 |
| 420224 | AD-29128 | ACAUGCUUGACUGCACGAAdTdT | 28.3 |
| 420003 | AD-29129 | AAAUGGGACAUGCUUGACUdTdT | 95.8 |
| 420090 | AD-29130 | AUAAACUGGUCAAAUGGGAdTdT | 88.3 |
| 419965 | AD-29131 | UAUAAACUGGUCAAAUGGGdTdT | 70.1 |
| 420219 | AD-29132 | AUCAUACAACCAGCAUGGGdTdT | 51.7 |
| 420140 | AD-29134 | UUAUCUUGGGUGUCAGCAUdTdT | 90.7 |
| 419984 | AD-29135 | UUUAUCUUGGGUGUCAGCAdTdT | 91.9 |
| 420214 | AD-29136 | AGGUGGAGCGCUUGUAAUAdTdT | −55.8 |
| 419970 | AD-29137 | UUUACCGAACUGAAGGUGGdTdT | 81.6 |
| 420077 | AD-29138 | UACUGUUUACCGAACUGAAdTdT | 29.3 |
| 420096 | AD-29139 | UCUUAACUAUUUCACCCUUdTdT | 45.3 |
| 420025 | AD-29140 | UUCUUAACUAUUUCACCCUdTdT | 79.1 |
| 420098 | AD-29141 | UCUGCAGGAUUAAACUAAUdTdT | 26.8 |
| 420186 | AD-29142 | AAAUGCCUACUCCCAGAAUdTdT | 44.1 |
| 420121 | AD-29143 | UUGGCCAAACUUCCUUUCUdTdT | 83.5 |
| 419964 | AD-29144 | UGUAAUGAGUGUCACAAAGdTdT | 87.5 |
| 420243 | AD-29145 | UGCCUGUAAUGAGUGUCACdTdT | 79.1 |
| 420011 | AD-29146 | AUAUUCUGGGCCUUCACGUdTdT | 83.8 |
| 419974 | AD-29147 | UGUUCGUAGGAUAUUCUGGdTdT | 79.6 |
| 420084 | AD-29148 | AGCUGUUCGUAGGAUAUUCdTdT | 77.3 |
| 420143 | AD-29149 | ACGUCCUUGACAAUGUGGAdTdT | 87.3 |
| 420275 | AD-29150 | AGGGUCAACCAAGUCUGAAdTdT | 10.5 |
| 420017 | AD-29151 | UGAAGAAGUACUGAUCUAAdTdT | 86.1 |
| 420297 | AD-29133 | UCUUCCUAUCUGGCGUGUUdTdT | 74.5 |
| 420064 | AD-29152 | AGAUCCACCUUUAAUCUAGdTdT | −167.6 |

TABLE 36
Dose-response of GNE siRNAs in DG44 cells

| | % mRNA knockdown | | | | | |
|---|---|---|---|---|---|---|
| | 10 nM | 1 nM | 100 pM | 10 picom | 1 picom | 0.1 pM |
| AD-29122 | 95.5 | 93.6 | 75.9 | 28.8 | 47.7 | 17.9 |
| AD-29124 | 94.4 | 89.6 | 63.3 | 7.3 | −3.2 | −13.3 |
| AD-29129 | 97.7 | 90.7 | 87.0 | 36.9 | −18.5 | −20.2 |
| AD-29134 | 94.6 | 89.3 | 66.1 | −5.0 | −43.4 | −3.5 |
| AD-29135 | 89.9 | 90.6 | 80.5 | 12.3 | −4.6 | −38.0 |

TABLE 37
Screen of SLC35A1 siRNAs at 1 nM on DG44 cells for 3 days

| SEQ | | | % mRNA knockdown |
|---|---|---|---|
| ID NO. | Name | antisense sequence | (1 nM) |
| 1368055 | AD-29063 | AAGCUACGGUAUAAGCUGCdTdT | 92.0 |
| 1367961 | AD-29064 | AAAGCUACGGUAUAAGCUGdTdT | 83.6 |
| 1368040 | AD-29065 | UGUGUAUCUUAAAGCUACGdTdT | 79.3 |
| 1367983 | AD-29066 | UUGUGUAUCUUAAAGCUACdTdT | 90.5 |
| 1367981 | AD-29067 | ACUUUAUAACUUCUGUGACdTdT | 94.4 |
| 1368010 | AD-29068 | AAUCUACCCAAACUUCCAGdTdT | 99.5 |
| 1367999 | AD-29069 | UUAAAUCUACCCAAACUUCdTdT | 99.5 |
| 1368000 | AD-29070 | AGAUGCCUUAAAUCUACCCdTdT | 99.3 |
| 1368085 | AD-29071 | AAGAUGCCUUAAAUCUACCdTdT | 97.9 |
| 1367995 | AD-29072 | ACUAAGAGCUAGGAAAGCCdTdT | 99.5 |
| 1368045 | AD-29073 | AUACUAAGAGCUAGGAAAGdTdT | 99.4 |
| 1368017 | AD-29074 | UAGGUAACCUGGUAUACUGdTdT | 99.4 |
| 1368068 | AD-29075 | ACCCAUGUAAUUUGCUGAGdTdT | 75.3 |
| 1367960 | AD-29076 | AUAGCUAUUGCACCAAAGCdTdT | 99.6 |
| 1367978 | AD-29077 | AAUACAGCAAUAGCUAUUGdTdT | 98.4 |
| 1368053 | AD-29078 | AUCCAGAGCACAAUACAGCdTdT | 99.3 |
| 1367953 | AD-29079 | AAUAAACUCCUGCAAAUCCdTdT | 97.9 |
| 1367957 | AD-29080 | AAGUGAAUGUUUCUCACCCdTdT | 96.2 |
| 1368159 | AD-29081 | UAGUCGUUAUAGGAGUAUCdTdT | 99.2 |
| 1368033 | AD-29082 | AGUUUAGUCGUUAUAGGAGdTdT | 99.5 |
| 1367956 | AD-29083 | AUUAUUGACAGUUUAGUCGdTdT | 99.1 |
| 1368012 | AD-29084 | UAUUAUUGACAGUUUAGUCdTdT | 99.7 |
| 1367967 | AD-29085 | UGUUUAAGCUACCAUCUGGdTdT | 98.1 |
| 1367977 | AD-29086 | UAUUGUUUAAGCUACCAUCdTdT | 98.7 |
| 1368065 | AD-29087 | UGAUAUUGUUUAAGCUACCdTdT | 98.0 |
| 1367973 | AD-29088 | UUGAUAUUGUUUAAGCUACdTdT | 99.3 |
| 1368038 | AD-29089 | UUGAAUAUUGUAGUUUCACdTdT | 98.3 |
| 1368089 | AD-29090 | ACUUGAACCUUCAGAUACCdTdT | 98.0 |
| 1368077 | AD-29091 | UACCUGAACGAGAGAACAGdTdT | 98.7 |
| 1368067 | AD-29092 | UCUCUUAUUCAUUCUUCACdTdT | 98.6 |
| 1368039 | AD-29093 | UUACCCAGACAGAAGUCAGdTdT | 99.1 |
| 1367952 | AD-29094 | AAGUAUAUCAGCUAACAGCdTdT | 99.7 |
| 1367965 | AD-29095 | AGUUCACAAAUUGAGAGCCdTdT | 98.6 |
| 1367963 | AD-29096 | AAGUUCACAAAUUGAGAGCdTdT | 97.2 |

TABLE 38
Dose-response of SLC35A1 siRNAs in DG44 cells

| | % mRNA knockdown | | | | | |
|---|---|---|---|---|---|---|
| | 10 nM | 1 nM | 100 pM | 10 picom | 1 picom | 0.1 pM |
| AD-29068 | 99.7 | 99.3 | 95.3 | 51.8 | 34.9 | 39.5 |
| AD-29069 | 94.8 | 94.1 | 88.8 | 56.9 | 59.8 | 60.1 |
| AD-29076 | 99.9 | 99.4 | 96.1 | 76.7 | 55.8 | 30.2 |
| AD-29084 | 99.9 | 99.7 | 99.0 | 95.4 | 54.9 | 1.6 |
| AD-29094 | 99.8 | 99.6 | 99.5 | 97.4 | 54.1 | −9.1 |

TABLE 39
Screen of SLC35A2 siRNAs at 1 nM on DG44 cells for 3 days

| SEQ | | | % mRNA knockdown |
|---|---|---|---|
| ID NO. | Name | antisense sequence | (1 nM) |
| 464723 | AD-29097 | UAUCGGAUGCUAAGGAUGAdTdT | 86.9 |
| 464762 | AD-29098 | AUAUCGGAUGCUAAGGAUGdTdT | 89.9 |
| 464953 | AD-29099 | UACGAGCAUAUCGGAUGCUdTdT | 80.2 |
| 464679 | AD-29100 | AAAUAAUGGGUCCAGGUGAdTdT | 90.8 |
| 464814 | AD-29101 | UUAUGGCUUUGACUGCACUdTdT | 92.9 |
| 464729 | AD-29102 | UAUCCCUCUAGAAGUGUGGdTdT | 92.2 |
| 464852 | AD-29103 | AUAUCCCUCUAGAAGUGUGdTdT | 87.8 |
| 464750 | AD-29104 | UUCCCAAAGAGGUUAGCCUdTdT | 81.4 |
| 464833 | AD-29105 | AUUAGUCGUUACUGAAGAAdTdT | 75.6 |
| 464844 | AD-29106 | UUACAACAGGCCGAUCUUCdTdT | 83.0 |
| 464676 | AD-29107 | AAGUAAAUGGUGCUUAUUGdTdT | 88.3 |
| 464859 | AD-29108 | AUCACAAAUGCCCGACAUAdTdT | 85.4 |
| 464748 | AD-29109 | UAUCACAAAUGCCCGACAUdTdT | 92.4 |
| 464820 | AD-29110 | AUAUCACAAAUGCCCGACAdTdT | 90.4 |
| 464675 | AD-29111 | AACCUGAUAUCACAAAUGCdTdT | 92.2 |
| 464701 | AD-29112 | AAUUCUGACACCGCCAUGAdTdT | 49.8 |
| 464847 | AD-29113 | AUCAAUUCUGACACCGCCAdTdT | 83.4 |
| 464702 | AD-29114 | UAAGGAGUUAGUAAGCUUUdTdT | 86.4 |
| 464778 | AD-29115 | UACAGUUAAGGAGUUAGUAdTdT | 79.5 |
| 464881 | AD-29116 | AUACAGUUAAGGAGUUAGUdTdT | 90.1 |
| 464961 | AD-29117 | AUCCUGACAUAUGUUCAUUdTdT | 66.0 |
| 464804 | AD-29118 | UAUCCUGACAUAUGUUCAUdTdT | 83.7 |
| 464726 | AD-29119 | UUGGCAUUGGGUAUCCUGAdTdT | 83.2 |
| 464799 | AD-29120 | UUAUUUGGCAUUGGGUAUCdTdT | 89.2 |

TABLE 40
Dose-response of SLC35A2 siRNAs in DG44 cells

| | % mRNA knockdown | | | | | |
|---|---|---|---|---|---|---|
| | 10 nM | 1 nM | 100 pM | 10 picom | 1 picom | 0.1 pM |
| AD-29101 | 66.4 | 60.3 | 16.4 | 24.1 | −0.1 | 19.5 |
| AD-29102 | 92.6 | 87.4 | 81.8 | −4.3 | 66.5 | 53.3 |
| AD-29109 | 85.7 | 84.2 | 79.5 | 37.5 | −2.2 | −31.6 |
| AD-29110 | 74.4 | 84.4 | 77.3 | −20.3 | −63.2 | −51.2 |
| AD-29111 | 97.3 | 86.1 | 80.9 | 27.2 | −15.8 | −2.9 |

TABLE 41
Screen of GALE siRNAs at 1 nM with 3 days incubation on adherant
DG44 cells

| SEQ | | | % mRNA knockdown |
|---|---|---|---|
| ID NO. | Name | antisense sequence | (1 nM) |
| 1888656 | AD-28691 | UCUAUAAUAAUCCAGAGGCdTdT | 92.1 |
| 1888657 | AD-28692 | AACACGAGAUUCUUCACCCdTdT | 88.8 |
| 1888660 | AD-28693 | AAAGCUGUGCUUCUUAAAGdTdT | 70.3 |
| 1888659 | AD-28694 | AUUGAAGUAGCGUAGCAGCdTdT | 87.4 |
| 1888663 | AD-28695 | UGUAUCAUAGUCACCACCAdTdT | 92.6 |
| 1888662 | AD-28696 | UCCACGAAUGGCAUUAUGGdTdT | 86.4 |
| 1888665 | AD-28697 | ACCACAUGAAUGUAAUCCCdTdT | 90.1 |
| 1888674 | AD-28698 | AACUCUAUAAUAAUCCAGAdTdT | 66.3 |
| 1888673 | AD-28699 | ACUUGGACUUUCCAUAGGGdTdT | 78.1 |
| 1888689 | AD-28700 | UAUGGGAUCUUCUUCCCUGdTdT | 73.7 |
| 1888690 | AD-28701 | UAUAAUAAUCCAGAGGCUUdTdT | 89.3 |
| 1888698 | AD-28702 | UCCUCUGUAUCAUAGUCACdTdT | 90.5 |
| 1888695 | AD-28703 | AUGAAUGUAAUCCCUUACAdTdT | 86.5 |
| 1888703 | AD-28704 | UGUAAUCCCUUACACCUGUdTdT | 89.8 |
| 1888702 | AD-28705 | AGAACUUGGACUUUCCAUAdTdT | 93.3 |
| 1888706 | AD-28706 | AACCACAUUGCUCCUUCAGdTdT | 65.7 |
| 1888707 | AD-28707 | AUAAUAAUCCAGAGGCUUCdTdT | 73.0 |
| 1888705 | AD-28708 | ACAGCCUUAAAGCUGUGCUdTdT | 73.7 |
| 1888719 | AD-28709 | UAAUCCCUUACACCUGUGCdTdT | 91.3 |
| 1888708 | AD-28710 | UUCGUAAGGAGGUCUUUAGdTdT | 95.2 |
| 1888701 | AD-28711 | UCGUAAGGAGGUCUUUAGGdTdT | 94.0 |
| 1888710 | AD-28712 | UCUUAAAGAGGUGCUGUAGdTdT | 91.3 |
| 1888716 | AD-28713 | UAAGGAGGUCUUUAGGCCUdTdT | 82.4 |
| 1888738 | AD-28714 | UCCCUGUUAGGUUAACUCUdTdT | 92.2 |
| 1888735 | AD-28715 | UUUUGGUCCUUCGUAAGGAdTdT | 89.7 |
| 1888723 | AD-28716 | UUGAAGUAGCGUAGCAGCAdTdT | 66.8 |
| 1888769 | AD-28717 | UAAAGCUGUGCUUCUUAAAdTdT | 25.5 |
| 1888781 | AD-28718 | UGAACACGAGAUUCUUCACdTdT | 93.6 |
| 1888774 | AD-28719 | AAGUGGAUGACAGCCUUAAdTdT | 60.9 |

TABLE 42
Dose-response of GALE siRNAs in DG44 cells

| | % mRNA knockdown | | | | |
|---|---|---|---|---|---|
| | 10 nM | 1 nM | 100 pM | 10 picoM | 1 picoM |
| AD-28695 | 99.1 | 97.8 | 92.1 | 75.5 | 32.8 |
| AD-28705 | 96.4 | 94.9 | 94.2 | 76.7 | 45.4 |
| AD-28710 | 97.1 | 97.8 | 94.9 | 88.3 | 42.3 |
| AD-28711 | 98.7 | 97.8 | 95.2 | 75.6 | 24.9 |
| AD-28718 | 98.6 | 98.3 | 93.6 | 61.4 | 3.6 |

TABLE 45
Screen of GMDS siRNAs at 10 nM with 1 day incubation on adherent
DG44 cells

| SEQ | | | % mRNA knockdown |
|---|---|---|---|
| ID NO. | Name | antisense sequence | (10 nM) |
| 1688259 | AD-25328 | UUCGACCUGUAUUAAAUGAdTdT | 93.1 |
| 1688271 | AD-25329 | AAUUCGACCUGUAUUAAAUdTdT | 93.9 |
| 1688246 | AD-25331 | UAUAAAUGUUCAAUUCGACdTdT | 91.3 |
| 3157131 | AD-25332 | UUCAUGUUUCCUUCAAUAUdTdT | 78.9 |
| 1688245 | AD-25333 | AGUGCAACUUCAUGUUUCCdTdT | 89.8 |
| 3157132 | AD-25334 | UCCAAGGUAAAUCUUAGCUdTdT | 90.6 |
| 3157133 | AD-25338 | AUAGUCCUUGGCAUGGCCCdTdT | 87.9 |
| 3157134 | AD-25340 | UUCCUUCCCACACAAUGGUdTdT | 89.9 |
| 3157135 | AD-25342 | UUGCCGGUCUCUUUACAUCdTdT | 85.1 |
| 1688220 | AD-25344 | AAGUAAAAUGAGUAUGUGAdTdT | 92.7 |
| 1688283 | AD-25345 | UAGUGACAUAAUUUCAAGUdTdT | 92.7 |
| 3157136 | AD-25346 | UUGUCUAGUGACAUAAUUUdTdT | 87.1 |
| 3157137 | AD-25347 | AAAAACAAUCUCAAGACUCdTdT | 91.2 |
| 1688483 | AD-25330 | AUGUUCAAUUCGACCUGUAdTdT | 81.4 |
| 3157138 | AD-25335 | UGUCCAAGGUAAAUCUUAGdTdT | 77.3 |
| 3157139 | AD-25336 | UUGUCCAAGGUAAAUCUUAdTdT | 83.3 |
| 3157140 | AD-25337 | UUGGCAUGGCCCCAGUCUCdTdT | 63.0 |
| 1688295 | AD-25339 | UUCCCCAGUAGCUAUGACAdTdT | 80.8 |
| 1688307 | AD-25341 | UCUCUUUACAUCUGCCCACdTdT | 90.8 |
| 1688317 | AD-25343 | AAAGGCAACGCGGGGCUUCdTdT | 80.9 |

TABLE 46
Dose-response of GMDS siRNAs in DG44 cells

| | % mRNA knockdown | | | | |
|---|---|---|---|---|---|
| | 100 nM | 10 nM | 1 nM | 100 pM | 10 picom |
| AD-25328 | 94.9 | 89.4 | 75.9 | 49.5 | −3.3 |
| AD-25329 | 92.1 | 89.1 | 80.1 | 49.9 | 12.6 |
| AD-25331 | 94.2 | 88.9 | 87.6 | 73.8 | 27.5 |
| AD-25344 | 96.4 | 91.2 | 85.8 | 63.8 | 21.4 |
| AD-25345 | 92.9 | 86.3 | 78.0 | 45.1 | 26.7 |

TABLE 47
Screen of XYLT2 siRNAs at 100 pM with 4 days incubation on adherant
DG44 cells

| SEQ ID | | | % mRNA knockdown |
|---|---|---|---|
| NO. | Name | antisense sequence | (10 nM) |
| 1554777 | AD-28123 | AUUAGCAGUAAGUAGUGAGdTdT | 50.5 |
| 1554779 | AD-28124 | AAGUAGUGAGCACUACACCdTdT | −18.5 |
| 3157141 | AD-28125 | UUUCCUGAGAGGUAGUUUGdTdT | 84.1 |
| 1554785 | AD-28126 | UCUUAGGUCUGCUUGGAGCdTdT | 65.3 |
| 3157142 | AD-28127 | UCAGUGUCCUCAUCUACCGdTdT | 52.9 |
| 3157143 | AD-28128 | AGGUUGGAUCAAUAGGGCCdTdT | −77.2 |
| 3157144 | AD-28129 | AGAACUGAAGCAAUCGAACdTdT | 76.1 |
| 3157145 | AD-28130 | UGCGGUUGAAGGUCAAUGGdTdT | 43.0 |
| 1554792 | AD-28131 | AGACAAAACCUCUCCAGAGdTdT | 34.5 |
| 1554793 | AD-28132 | ACUUCUUAGGUCUGCUUGGdTdT | 62.6 |
| 1554795 | AD-28133 | UGUCAUAUGAUGUGGCCACdTdT | 1.7 |
| 1554806 | AD-28134 | ACCGUGAUGUCAUAUGAUGdTdT | 67.5 |
| 1554808 | AD-28135 | AAAGAAGGUGGGUCUGGAGdTdT | 62.9 |
| 1554809 | AD-28136 | UCUACCGUGAUGUCAUAUGdTdT | 72.2 |
| 1554815 | AD-28137 | UAGGUUGGAUCAAUAGGGCdTdT | −109.9 |
| 1554821 | AD-28138 | ACGAUGUGUUUGUACUGGCdTdT | 70.0 |
| 3157146 | AD-28139 | AGCAGUAAGUAGUGAGCACdTdT | 72.4 |
| 3157147 | AD-28140 | UACGGUUCCAGUUGGUGACdTdT | 81.1 |
| 1554825 | AD-28141 | ACAAGGAAGCGAAUCUCGCdTdT | 76.0 |
| 3157148 | AD-28142 | AGCACGAACCAGUCAGAACdTdT | 61.6 |
| 1554838 | AD-28143 | AUGUAUUCAUUGUGGGGUGdTdT | 39.3 |
| 1554860 | AD-28144 | ACAGCCCACUUCUUAGGUCdTdT | 54.0 |
| 1554886 | AD-28145 | UGACACGCAAGUUGUUGUCdTdT | 2.4 |

TABLE 48
Dose-response of XYLT2 siRNAs in DG44 cells

| | % mRNA knockdown | | | | |
|---|---|---|---|---|---|
| | 10 nM | 1 nM | 100 pM | 10 picom | 1 picom |
| AD-28125 | 89.0 | 91.3 | 77.2 | 42.0 | 29.3 |
| AD-28129 | 93.3 | 88.1 | 81.6 | 50.9 | 24.5 |
| AD-28139 | 92.0 | 92.6 | 68.5 | 34.7 | 15.9 |
| AD-28140 | 96.0 | 96.4 | 75.7 | 53.7 | 13.8 |
| AD-28141 | 94.9 | 92.5 | 81.6 | 60.8 | 34.7 |

TABLE 49
siRNAs against PCV1 Rep screened at 10 nM overnight in PCV1 infected
PK15 cells

| SEQ | | | % mRNA knockdown |
|---|---|---|---|
| ID NO: | Name | antisense sequence | (10 nM) |
| 3290845 | AD-36165.2 | AAcACCcACCUCUuAUGGGdTsdT | −3.5 |
| 3290846 | AD-36171.2 | uAAGGGUGAAcACCcACCUdTsdT | 11.4 |
| 3290847 | AD-36177.2 | UuAAGGGUGAAcACCcACCdTsdT | 17.6 |
| 3290848 | AD-36183.2 | AUuAAGGGUGAAcACCcACdTsdT | 23.4 |
| 3290849 | AD-36189.2 | uAUuAAGGGUGAAcACCcAdTsdT | −35.7 |
| 3290850 | AD-36195.2 | UuAUuAAGGGUGAAcACCCdTsdT | 3.4 |
| 3290851 | AD-36201.2 | AAGCUCCCGuAUUUUGUUUdTsdT | −5.7 |
| 3290852 | AD-36207.2 | AAGGGAGAUUGGAAGCUCCdTsdT | −17.3 |
| 3290853 | AD-36166.2 | UUCCUCUCCGcAAAcAAAAdTsdT | 29.3 |
| 3290854 | AD-36172.2 | AAACCUUCCUCUCCGcAAAdTsdT | 63.0 |
| 3290855 | AD-36178.2 | UUCcAAACCUUCCUCUCCGdTsdT | 49.8 |
| 3290856 | AD-36184.2 | uACCCUCUUCcAAACCUUCdTsdT | −36.1 |
| 3290857 | AD-36190.2 | UUCuACCCUCUUCcAAACCdTsdT | −11.3 |
| 3290858 | AD-36196.2 | AAUUCGcAAACCCCUGGAGdTsdT | 22.6 |
| 3290859 | AD-36202.2 | AAAUUCGcAAACCCCUGGAdTsdT | 28.3 |
| 3290860 | AD-36208.2 | uAGcAAAAUUCGcAAACCCdTsdT | 48.2 |
| 3290861 | AD-36167.2 | UUCUuAGcAAAAUUCGcAAdTsdT | 16.5 |
| 3290862 | AD-36173.2 | AAGUCUGCUUCUuAGcAAAdTsdT | 63.5 |
| 3290863 | AD-36179.2 | AAAGUCUGCUUCUuAGcAAdTsdT | 42.0 |
| 3290864 | AD-36185.2 | AAAAGUCUGCUUCUuAGcAdTsdT | 57.8 |
| 3290865 | AD-36191.2 | uAAAAGUCUGCUUCUuAGCdTsdT | 61.2 |
| 3290866 | AD-36197.2 | UuAAAAGUCUGCUUCUuAGdTsdT | 55.4 |
| 3290867 | AD-36203.2 | UUcACCUUGUuAAAAGUCUdTsdT | 64.8 |
| 3290868 | AD-36209.2 | uACcACUUcACCUUGUuAAdTsdT | 66.2 |
| 3290869 | AD-36168.2 | AuACcACUUcACCUUGUuAdTsdT | 21.8 |
| 3290870 | AD-36174.2 | AAuACcACUUcACCUUGUUdTsdT | 30.3 |
| 3290871 | AD-36180.2 | AAAuACcACUUcACCUUGUdTsdT | 48.9 |
| 3290872 | AD-36186.2 | UUCGCUUUCUCGAUGUGGCdTsdT | 51.0 |
| 3290873 | AD-36192.2 | UUCCUUUCGCUUUCUCGAUdTsdT | 53.3 |
| 3290874 | AD-36198.2 | UuAUUCUGCUGGUCGGUUCdTsdT | 17.1 |
| 3290875 | AD-36204.2 | UUCUUuAUUCUGCUGGUCGdTsdT | 13.2 |
| 3290876 | AD-36210.2 | uACUGcAGuAUUCUUuAUUdTsdT | 61.8 |
| 3290877 | AD-36169.2 | UuACUGcAGuAUUCUUuAUdTsdT | 35.4 |
| 3290878 | AD-36175.2 | UUuACUGcAGuAUUCUUuAdTsdT | 0.3 |
| 3290879 | AD-36181.2 | AUGUGGCCUUCUUuACUGCdTsdT | −20.2 |
| 3290880 | AD-36187.2 | uAUGUGGCCUUCUUuACUGdTsdT | 18.2 |
| 3290881 | AD-36193.2 | AAGuAUGUGGCCUUCUUuAdTsdT | −218.2 |
| 3290882 | AD-36199.2 | uAAGuAUGUGGCCUUCUUUdTsdT | 47.1 |
| 3290883 | AD-36205.2 | AuAAGuAUGUGGCCUUCUUdTsdT | 41.0 |
| 3290884 | AD-36211.2 | uACUcAcAGcAGuAGAcAGdTsdT | −30.6 |
| 3290885 | AD-36170.2 | AAAGGGuACUcAcAGcAGUdTsdT | 23.7 |
| 3290886 | AD-36176.2 | AAAAGGGuACUcAcAGcAGdTsdT | 27.6 |
| 3290887 | AD-36182.2 | AACUGCUCGGCuAcAGUcAdTsdT | 31.7 |
| 3290888 | AD-36188.2 | uACGUuAcAGGGAACUGCUdTsdT | 40.3 |
| 3290889 | AD-36194.2 | UUCUcAcAuACGUuAcAGGdTsdT | 53.3 |
| 3290890 | AD-36200.2 | AAUUUCUcAcAuACGUuACdTsdT | 58.2 |
| 3290891 | AD-36206.2 | AAAUUUCUcAcAuACGUuAdTsdT | 63.5 |
| 3290892 | AD-36212.2 | UUCCCGCUcACUUUcAAAAdTsdT | 58.5 |
| 3290893 | AD-36213.1 | AUCUUCCCGCUcACUUUcAdTsdT | −100.7 |
| 3290894 | AD-36219.1 | AUcACGCUGCUGcAUCUUCdTsdT | 16.5 |
| 3290895 | AD-36225.1 | uAcAGCUGUCUUCcAAUcAdTsdT | 36.7 |
| 3290896 | AD-36231.1 | AAAAUuACGGGCCcACUGGdTsdT | 20.2 |
| 3290897 | AD-36237.1 | uAGGCUcAGcAAAAUuACGdTsdT | 24.0 |
| 3290898 | AD-36243.1 | UUCcAGuAGGUGUCGCuAGdTsdT | 41.0 |
| 3290899 | AD-36249.1 | UUCuACuAGGCUUCcAGuAdTsdT | 64.0 |
| 3290900 | AD-36255.1 | UUUCuACuAGGCUUCcAGUdTsdT | 63.7 |
| 3290901 | AD-36214.1 | AUUUCuACuAGGCUUCcAGdTsdT | 43.4 |
| 3290902 | AD-36220.1 | AUCCcACcACUuAUUUCuAdTsdT | 11.7 |
| 3290903 | AD-36226.1 | AUCcAUCCcACcACUuAUUdTsdT | 18.5 |
| 3290904 | AD-36232.1 | uAUCcAUCCcACcACUuAUdTsdT | 24.5 |
| 3290905 | AD-36238.1 | AuAUCcAUCCcACcACUuAdTsdT | 40.1 |
| 3290906 | AD-36244.1 | AUGAuAUCcAUCCcACcACdTsdT | 29.3 |
| 3290907 | AD-36250.2 | UUCUCcAUGAuAUCcAUCCdTsdT | 50.7 |
| 3290908 | AD-36256.1 | UUCUUCUCcAUGAuAUCcAdTsdT | 22.1 |
| 3290909 | AD-36215.1 | AACUUCUUCUCcAUGAuAUdTsdT | 27.3 |
| 3290910 | AD-36221.1 | AAcAACUUCUUCUCcAUGAdTsdT | 46.0 |
| 3290911 | AD-36227.2 | AAcAAcAACUUCUUCUCcAdTsdT | 52.4 |
| 3290912 | AD-36233.1 | AAAcAAcAACUUCUUCUCCdTsdT | 55.1 |
| 3290913 | AD-36239.2 | AAAAcAAcAACUUCUUCUCdTsdT | 46.6 |
| 3290914 | AD-36245.1 | AUCcAAAAcAAcAACUUCUdTsdT | 56.9 |
| 3290915 | AD-36251.2 | AUcAUCcAAAAcAAcAACUdTsdT | 25.8 |
| 3290916 | AD-36257.1 | AAUcAUCcAAAAcAAcAACdTsdT | 76.0 |
| 3290917 | AD-36222.1 | AAGGuAACcAGCcAuAAAAdTsdT | 53.0 |
| 3290918 | AD-36228.2 | AUCCcAAGGuAACcAGCcAdTsdT | −5.0 |
| 3290919 | AD-36234.2 | AUcAUCCcAAGGuAACcAGdTsdT | 30.3 |
| 3290920 | AD-36240.1 | AuACCGGUcAcAcAGUCUCdTsdT | 16.8 |
| 3290921 | AD-36246.1 | AUGGAuACCGGUcAcAcAGdTsdT | 39.5 |
| 3290922 | AD-36252.1 | AAUGGAuACCGGUcAcAcAdTsdT | 29.0 |
| 3290923 | AD-36258.1 | uAcAGUcAAUGGAuACCGGdTsdT | 14.4 |
| 3290924 | AD-36217.1 | uAGUCUCuAcAGUcAAUGGdTsdT | −5.7 |
| 3290925 | AD-36223.1 | UUGCUGGuAAUcAAAAuACdTsdT | 33.3 |
| 3290926 | AD-36229.1 | AUUGCUGGuAAUcAAAAuAdTsdT | 38.2 |
| 3290927 | AD-36235.1 | UUGAGGAGuACcAUUCCUGdTsdT | 18.5 |
| 3290928 | AD-36241.1 | uAGAGAGCUUCuAcAGCUGdTsdT | 16.5 |
| 3290929 | AD-36247.2 | AuAGAGAGCUUCuAcAGCUdTsdT | 58.5 |
| 3290930 | AD-36253.1 | AAGuAGuAAUCCUCCGAuAdTsdT | −20.6 |
| 3290931 | AD-36259.1 | AAAGuAGuAAUCCUCCGAUdTsdT | 10.2 |
| 3290932 | AD-36218.1 | UUGcAAAGuAGuAAUCCUCdTsdT | 22.1 |
| 3290933 | AD-36224.2 | AUUGcAAAGuAGuAAUCCUdTsdT | 36.3 |
| 3290934 | AD-36230.2 | UUCcAAAAUUGcAAAGuAGdTsdT | −16.0 |
| 3290935 | AD-36236.1 | UUCUCcAGcAGUCUUCcAAdTsdT | −1.0 |
| 3290936 | AD-36242.1 | AUUGUUCUCcAGcAGUCUUdTsdT | 22.3 |
| 3290937 | AD-36248.1 | uACCUCCGUGGAUUGUUCUdTsdT | 14.5 |
| 3290938 | AD-36254.1 | UUcAAAUCGGCCUUCGGGUdTsdT | 58.1 |
| 3290939 | AD-36260.1 | UUuAuAUGGGAAAAGGGcAdTsdT | 27.4 |

TABLE 50
siRNAs against PCV1 Cap screened at 10 nM overnight in PCV1 infected
PK15 cells

| SEQ | | | % mRNA knockdown |
|---|---|---|---|
| ID NO. | Name | antisense sequence | (10 nM) |
| | AD-35779.1 | AUGUUUCcAAGAUGGCUGCdTsdT | 8.2 |
| | AD-35785.1 | UUCUCCGGAGGAUGUUUCCdTsdT | 61.9 |
| | AD-35791.1 | uAUGGUCUUCUCCGGAGGAdTsdT | −1.8 |
| | AD-35797.1 | AuAUGGUCUUCUCCGGAGGdTsdT | 43.5 |
| | AD-35803.1 | AAuAUGGUCUUCUCCGGAGdTsdT | 52.8 |
| | AD-35809.1 | AAAuAUGGUCUUCUCCGGAdTsdT | 27.0 |
| | AD-35815.1 | uAACGGUUUCUGAAGGCGGdTsdT | 1.6 |
| | AD-35821.1 | AUCUGuAACGGUUUCUGAAdTsdT | −226.3 |
| | AD-35780.1 | AAGAuACCCGUCUUUCGGCdTsdT | 5.6 |
| | AD-35786.1 | UUGAAGAuACCCGUCUUUCdTsdT | 42.3 |
| | AD-35792.1 | AUUGAAGAuACCCGUCUUUdTsdT | −15.4 |
| | AD-35798.1 | AAUUGAAGAuACCCGUCUUdTsdT | 6.3 |
| | AD-35810.1 | UUCUCuAGAAAGGCGGGAAdTsdT | −761.2 |
| | AD-35816.1 | AAUUCUCuAGAAAGGCGGGdTsdT | 52.5 |
| | AD-35822.1 | AAAUUCUCuAGAAAGGCGGdTsdT | 66.4 |
| | AD-35781.1 | uAcAAAUUCUCuAGAAAGGdTsdT | 36.0 |
| | AD-35787.1 | AUGGUGAGuAcAAAUUCUCdTsdT | 43.9 |
| | AD-35793.1 | uAUGGUGAGuAcAAAUUCUdTsdT | −15.4 |
| | AD-35799.1 | UUCcAAGAUGGCUGCGAGUdTsdT | 13.2 |
| | AD-35805.1 | AUUCcAAGAUGGCUGCGAGdTsdT | 15.0 |
| | AD-35811.1 | AAcAUUCcAAGAUGGCUGCdTsdT | −16.2 |
| | AD-35817.1 | uAAcAUUCcAAGAUGGCUGdTsdT | 12.0 |
| | AD-35823.1 | UuAAcAUUCcAAGAUGGCUdTsdT | −135.6 |
| | AD-35782.1 | uAUUGGAAAGGuAGGGGuAdTsdT | 30.4 |
| | AD-35788.1 | AuACGGuAGuAUUGGAAAGdTsdT | 41.9 |
| | AD-35794.1 | AAuACGGuAGuAUUGGAAAdTsdT | 19.5 |
| | AD-35800.1 | uAAuACGGuAGuAUUGGAAdTsdT | 22.8 |
| | AD-35806.1 | UUCuAAuACGGuAGuAUUGdTsdT | −9.9 |
| | AD-35812.1 | UUUCuAAuACGGuAGuAUUdTsdT | 49.4 |
| | AD-35818.1 | uAGCCUUUCuAAuACGGuAdTsdT | 29.5 |
| | AD-35824.1 | UuAGCCUUUCuAAuACGGUdTsdT | 38.2 |
| | AD-35783.1 | UUuAGCCUUUCuAAuACGGdTsdT | 52.8 |
| | AD-35789.1 | AUUuAGCCUUUCuAAuACGdTsdT | 63.7 |
| | AD-35795.1 | uAUUuAGCCUUUCuAAuACdTsdT | 30.4 |
| | AD-35801.1 | UUcAuAUUuAGCCUUUCuAdTsdT | 52.8 |
| | AD-35807.1 | AUUcAuAUUuAGCCUUUCUdTsdT | −35.3 |
| | AD-35813.1 | AAUUcAuAUUuAGCCUUUCdTsdT | 30.9 |
| | AD-35819.1 | UUGAUuAGAGGUGAUGGGGdTsdT | −17.0 |
| | AD-35825.1 | UUUGAUuAGAGGUGAUGGGdTsdT | 54.7 |
| | AD-35784.1 | AAcACCUCUUUGAUuAGAGdTsdT | 40.3 |
| | AD-35790.1 | AAcAGUGGACCcAAcACCUdTsdT | 20.7 |
| | AD-35796.1 | AAcAAcAGUGGACCcAAcAdTsdT | 27.5 |
| | AD-35802.1 | uAAcAAcAGUGGACCcAACdTsdT | 6.3 |
| | AD-35808.1 | AuAAcAAcAGUGGACCcAAdTsdT | −71.3 |
| | AD-35814.1 | AAGAuAAcAAcAGUGGACCdTsdT | 9.5 |
| | AD-35820.1 | AUCcAAGAuAAcAAcAGUGdTsdT | 24.9 |
| | AD-35826.1 | UUGGcAUCcAAGAuAAcAAdTsdT | 7.6 |
| | AD-35833.1 | AAAGUUGGcAUCcAAGAuAdTsdT | 46.2 |
| | AD-35839.1 | uAcAAAGUUGGcAUCcAAGdTsdT | 37.3 |
| | AD-35845.1 | UuAcAAAGUUGGcAUCcAAdTsdT | −31.6 |
| | AD-35851.1 | uAGGGGUcAuAGGCcAAGUdTsdT | −29.8 |
| | AD-35857.1 | uAuAGGGGUcAuAGGCcAAdTsdT | 10.1 |
| | AD-35863.1 | AuAuAGGGGUcAuAGGCcAdTsdT | 35.5 |
| | AD-35869.1 | AAuAuAGGGGUcAuAGGCCdTsdT | 54.1 |
| | AD-35828.1 | uAAuAuAGGGGUcAuAGGCdTsdT | 36.0 |
| | AD-35834.1 | UuAAuAuAGGGGUcAuAGGdTsdT | 28.0 |
| | AD-35840.1 | AAAGGGCUGCCUuAUGGUGdTsdT | 28.0 |
| | AD-35846.1 | uAAAGGGCUGCCUuAUGGUdTsdT | −20.3 |
| | AD-35852.1 | uAGGuAAAGGGCUGCCUuAdTsdT | −21.1 |
| | AD-35858.1 | uACCUGGAGUGGuAGGuAAdTsdT | −28.0 |
| | AD-35864.1 | AAGuACCUGGAGUGGuAGGdTsdT | 0.3 |
| | AD-35870.1 | UUGGUCcAGCUcAGGUUUGdTsdT | 30.0 |
| | AD-35829.1 | UUUGGUCcAGCUcAGGUUUdTsdT | 49.8 |
| | AD-35835.1 | UUGUUUGGUCcAGCUcAGGdTsdT | −4.7 |
| | AD-35841.1 | AUGGAGCcAcAGCUGGUUUdTsdT | 33.7 |
| | AD-35847.1 | AAAUGGAGCcAcAGCUGGUdTsdT | −456.5 |
| | AD-35853.1 | uAAAUGGAGCcAcAGCUGGdTsdT | 15.5 |
| | AD-35859.1 | UuAAAUGGAGCcAcAGCUGdTsdT | −18.6 |
| | AD-35865.1 | UUuAAAUGGAGCcAcAGCUdTsdT | 62.7 |
| | AD-35871.1 | AUUuAAAUGGAGCcAcAGCdTsdT | 41.9 |
| | AD-35830.1 | uAUUuAAAUGGAGCcAcAGdTsdT | 56.3 |
| | AD-35836.1 | UUGGUGUGGGuAUUuAAAUdTsdT | 29.0 |
| | AD-35842.1 | AUUGGUGUGGGuAUUuAAAdTsdT | 36.4 |
| | AD-35848.1 | UUUUGGAGCGcAuAGCCGAdTsdT | −41.1 |
| | AD-35854.1 | AUUUUGGAGCGcAuAGCCGdTsdT | −6.2 |
| | AD-35860.1 | UUGGGCUGUGGCUGcAUUUdTsdT | −6.2 |
| | AD-35866.1 | UUUGGGCUGUGGCUGcAUUdTsdT | 29.0 |
| | AD-35872.1 | AAUUUUGGGCUGUGGCUGCdTsdT | 41.5 |
| | AD-35831.1 | uAAUUUUGGGCUGUGGCUGdTsdT | 44.3 |
| | AD-35837.1 | AuAAUUUUGGGCUGUGGCUdTsdT | 23.9 |
| | AD-35843.1 | uACcAcAuAAUUUUGGGCUdTsdT | 37.3 |
| | AD-35849.1 | UuACcAcAuAAUUUUGGGCdTsdT | 12.6 |
| | AD-35855.1 | uAGUcAGCCUuACcAcAuAdTsdT | 21.2 |
| | AD-35861.1 | AuAGUcAGCCUuACcAcAUdTsdT | −23.7 |
| | AD-35867.1 | AAuAGUcAGCCUuACcAcAdTsdT | 50.5 |
| | AD-35873.1 | AAAuAGUcAGCCUuACcACdTsdT | 34.2 |
| | AD-35832.1 | uAAAuAGUcAGCCUuACcAdTsdT | 78.3 |
| | AD-35838.1 | uAcAuAAAuAGUcAGCCUUdTsdT | 41.6 |
| | AD-35844.1 | UUGuAcAuAAAuAGUcAGCdTsdT | 26.8 |
| | AD-35850.1 | AUUGuAcAuAAAuAGUcAGdTsdT | 66.3 |
| | AD-35856.1 | UUCUCUGAAUUGuAcAuAAdTsdT | 80.4 |
| | AD-35862.1 | AUUCUCUGAAUUGuAcAuAdTsdT | 43.0 |
| | AD-35868.1 | AAAUUCUCUGAAUUGuAcAdTsdT | 75.6 |
| | AD-35874.1 | uAAAUUCUCUGAAUUGuACdTsdT | 67.5 |

### Example 8

[0926] Transiently transfected siRNAs in DG44 suspension cultures show significant and long term interference for up to 18 days at concentrations as low as 0.1 nM.

[0927] RNA Interference of Suspension Cultures Grown at Different Temperatures:

[0928] GFP expressing CHO DG44 cells that are stably transfected with a CMV-GFP construct (Stratagene, Santa Clara, Calif.) were seeded at day 0 in wells of 96 well microtiter plates (at 2×10⁴ cells per well for 37° C. cells, and 10⁵ cells per well for 28° C. cells), and were transiently transfected with siRNAs against GFP at 0.1, 1, and 10 nM (formulated with LIPOFECTAMINE® RNAiMax reagent), also at day 0. GFP expression was measured fluorometrically; inhibition of expression (expressed as % of expression compared to RNAiMax only controls at the respective temperatures and times). Inhibition of expression was monitored for up to 18 days after the initial siRNA transfection.

[0929] Control Experiments:

[0930] Expression of GFP in the CHO DG44 cells that were either untreated or RNAiMax only treated were monitored over time. The results are shown if FIG. 20 (untreated) and FIG. 21 (treated with lipid (RnaiMax only, no siRNAs). GFP is expressed over the course of the entire time period; however, expression of GFP in the 28° C. cells eventually became much higher, indicating continued protein expression, even in the absence of cell division (FIGS. 20 and 21).

[0931] The lipid treated controls (FIG. 20) were used as controls for measuring efficacy of RNA interference. The graphs in FIG. 22A-22C show significant inhibition of expression of GFP at siRNA concentrations as low as 0.1 nM (FIG. 22A). Furthermore, inhibition of expression was maintained as long as the measurements were taken (i.e., in some cases, up to 18 days after initial expression)

### Example 13

### Scalable siRNA Uptake Protocol for CHO Cells Grown in a 40 L Bioreactor

[0932] As known to those of skill in the art liposome mediated delivery of siRNA using lipid polynucleotide carriers is commonly used in research applications, however, as described in PCT publication WO 2009/012173 (filed Jul. 11, 2008), the use of lipid polynucleotide carriers, e.g., common liposome transfection reagents, has been found to be detrimental when used in bioprocessing of protein. Polynucleotide carriers have been reported to be deleterious to the growth of host cells at the concentrations typically used presumably due to toxicity such that they impair the ability of host cells to produce the desired biological material on an industrial level. In addition polynucleotide carriers have been observed to cause adverse and unwanted changes in the phenotype of host cells, e.g., CHO cells, compromising the ability of the host cells to produce the biological product of interest. Accordingly, the artisan would expect that the use of such polynucleotide carriers would hinder a cells ability to produce a desired protein. Surprisingly, we have found, as described throughout herein, that RNA effector molecules (e.g., targeting BAX, BAC and/or LDH) can be delivered transiently to host cells in culture by using polynucleotide carriers (e.g., liposome mediated delivery) during the bioprocessing procedure in large scale cultures (e.g., 1 L and, e.g., 40 L) without detrimental effects on the cells under conditions tested on the cells, e.g., cell viability and density is maintained. Thus, large scale production of biological products can be done on an industrial scale using lipid reagents to facilitate RNA effector uptake in cells when they are in culture (e.g., suspension culture), for example, to result in effective transient modulation of gene expression that improve production of biological products (e.g., polypeptides).

[0933] Furthermore, we have studied various lipid compositions to identify efficient uptake enhancing reagents that promote efficient siRNA uptake into production cell lines with minimal impact on cell growth and viability. We had earlier demonstrated greater than 90% reduction in LDH activity (using siRNA directed against LDH) in 96-well plate cultures while screening a panel of quaternary cationic lipid formulations (data not shown). In this example, we show that siRNA formulated with P8 as an uptake inducer (see, e.g., Table 19) is better tolerated than commercial RNAiMax with respect to the respective formulations effect on cell density and cell viability in 50 ml cultures. We scaled up our cultures to a large scale bioreactor and found that using P8 formulated siRNA directed against LDH achieved 80%-90% reduction in LDH activity for 6 days with a single 1 nM dose. We then scaled up our cultures to 3 L and 40 L. We found that formulation P8 promoted efficient uptake of an siRNA directed against lactate dehydrogenase (LDH-A) and resulted in >90% of LDH reduction of LDH activity in CHO cells grown in either a 3 L or 40 L bioreactor. Surprisingly, in scale-up experiments comparing 3 L to 40 L cultures, there is perfect linearity of silencing efficiency. The results are shown herein.

### Materials/Methods

[0934] Formulation of Transfection Reagents:

[0935] Cationic lipid and colipids (e.g., cholesterol and DOPE) in chloroform were dried by a N₂ stream followed by vacuum-desiccation to remove residual organic solvent. The dried lipid film was hydrated using 10 mM HEPES buffer, pH 7.4 at 37° C. The formed liposomes were extruded to yield an average particle size of ˜200 nm.

[0936] Testing of Transfection Reagents on Plated GFP-HO Cells:

[0937] Nine different proprietary transfection formulations (see e.g., Table 19) and Lipofectamine RNAiMax (Invitrogen) were used to deliver 1 nM of a potent siRNA against GFP to a GFP-CHO cell line. RNAiMax was tested at 0.4 μL/mL and the nine formulations were used at 0.5, 1, and 2.5 μg/mL. Mixtures of transfection reagents and siRNA were made in black optical bottom 96 well plates and then cells were added. After 2 days, the relative GFP intensities were measured using a fluorescent plate reader.

[0938] Testing of Transfection Reagents on Suspended DG44 CHO Cells:

[0939] The three most active transfection agents (K8, L8 and P8) from the GFP-CHO testing were used to transfect suspended CHO cells. Aliquots of 5 μL, of 10 μM LDH-A siRNA were added to a tube and 500 μL CD DG44 media added to it. Transfection reagent was added to the mixture, the tube mixed by pipette aspiration and incubated at room temperature for 15 min. Then the mixture was added to 49.5 mL of media containing 200,000 cells/mL. The flask was incubated and shaken at 120 rpm for several days. LDH activity was measured by VetTest 8008 slide analyzer.

[0940] 40 L Transfection:

[0941] DG44 cells were grown in Invitrogen CD DG44 media. To seed the 40 L bioreactor, cells were taken from four 1 L disposable bioreactors. The starting cell density in the 40 L of culture was 120,000 cells/mL. The bioreactor was allowed to equilibrate with the cells added for 1 hr prior to transfection. For transfection, 400 μL, of LDH-A siRNA (pair of SEQ ID NO:3152560 and NO:3152561) (100 uM stock solution) was added to 400 mL of media and mixed. Then 32 mL of 1 mg/mL P8 reagent was added and again mixed. This was allowed to incubate for 15 min at room temperature and then added to the 40 L bioreactor. Cell density and viability were measured using a Vi-Cell cell counter, and to determine the efficiency of transfection, LDH activity was measured using a VetTest 8008 slide analyzer.

### Results and Discussion

[0942] Evaluation of Nine Cationic Lipid Formulations for Uptake Efficiency in CHO Cells in Shake Flasks:

[0943] To gauge the effectiveness of the lipid formulations, they were used with a potent GFP siRNA in GFP-CHO cells. Compared with an effective concentration of LIPOFECTAMINE® RNAiMAx reagent, three compounds were active (FIG. 23). These formulations were designated K8, L8, and P8. No obvious cytotoxicity was observed at the concentrations tested of any formulation.

[0944] Because K8 was the most active formulation in the GFP-CHO cells, it was tested using DG44 CHO cells in 50 mL of culture in a 250 mL shake flask and a potent LDH siRNA. A range of K8 concentrations was tested along with an effective concentration of LIPOFECTAMINE® RNAiMAx transfection reagent. After 3 days, LDH activity was lower in cultures where K8 was used (FIG. 24). There was also a higher cell density in flasks that had 0.6 ng/mL or 1.2 ng/mL of K8 compared to RNAiMAx reagent. It appears that RNAiMAx reagent inhibited growth of CHO cell in suspension when compared to K8-treated cells. The highest concentrations of K8 reduced the cell density, even though the LDH activity was still reduced.

[0945] Because some transfection reagents didn not seem to have the same activity in shake flasks as in a 96-well plate, the three most active formulations were tested similarly in 50 mL of DG44 culture in 250 mL shake flasks. Surprisingly, formulation P8, which was only marginally active against GFP-CHO cells, performed the best using suspended DG44 cell culture (FIG. 25). After 5 days, 0.8 μg/mL of P8 resulted in the most LDH activity knockdown. Also, it is significant that the cell density in the presence of P8 was greater than or equal to control cells without transfection reagent added. P8 at a final concentration of 0.8 μg/mL has been used numerous times in smaller bioreactors and (data not shown) and was tested in a 40 L system.

[0946] FIG. 26 shows cell density (FIG. 26A) or % cell viability (FIG. 26B) over time in suspension CHO cell 50 mL shake flasks using P8 formulation or commercial formulation RNAiMax at the recommended concentration. Lipid formulations were dosed onto cells at day 0. P8 was found to be better tolerated than commercial RNAiMax. FIG. 30 is a graph that shows that when using the P8 formulated siRNA directed against Lactate Dehydrogenase (LDH) achieves 80%-90% knockdown of LDH activity for 6 days with a single 1 nM dose in a 1 L bioreactor. Knockdown of LDH activity was found to be durable, with effects lasting over 6 days.

[0947] Evaluation of Cationic Lipid Formulation P8 for Uptake Efficiency in a 3 L Vs 40 L Bioreactor:

[0948] FIG. 28 shows the results of a single dose of an 1 nM LDH siRNA formulated with P8 lipid on viable cell density and % LDH activity over an elapsed time of 6 days in 3 L and 40 L cultures. Surprisingly, in scale-up experiments comparing 3 L to 40 L cultures, there is perfect linearity of silencing efficiency indicating success at even larger scales. Multiple dose protocols can be used to extend the duration of effect.

[0949] Evaluation of Cationic Lipid Formulation P8 for Uptake Efficiency in a 40 L Bioreactor:

[0950] After seeding the 40 L bioreactor, the cells generally grew with a doubling time of approximately 24 hr and the cell viability was over 98% (FIG. 26B). The cells reached a peak concentration of 3.1×10⁶ cells/mL at day 5 and then began to decline. As expected in this unfed batch culture, by day 6 the cells were in decline.

[0951] The LDH activity of the siRNA treated cells was reduced as the cells were growing following seeding and transfection. The LDH activity was reduced ˜80% even as the cells had doubled over 3 times (FIG. 30). There was diminished LDH activity through the entire experiment. Based on the significantly diminished LDH activity, the transfection was successful with no detectable toxicity in the CHO cells.

[0952] These experiments show that transfection of cells in culture with siRNAs can work in the large volumes necessary for biological production.

### Example 14

### Use of RNA Effectors to Titrate Expression of Target Genes

[0953] Unlike cells with stably transfected shRNA, use of dsRNA molecules allows modulation of expression of practically any target gene within a host cell without the need for cell engineering. In addition, as mentioned previously, cells with constitutively inhibited target genes may not grow well and may display unwanted characteristics (e.g., need for special growth media or other growth conditions, increased rate of mutation, etc). Having the ability to modulate expression of a target gene at the desired point during growth of a cell or production of a biologic is therefore highly desirable.

[0954] Yet another advantage of using RNA effector molecules such as dsRNA agents that do not rely on stable transfection is the potential ability to fine-tune expression of a given target gene. In some cases it may be important to regulate expression of a target gene such that its expression level is only moderately altered (e.g., decreased by ˜50% from the untreated state) so as to avoid unwanted phenotypes or to improve the quality of biologic production. As such, we performed experiments to find conditions in which expression of a given target gene could be titrated.

[0955] On day 0, CHO DG-44 cells grown in CD DG44 media (Invitrogen), were transfected with dsRNA targeting the LDHA gene (as described herein; see e.g., Table 62) at 0 nM, 10 pM, 50 pM, 100 pM, 500 pM, 1 nM and 5 nM (final concentrations in 25 mL of culture), in a formulation containing the Lipid P, in formulation 8 (i.e., formulation “P8”; see Table 19) in a 500 μL volume. The dsRNA duplex used has an apparent EC₅₀ of ˜50 pM under similar conditions. After transfection, cells were added to a flask containing 24.5 mL of media (at a cell density of 200,000 cells/mL) and grown at 37° C. After 3 days, LDH activity was measured and normalized to cell density.

[0956] The LDH activity is shown in Table 62 below:

TABLE 62
LDH activity

| | | Via | LDH | (LDH activity/ | % |
|---|---|---|---|---|---|
| | dsRNA | den- | activ- | 106 cells)* | knock- |
| Flask | concentration | sity | ity | mL dil. | down |
| 1 | 0 LDH siRNA | 2.11 | 1489 | 776.3 | |
| 2 | 10 pM LDH siRNA | 2.08 | 1248 | 660.0 | 15.0 |
| 3 | 50 pM LDH siRNA | 2.08 | 754 | 398.8 | 48.6 |
| 4 | 100 pM LDH siRNA | 2.22 | 560 | 277.5 | 64.3 |
| 5 | 500 pM LDH siRNA | 2.22 | 335 | 166.0 | 78.6 |
| 6 | 1 nM LDH siRNA | 2.16 | 335 | 170.6 | 78.0 |
| 7 | 5 nM LDH siRNA | 2.21 | 363 | 180.7 | 76.7 |

[0957] The results show that LDH activity can be modulated to a range between 15% to greater than 75% inhibition by titrating the concentration of dsRNA. Therefore, use of RNA effector molecules such as the dsRNAs shown herein can be used to achieve a desired expression level of the target gene. In addition, based on earlier experiments (not shown), cells treated at concentrations in which partial inhibition is achieved (for example, at 10-100 pM) are expected to recover from RNA interference more rapidly than those treated at higher concentrations. As such, where it is desirable to have cells recover from inhibition of a target gene faster (i.e., inhibition of gene expression will persist for a shorter period of time), then one can provide a lower concentration of RNA effector molecule (e.g., 3× of the apparent EC₅₀ or less, for example 2× the apparent EC50, 1× the apparent EC50, etc).

[0958] The following tables exemplify target genes and siRNA sequences useful with the methods and compositions described herein.

TABLE 51
Target genes

| | | siRNA |
|---|---|---|
| Target | Description | SEQ ID NOs |
| 15-lipoxygenase-1 | arachidonate lipoxygenase 3 | 2480018-2480362 |
| Ago2 | eukaryotic translation initiation factor 2C, 2 | 255154-255411 |
| Ago3 | eukaryotic translation initiation factor 2C, 3 | 3103755-3103973 |
| Ago4 | eukaryotic translation initiation factor 2C, 4 | 1326374-1326705 |
| APAFI | apoptotic peptidase activating factor 1 | 2262408-2262743 |
| ApoE | apolipoprotein E | 3172384-3172483 |
| asparagine deamidase | N-terminal Asn amidase | 1999410-1999756 |
| glutamine deamidase | WDYHV motif containing 1; aka Protein | 2478078-2478376 |
| | NH2-terminal glutamine deamidase | |
| ATF4 | activating transcription factor 4 | 1552067-1552460 |
| ATF6 | activating transcription factor 6 | 570138-570498 |
| ATF6P | activating transcription factor 6 beta | 471680-472070 |
| B4GalT1 | UDP-Gal: βGlcNAc β1,4-galactosyltransferase, | 2528454-2528763 |
| | polypeptide 1 | additional |
| | | galactosyl & |
| | | galactosaminyl- |
| | | transferases |
| | | elsewhere herein |
| BAD | BCL2-associated agonist of cell death | 3049436-3049721 |
| BAG-1 | BCL2-associated athanogene | 1683576-1683895 |
| Bcl-w | BCL2-like 2 | 477629-477999 |
| Bcl-xL | BCL2-like 1 | 728838-729216 |
| Bid | BH3 interacting domain death agonist | 2582517-2582823 |
| Bik | BCL2-interacting killer (apoptosis-inducing) | 2899985-2900289 |
| BIM/BimL | BCL2-like 11 (apoptosis facilitator) | 1960442-1960764 |
| BNIP3 | BCL2/adenovirus E1B 19 kDa interacting protein 3 | 1740754-1741152 |
| calnexin | calnexin | 61559-61785 |
| calreticulin | Calreticulin | 895691-896051 |
| CASP2 | Caspase 2 | 2718675-2719039 |
| CASP3 | Caspase 3 | 1924836-1925195 |
| CASP6 | Caspase 6 | 2408466-2408843 |
| CASP7 | Caspase 7 | 2301618-2301960 |
| CASP8 | Caspase 8 | 2995593-2995870 |
| CASP9 | Caspase 9 | 1412589-1412860 |
| CCNA2/Cyclin A2 | cyclin A2 | 1151948-1152332 |
| CCNB1/Cyclin B1 | Cyclin B1 | 1298863-1299236 |
| CCNB2/Cyclin B2 | Cyclin B2 | 1489394-1489722 |
| CCND1/Cyclin D1 | cyclin D1 | 139242-139629 |
| CCND2/Cyclin D2 | cyclin D2 | 960077-960401 |
| CCND3/Cyclin D3 | Cyclin D3 | 1040554-1040910 |
| CCNE1/Cyclin E1 | cyclin E1 | 1980613-1981009 |
| CCNE2/Cyclin E2 | Cyclin E2 | 2904183-2904530 |
| CDK2 | cyclin-dependent kinase 2 | 1193336-1193684 |
| CDK4 | cyclin-dependent kinase 4 | 1609522-1609852 |
| Cmas | cytidine monophosphate N-acetylneuraminic | 1633101-1633406 |
| | acid synthetase | |
| Cofilin (CFL1) | Cofilin | 1914036-1914356 |
| cytochrome P4502E1 | | |
| cytoplasmic actin | capping protein (actin filament) muscle Z-line, | 235917-236159 |
| capping protein (CapZ) | α1 | |
| dihydrofolate reductase | | 1739672-1740059 |
| Eri1 | exoribonuclease 1 | 3244117-3244216 |
| Ezrin (VIL2) | Ezrin | 339220-339540 |
| fucosyltransferase/ | Fucosyltransferases | FUT8 dsRNA: |
| FUT8 | | 209841-210227 |
| | | additional seqs |
| | | elsewhere herein |
| GLUT1 | solute carrier family 2 (facilitated glucose | 438155-438490 |
| | transporter), member 1 | additional seqs |
| | | elsewhere herein |
| glutaminase | | 105170-105438 |
| GMDS | GDP mannose dehydratase | 1688202-1688519 |
| Gne | glucosamine (UDP-N-acetyl)-2-epimerase/ | 2073971-2074368 |
| | N-acetylmannosamine kinase; | |
| | UDP-N-acetylglucosamine-2-epimerase/ | |
| | N-acetylmannosamine kinase | |
| GRP94 | heat shock protein 90 kDa β(Grp94), member 1 | 180574-180954 |
| HR | Hairless | 1110794-1111079 |
| Hsp40 | DnaJ (Hsp40) homolog | dsRNA sequences |
| | | targeting Hsp40 |
| | | elsewhere herein |
| interferon receptor | IFNAR1 | 2436536-2436863 |
| IRE1 | endoplasmic reticulum (ER) to nucleus signaling 1 | 3179284-3179383 |
| Laminin A | | 5: 48814-49139 |
| | | 2: 2954307-2954650 |
| | | 3: 3160721-3160820 |
| lysosomal V-type | | For sequences of |
| ATPase | | the various |
| | | subunits please see |
| | | table below |
| Mcl-1 | myeloid cell leukemia sequence 1 (BCL2-related) | 312684-312913 |
| N-acetylgalactosaminy- | | 2876241-2876595, |
| transferase T-4 | | see also, e.g., |
| | | Table 6 |
| NAD(p)H oxidase | | See table |
| | | elsewhere herein |
| | | for cytochrome |
| | | reductases |
| NADH cytochrome | | |
| b5 reductase | | |
| NADPH cytochrome | | |
| c2 reductase | | |
| NAPH cytochrome | | |
| c reductase | | |
| B4GalT6. | and UDP-Gal: βGlcNAc β1,4- | 3154201-3154224 |
| | galactosyltransferase, polypeptide 6 | (sense) and |
| | | 3154225-3154248 |
| P10 | S100 calcium binding protein A10 (calpactin) | 3013998-3014274 |
| p115 | USO1 vesicle docking protein homolog (yeast) | 89340-89737 |
| P14ARF/p16INK4a | cyclin-dependent kinase inhibitor 2A | 2B: 2895015-2895359 |
| | (melanoma, p16, inhibits CDK4) | 2C: 1969649-1970047 |
| | | 2D: 1990790-1991181 |
| P21 | cyclin-dependent kinase inhibitor 1A (p21, | 2659502-2659871 |
| | Cip1) | |
| P27 | proteasome (prosome, macropain) 26S subunit, | 3199397-3199496 |
| | non-ATPase, 9 | |
| p53 | tumor protein p53; | 1649857-1650157 |
| | transformation related protein p53 | |
| P57 | cyclin-dependent kinase inhibitor 1C (p57, | 1A: 2659502-2659871 |
| | Kip2) | 1B: 2731076-2731440 |
| peptidyl prolyl | peptidylprolyl isomerase | 1074139-1074475, |
| isomerase | | 1085316-1085607, |
| | | 1127061-1127426, |
| | | 1649170-1649515, |
| | | 1780604-1780923, |
| | | 2197146-2197532, |
| | | 2253978-2254373, |
| | | 2261765-2262058, |
| | | 2275330-2275633, |
| | | 2579547-2579908, |
| | | 2857424-2857802, |
| | | 3136158-3136181, |
| | | 3262205-3262304 |
| PERK | eukaryotic translation initiation factor | 1396283-1396617; |
| | 2-kinase 3 | Kinase 4: |
| | | 582987-583297; |
| | | Kinase 1: |
| | | 1037660-1038052 |
| peroxidase | | siRNAs targeting |
| | | Glutathione |
| | | peroxidases |
| | | include: |
| | | 2439217-2439612 |
| | | 2560559-2560895 |
| | | 2703865-2704225 |
| | | 3151589-3151685 |
| | | See table below |
| | | for enzymes |
| | | possessing |
| | | peroxidase activity |
| phosphatidylinositol- | phosphatase and tensin homolog | 69091-69404 |
| 3,4,5-trisphosphate | | |
| 3-phosphatase (PTEN) | | |
| protein disulfide | | These siRNAs |
| isomerase | | target genes that |
| | | have protein |
| | | disulfide |
| | | isomerase activity: |
| | | 72748-72996 |
| | | 335875-336225 |
| | | 488676-489039 |
| | | 774355-774677 |
| | | 898511-898822 |
| | | 966735-967056 |
| protein | protein O-fucosyltransferase 1 | 2321807-2322122 |
| O-fucosyltransferase | | |
| PUMA | BCL2 binding component 3 | 1712045-1712425 |
| SLC35A1 | solute carrier family 35 (CMP-sialic acid | 3154345-3154368; |
| | transporter), member 1 | 1367952-1368265 |
| ST3 β-galactoside α- | | 681105-681454 |
| 2,3-sialyltransferase 1 | | |
| ST3 β-galactoside α- | | 1435989-1436317 |
| 2,3-sialyltransferase 2. | | |
| ST3 β-galactoside α- | | 1131123-1131445 |
| 2,3-sialyltransferase 3 | | |
| ST3 β-galactoside α- | | 707535-707870 |
| 2,3-sialyltransferase 4 | | |
| ST3 β-galactoside α- | | 1155324-1155711 |
| 2,3-sialyltransferase 5 | | |
| ST6 (a-N-acetyl- | | 1391079-1391449 |
| neuraminy 1-2,3-β- | | |
| galactosyl-1,3)-N- | | |
| acetylgalactosaminide α- | | |
| 2,6-sialyltransferase 6 | | |
| TSTA3 | tissue specific transplantation antigen P35B | 1839578-1839937 |
| xanthine oxidase (XO) | Aka xanthine dehydrogenase | 374846-375216 |
| xylose transferase | Xylosyltansferase II | 1554774-1555054 |
| α galactosidase | | 1600968-1601288 |
| β-galactosidase | | 690601-690989 |

TABLE 52
GLUTs (glucose transporters)

| SEQ | | siRNA |
|---|---|---|
| ID NO: | Description | SEQ ID NOs: |
| 1375 | solute carrier family 2 (facilitated | 438155-438490 |
| | glucose transporter), member 1 | |
| 6869 | solute carrier family 2, (facilitated | 2325698-2325997 |
| | glucose transporter), member 8 | |
| 7909 | solute carrier family 2 (facilitated | 2669929-2670303 |
| | glucose transporter), member 13 | |

TABLE 53
Fucosyltransferases

| SEQ | | | siRNA |
|---|---|---|---|
| ID NO: | consL | Description | SEQ ID NOs: |
| 676 | 2680 | fucosyltransferase 8 | 209841-210227 |
| 2783 | 1861 | protein O-fucosyltransferase 2 | 916726-917035 |
| 6857 | 913 | protein O-fucosyltransferase 1 | 2321807-2322122 |
| 8126 | 593 | fucosyltransferase 11 | 2740650-2740952 |

TABLE 54
DnaJ (Hsp40) homologs

| SEQ | | | Avg | siRNA |
|---|---|---|---|---|
| ID NO: | consL | Description | Coverage | SEQ ID NOs: |
| 1932 | 2102 | Subfamily A, member 1 | 18.764 | 628385-628725 |
| 893 | 2541 | Subfamily A, member 2 | 15.853 | 276519-276904 |
| 1925 | 2104 | Subfamily A, member 3 | 15.15 | 625909-626254 |
| 3157871 | 528 | Subfamily A, member 4 | 0.656 | 3215391-3215490 |
| 2076 | 2052 | Subfamily B, member 1 | 9.75 | 677203-677558 |
| 5350 | 1247 | Subfamily B, member 11 | 17.061 | 1784585-1784897 |
| 5347 | 1248 | Subfamily B, member 12 | 3.209 | 1783440-1783810 |
| 9545 | 230 | Subfamily B, member 13 | 0.22 | 3133435-3133598 |
| 3157418 | 441 | Subfamily B, member 14 | 0.238 | 3228617-3228716 |
| 4158 | 1511 | Subfamily B, member 2 | 5.045 | 1381610-1381931 |
| 3158137 | 878 | Subfamily B, member 3 | 1.052 | 3283549-3283648 |
| 5405 | 1236 | Subfamily B, member 4 | 1.568 | 1804161-1804465 |
| 8128 | 593 | Subfamily B, member 5 | 0.47 | 2741242-2741540 |
| 2619 | 1902 | Subfamily B, member 6 | 14.116 | 860762-861101 |
| 5149 | 1289 | Subfamily B, member 9 | 0.929 | 1715305-1715623 |
| 4159 | 1510 | Subfamily C, member 1 | 3.933 | 1381932-1382211 |
| 546 | 2787 | Subfamily C, member 10 | 22.023 | 171304-171555 |
| 1143 | 2405 | Subfamily C, member 11 | 15.429 | 360296-360688 |
| 3157835 | 1640 | Subfamily C, member 13 | 0.983 | 3240717-3240816 |
| 412 | 2946 | Subfamily C, member 14 | 7.271 | 133746-134002 |
| 9442 | 267 | Subfamily C, member 15 | 0.656 | 3117145-3117332 |
| 1960 | 2089 | Subfamily C, member 16 | 1.225 | 637892-638209 |
| 6631 | 962 | Subfamily C, member 17 | 1.346 | 2243108-2243387 |
| 7277 | 817 | Subfamily C, member 18 | 0.36 | 2460206-2460591 |
| 9036 | 381 | Subfamily C, member 19 | 1.461 | 3027351-3027657 |
| 2513 | 1930 | Subfamily C, member 2 | 34.4 | 825067-825402 |
| 2721 | 1878 | Subfamily C, member 21 | 8.299 | 895321-895690 |
| 5660 | 1176 | Subfamily C, member 22 | 4.382 | 1893667-1894030 |
| 8661 | 464 | Subfamily C, member 24 | 2.068 | 2917681-2918006 |
| 6150 | 1068 | Subfamily C, member 25 | 0.929 | 2072060-2072449 |
| 8171 | 583 | Subfamily C, member 27 | 0.773 | 2754733-2755101 |
| 3157934 | 1241 | Subfamily C, member 28 | 2.604 | 3271096-3271195 |
| 1054 | 2449 | Subfamily C, member 3 | 10.89 | 330430-330812 |
| 6648 | 959 | Subfamily C, member 30 | 1.456 | 2249119-2249439 |
| 7348 | 800 | Subfamily C, member 4 | 4.236 | 2483678-2484063 |
| 2403 | 1958 | Subfamily C, member 5 | 5.417 | 787385-787676 |
| 9017 | 388 | Subfamily C, member 6 | 0.078 | 3022706-3022949 |
| 3188 | 1749 | Subfamily C, member 7 | 20.562 | 1055444-1055806 |
| 5052 | 1312 | Subfamily C, member 8 | 41.714 | 1682260-1682641 |
| 7247 | 827 | Subfamily C, member 9 | 4.989 | 2450765-2451126 |

TABLE 55
Heat Shock proteins

| SEQ | | | Avg | siRNA |
|---|---|---|---|---|
| ID NO: | consL | Description | Cov | SEQ ID NOs: |
| 444 | 2900 | heat shock protein 4 | 15.95 | 142820-143094 |
| 476 | 2865 | heat shock 105 kDa/110 kDa protein 1 | 19.863 | 151195-151420 |
| 485 | 2858 | AHA1, activator of heat shock protein | 16.103 | 153831-154084 |
| | | ATPase homolog 2 (yeast) | | |
| 579 | 2758 | heat shock protein 90, beta (Grp94), member 1 | 606.207 | 180574-180954 |
| 594 | 2744 | heat shock protein 90, alpha (cytosolic), class | 93.844 | 184698-184927 |
| | | A member 1 | | |
| 827 | 2572 | heat shock protein 9 | 28.56 | 255926-256325 |
| 941 | 2519 | heat shock protein 5 | 729.81 | 292590-292837 |
| 977 | 2496 | heat shock protein 90 alpha (cytosolic), class | 609.471 | 304274-304591 |
| | | B member 1 | | |
| 1543 | 2232 | heat shock protein 1 (chaperonin) | 134.366 | 494743-495086 |
| 2029 | 2068 | heat shock protein 8 | 891.015 | 660889-661277 |
| 2272 | 1990 | heat shock factor 2 | 2.598 | 743398-743788 |
| 2756 | 1869 | heat shock factor 1 | 25.227 | 907582-907889 |
| 2974 | 1807 | heat shock protein 2 | 5.538 | 982428-982785 |
| 3063 | 1776 | heat shock protein 8 | 38.69 | 1012333-1012621 |
| 3765 | 1608 | heat shock protein 14 | 20.386 | 1250279-1250587 |
| 4038 | 1541 | heat shock protein 70 family, member 13 | 2.835 | 1341514-1341853 |
| 4337 | 1473 | HSPA (heat shock 70 kDa) binding protein, | 11.687 | 1441933-1442264 |
| | | cytoplasmic cochaperone 1 | | |
| 5002 | 1323 | AHA1, activator of heat shock protein | 93.621 | 1665415-1665746 |
| | | ATPase homolog 1 (yeast) | | |
| 5756 | 1155 | heat shock factor binding protein 1 | 28.266 | 1928608-1928970 |
| 7697 | 715 | heat shock protein, -crystallin-related, B6 | 1.268 | 2598077-2598438 |
| 8336 | 539 | heat shock protein 1 | 3.124 | 2809108-2809434 |
| 8405 | 517 | heat shock protein 1 (chaperonin 10) | 4.477 | 2833031-2833420 |
| 9679 | 173 | heat shock protein 1B | 0.091 | 3147029-3147080 |

TABLE 56
Lysosomal V-type ATPase subunits

| SEQ | | siRNA |
|---|---|---|
| ID NO: | Description | SEQ ID NOs: |
| 198 | ATPase, H+ transporting, lysosomal V1 subunit A | 71796-72111 |
| 1027 | ATPase, H+ transporting, lysosomal V1 subunit B2 | 321673-321927 |
| 1796 | ATPase, H+ transporting, lysosomal accessory protein 2 | 582376-582610 |
| 2296 | ATPase, H+ transporting, lysosomal V0 subunit A1 | 751583-751949 |
| 2532 | ATPase, H+ transporting, lysosomal accessory protein 1 | 831609-831895 |
| 2762 | ATPase, H+ transporting, lysosomal V1 subunit H | 909697-910010 |
| 3329 | T-cell, immune regulator 1, ATPase, H+ transporting, | 1103103-1103418 |
| | lysosomal V0 protein A3 | |
| 4324 | ATPase, H+ transporting, lysosomal V0 subunit D1 | 1437602-1437944 |
| 4347 | ATPase, H+ transporting, lysosomal V0 subunit A2 | 1445278-1445615 |
| 5454 | ATPase, H+ transporting, lysosomal V1 subunit E1 | 1821367-1821755 |
| 5620 | ATPase, H+ transporting, lysosomal V1 subunit D | 1879531-1879860 |
| 5788 | ATPase, H+ transporting, lysosomal V0 subunit C | 1940302-1940675 |
| 5816 | ATPase, H+ transporting, lysosomal V1 subunit C1 | 1950210-1950528 |
| 6117 | ATPase, H+ transporting, lysosomal V1 subunit G1 | 2059770-2060150 |
| 6486 | ATPase, H+ transporting, lysosomal V0 subunit B | 2192145-2192538 |
| 7910 | ATPase, H+ transporting, lysosomal V0 subunit E2 | 2670304-2670626 |
| 7976 | ATPase, H+ transporting, lysosomal V1 subunit F | 2692263-2692620 |
| 7987 | ATPase, H+ transporting, lysosomal V0 subunit E | 2695797-2696168 |
| 8582 | ATPase, H+ transporting, lysosomal V1 subunit G2 | 2890746-2891087 |
| 3157707 | ATPase, H+ transporting, lysosomal V0 subunit D2 | 3281849-3281948 |

TABLE 57
Peroxidase

| SEQ | | | Avg | siRNA SEQ |
|---|---|---|---|---|
| ID NO: | consL | Description | Cov | ID NOs: |
| 442 | 2901 | heterogeneous nuclear ribonucleoprotein L-like | 11.591 | 142215-142508 |
| 1706 | 2173 | catalase | 18.084 | 551058-551444 |
| 3107 | 1768 | prostaglandin-endoperoxide synthase 2 | 0.699 | 1027449-1027832 |
| 6122 | 1074 | peroxiredoxin 3 | 15.819 | 2061664-2062027 |
| 6608 | 967 | peroxiredoxin 4 | 81.791 | 2235293-2235671 |
| 6741 | 937 | peroxiredoxin 6 | 9.666 | 2281128-2281515 |
| 6816 | 921 | peroxidasin homolog (Drosophila) | 0.334 | 2307638-2308007 |
| 7213 | 835 | glutathione peroxidase 1 | 10.976 | 2439217-2439612 |
| 7386 | 792 | peroxiredoxin 1 | 1.522 | 2496217-2496481 |
| 7582 | 743 | glutathione peroxidase 4 | 73.452 | 2560559-2560895 |
| 7749 | 702 | peroxiredoxin 2 | 15.903 | 2616024-2616366 |
| 8011 | 630 | glutathione peroxidase 8 (putative) | 15.42 | 2703865-2704225 |
| 8179 | 582 | peroxiredoxin 5 | 3.766 | 2757414-2757689 |
| 8565 | 482 | glutathione S-transferase kappa 1 | 1.46 | 2885542-2885890 |
| 8687 | 461 | iodotyrosine deiodinase | 0.299 | 2926039-2926366 |
| 9756 | 131 | glutathione peroxidase 3 | 0.087 | 3151589-3151685 |

TABLE 58
Protein Disulfide Isomerase Activity

| SEQ | | | Avg | siRNA |
|---|---|---|---|---|
| ID NO: | consL | Description | Cov | SEQ ID NOs: |
| 201 | 3342 | thioredoxin-related transmembrane protein 3 | 6.308 | 72748-72996 |
| 1071 | 2440 | prolyl 4-hydroxylase, beta polypeptide | 262.952 | 335875-336225 |
| 1525 | 2239 | protein disulfide isomerase associated 4 | 31.944 | 488676-489039 |
| 2364 | 1967 | protein disulfide isomerase associated 3 | 173.819 | 774355-774677 |
| 2730 | 1874 | protein disulfide isomerase associated 6 | 699.725 | 898511-898822 |
| 2929 | 1822 | protein disulfide isomerase associated 5 | 42.884 | 966735-967056 |

TABLE 59
Signal Recognition Particle

| SEQ | | | Avg | siRNA |
|---|---|---|---|---|
| ID NO: | consL | Description | Cov | SEQ ID NOs: |
| 348 | 3031 | signal recognition particle 72 | 13.053 | 115319-115586 |
| 498 | 2844 | signal recognition particle receptor (docking protein) | 23.636 | 157648-157932 |
| 1200 | 2382 | signal recognition particle 68 | 40.31 | 379331-379670 |
| 1535 | 2235 | signal recognition particle 54a | 4.713 | 492211-492502 |
| 2108 | 2042 | signal recognition particle 54b | 7.508 | 687895-687922 |
| 3277 | 1725 | signal recognition particle 54C | 3.004 | 1085608-1085800 |
| 6222 | 1053 | signal recognition particle 9 | 6.194 | 2097989-2098388 |
| 6901 | 903 | signal recognition particle receptor, B subunit | 8.479 | 2335474-2335804 |
| 7846 | 677 | signal recognition particle 14 | 2.01 | 2648705-2649066 |
| 9140 | 355 | signal recognition particle 19 | 0.4 | 3053860-3054133 |
| 8427 | 513 | retinitis pigmentosa 9 (human) | 0.65 | 2840748-2841112 |

TABLE 60
Example kinase targets

| SEQ | | siRNA |
|---|---|---|
| ID NO: | Description | SEQ ID NOs: |
| 2 | TAO kinase 1 | 10148-10532 |
| 16 | homeodomain interacting protein kinase 1 | 14439-14801 |
| 26 | dual-specificity tyrosine-(Y)-phosphorylation | 17461-17750 |
| | regulated kinase 1a | |
| 67 | casein kinase 2, alpha 1 polypeptide | 30901-31248 |
| 74 | mitogen-activated protein kinase kinase kinase | 33333-33668 |
| | kinase 4 | |
| 80 | Rho-associated coiled-coil containing protein kinase 2 | 35242-35563 |
| 92 | calcium/calmodulin-dependent serine protein kinase | 39068-39431 |
| | (MAGUK family) | |
| 105 | cDNA sequence BC033915 | 43314-43658 |
| 131 | mitogen-activated protein kinase 9 | 51635-51907 |
| 135 | Braf transforming gene | 52754-53026 |
| 153 | serine/arginine-rich protein specific kinase 2 | 57998-58262 |
| 160 | ribosomal protein S6 kinase, polypeptide 1 | 60208-60510 |
| 199 | protein kinase C, alpha | 72112-72439 |
| 211 | AP2 associated kinase 1 | 75589-75893 |
| 215 | AXL receptor tyrosine kinase | 76768-77080 |
| 249 | discoidin domain receptor family, member 2 | 86688-86974 |
| 272 | Rho-associated coiled-coil containing protein kinase 1 | 94052-94292 |
| 301 | MAP/microtubule affinity-regulating kinase 1 | 102310-102609 |
| 345 | glycogen synthase kinase 3 beta | 114424-114743 |
| 349 | adrenergic receptor kinase, beta 1 | 115587-115982 |
| 378 | tousled-like kinase 1 | 124295-124551 |
| 416 | PCTAIRE-motif protein kinase 1 | 134792-135023 |
| 420 | MAP/microtubule affinity-regulating kinase 2 | 135926-136274 |
| 432 | cyclin D1 | 139242-139629 |
| 434 | mitogen-activated protein kinase kinase kinase 7 | 139905-140195 |
| 448 | casein kinase 1, delta | 144005-144272 |
| 454 | PFTAIRE protein kinase 1 | 145534-145792 |
| 455 | PRP4 pre-mRNA processing factor 4 homolog B (yeast) | 145793-146023 |
| 459 | serine/threonine kinase 39, STE20/SPS1 | 146854-147131 |
| | homolog (yeast) | |
| 490 | Fyn proto-oncogene | 155354-155611 |
| 510 | calcium/calmodulin-dependent protein kinase II γ | 161048-161267 |
| 543 | Janus kinase 2 | 170408-170768 |
| 559 | carbamoyl-phosphate synthetase 2, aspartate | 174646-174897 |
| | transcarbamylase, and dihydroorotase | |
| 600 | casein kinase 1, gamma 1 | 186716-187114 |
| 634 | leucine-rich repeat kinase 1 | 197327-197719 |
| 644 | mitogen-activated protein kinase 6 | 200294-200550 |
| 662 | calcium/calmodulin-dependent protein kinase II, δ | 205498-205717 |
| 681 | MAP/microtubule affinity-regulating kinase 3 | 211317-211594 |
| 689 | budding uninhibited by benzimidazoles 1 homolog | 213750-213996 |
| | (S. cerevisiae) | |
| 725 | LIM motif-containing protein kinase 2 | 224252-224614 |
| 729 | homeodomain interacting protein kinase 3 | 225660-225908 |
| 730 | microtubule associated serine/threonine kinase 2 | 225909-226275 |
| 732 | transforming growth factor, beta receptor I | 226652-227037 |
| 829 | protein kinase, cAMP dependent, catalytic, beta | 256726-256960 |
| 836 | mitogen-activated protein kinase kinase kinase 12 | 258825-259201 |
| 864 | intestinal cell kinase | 267348-267605 |
| 870 | mitogen-activated protein kinase kinase kinase 3 | 269115-269501 |
| 871 | nemo like kinase | 269502-269739 |
| 873 | cyclin G associated kinase | 270072-270372 |
| 878 | mitogen-activated protein kinase 3 | 271504-271774 |
| 907 | G protein-coupled receptor kinase 6 | 281096-281476 |
| 929 | Rous sarcoma oncogene | 288625-288989 |
| 969 | thymoma viral proto-oncogene 2 | 301570-301889 |
| 1006 | large tumor suppressor 2 | 314156-314545 |
| 1049 | casein kinase 1, gamma 3 | 328602-328958 |
| 1057 | serine/threonine kinase 38 | 331497-331885 |
| 1074 | MAP kinase-activated protein kinase 2 | 336742-337085 |
| 1082 | tousled-like kinase 2 (Arabidopsis) | 339541-339778 |
| 1083 | serine/threonine kinase 40 | 339779-340105 |
| 1094 | SCY1-like 1 (S. cerevisiae) | 343589-343905 |
| 1098 | PCTAIRE-motif protein kinase 2 | 344918-345284 |
| 1105 | triple functional domain (PTPRF interacting) | 347214-347540 |
| 1158 | protein kinase N2 | 365489-365727 |
| 1173 | v-erb-b2 erythroblastic leukemia viral oncogene homolog | 370312-370704 |
| | 2, neuro/glioblastoma derived oncogene homolog (avian) | |
| 1188 | WEE 1 homolog 1 (S. pombe) | 375593-375982 |
| 1205 | mitogen-activated protein kinase-activated protein | 380855-381192 |
| | kinase 3 | |
| 1223 | conserved helix-loop-helix ubiquitous kinase | 386803-387186 |
| 1230 | mitogen-activated protein kinase 8 | 388975-389185 |
| 1245 | bone morphogenetic protein receptor, type 1A | 393916-394306 |
| 1248 | tripartite motif-containing 28 | 394982-395338 |
| 1283 | serine/arginine-rich protein specific kinase 1 | 406749-407114 |
| 1310 | mitogen-activated protein kinase kinase 4 | 415843-416086 |
| 1320 | platelet derived growth factor receptor, β polypeptide | 419363-419724 |
| 1360 | receptor-like tyrosine kinase | 433042-433431 |
| 1440 | TANK-binding kinase 1 | 460287-460685 |
| 1452 | DNA segment, Chr 8, ERATO Doi 82, expressed | 464366-464673 |
| 1472 | v-raf murine sarcoma 3611 viral oncogene homolog | 471108-471446 |
| 1496 | CDC-like kinase 3 | 479192-479450 |
| 1498 | casein kinase 1, epsilon | 479802-480166 |
| 1507 | serine/threonine kinase 24 (STE20 homolog, yeast) | 482939-483243 |
| 1534 | protein kinase D1 | 491875-492210 |
| 1615 | interleukin-1 receptor-associated kinase 2 | 519606-519900 |
| 1623 | v-raf-leukemia viral oncogene 1 | 522454-522805 |
| 1638 | polo-like kinase 2 (Drosophila) | 527681-527996 |
| 1640 | p21 protein (Cdc42/Rac)-activated kinase 2 | 528351-528713 |
| 1688 | serine/threonine kinase 16 | 544970-545325 |
| 1696 | ribosomal protein S6 kinase polypeptide 1 | 547863-548141 |
| 1700 | transforming growth factor, beta receptor II | 549106-549395 |
| 1719 | ataxia telangiectasia and Rad3 related | 555695-555945 |
| 1791 | insulin-like growth factor I receptor | 580583-580928 |
| 1793 | thymoma viral proto-oncogene 1 | 581286-581643 |
| 1798 | eukaryotic translation initiation factor 2 kinase 4 | 582987-583297 |
| 1802 | cyclin-dependent kinase 8 | 584337-584730 |
| 1821 | ribosomal protein S6 kinase, polypeptide 4 | 590773-591132 |
| 1822 | polo-like kinase 1 (Drosophila) | 591133-591528 |
| 1838 | proviral integration site 3 | 596508-596892 |
| 1839 | WNK lysine deficient protein kinase 1 | 596893-597187 |
| 1842 | MAP kinase-interacting serine/threonine kinase 2 | 597880-598207 |
| 1849 | NIMA-related expressed kinase 6 | 600327-600624 |
| 1853 | BMP2 inducible kinase | 601662-602044 |
| 1873 | protein kinase C, delta | 608454-608757 |
| 1874 | NIMA-related expressed kinase 9 | 608758-609143 |
| 1885 | interleukin-1 receptor-associated kinase 1 | 612534-612817 |
| 1953 | CDC42 binding protein kinase beta | 635482-635834 |
| 1956 | mitogen-activated protein kinase kinase 3 | 636446-636831 |
| 1967 | serum/glucocorticoid regulated kinase 1 | 640401-640729 |
| 1982 | mitogen-activated protein kinase kinase kinase 4 | 645415-645811 |
| 1985 | serine/threonine kinase 4 | 646540-646922 |
| 2022 | p21 protein (Cdc42/Rac)-activated kinase 1 | 658646-658945 |
| 2040 | STE20-like kinase (yeast) | 664580-664973 |
| 2058 | PX domain containing serine/threonine kinase | 670668-671043 |
| 2064 | TAO kinase 3 | 672877-673175 |
| 2074 | SH3-binding kinase 1 | 676411-676808 |
| 2089 | nuclear receptor binding protein 1 | 681455-681766 |
| 2094 | polo-like kinase 3 (Drosophila) | 683175-683550 |
| 2096 | mitogen-activated protein kinase 14 | 683848-684174 |
| 2157 | macrophage stimulating 1 receptor (c-met-related | 704139-704461 |
| | tyrosine kinase) | |
| 2224 | protein kinase N1 | 726766-727146 |
| 2252 | mitogen-activated protein kinase kinase kinase 5 | 736639-737018 |
| 2281 | casein kinase 1, alpha 1 | 746332-746692 |
| 2313 | testis specific protein kinase 1 | 757254-757624 |
| 2321 | U2AF homology motif (UHM) kinase 1 | 759990-760335 |
| 2348 | casein kinase 1, gamma 2 | 769048-769436 |
| 2371 | activin A receptor, type 1 | 776681-777035 |
| 2391 | TYRO3 protein tyrosine kinase 3 | 783438-783823 |
| 2395 | platelet derived growth factor receptor, polypeptide | 784759-785127 |
| 2429 | SNF related kinase | 796332-796725 |
| 2433 | met proto-oncogene | 797652-798038 |
| 2434 | mitogen-activated protein kinase kinase 1 | 798039-798333 |
| 2450 | receptor (TNFRSF)-interacting serine-threonine kinase 1 | 803414-803712 |
| 2453 | cell division cycle 2-like 5 (cholinesterase-related | 804372-804761 |
| | cell division controller) | |
| 2498 | SCY1-like 2 (S. cerevisiae) | 819902-820288 |
| 2500 | Eph receptor A2 | 820644-820974 |
| 2530 | misshapen-like kinase 1 (zebrafish) | 830880-831232 |
| 2567 | Unc-51 like kinase 1 (C. elegans) | 843486-843843 |
| 2569 | cyclin-dependent kinase 7 (homolog of Xenopus | 844194-844512 |
| | MO15 cdk-activating kinase) | |
| 2605 | protein serine kinase H1 | 856267-856572 |
| 2606 | NIMA-related expressed kinase 7 | 856573-856901 |
| 2609 | Janus kinase 1 | 857488-857805 |
| 2615 | c-mer proto-oncogene tyrosine kinase | 859390-859712 |
| 2649 | serine/threonine kinase 25 (yeast) | 870722-871034 |
| 2656 | maternal embryonic leucine zipper kinase | 873142-873499 |
| 2660 | transforming growth factor beta regulated gene 4 | 874486-874847 |
| 2678 | mitogen-activated protein kinase kinase kinase 6 | 880782-881178 |
| 2685 | c-src tyrosine kinase | 883213-883509 |
| 2690 | protein kinase, cAMP dependent, catalytic, alpha | 884918-885283 |
| 2697 | RIKEN cDNA C230081A13 gene | 887214-887504 |
| 2727 | mitogen-activated protein kinase 1 | 897474-897851 |
| 2728 | STE20-related kinase adaptor alpha | 897852-898184 |
| 2739 | LIM-domain containing, protein kinase | 901587-901936 |
| 2767 | mitogen-activated protein kinase kinase kinase 10 | 911247-911607 |
| 2797 | mitogen-activated protein kinase 10 | 921494-921818 |
| 2815 | serine/threonine kinase 3 (Ste20, yeast homolog) | 927749-928072 |
| 2821 | protein kinase N3 | 929703-929953 |
| 2844 | large tumor suppressor | 937654-937969 |
| 2854 | leucine-rich repeat kinase 2 | 940941-941325 |
| 2917 | phosphatidylinositol 3 kinase, regulatory subunit, | 962493-962788 |
| | polypeptide 4, p150 | |
| 2965 | protein kinase, DNA activated, catalytic polypeptide | 979242-979576 |
| 2966 | doublecortin-like kinase 1 | 979577-979919 |
| 3005 | activin receptor IIA | 993008-993293 |
| 3016 | Unc-51 like kinase 2 (C. elegans) | 996609-996900 |
| 3028 | branched chain ketoacid dehydrogenase kinase | 1000498-1000839 |
| 3066 | mitogen-activated protein kinase 3 | 1013377-1013718 |
| 3072 | p21 protein (Cdc42/Rac)-activated kinase 4 | 1015266-1015566 |
| 3110 | protein kinase, membrane associated | 1028441-1028755 |
| | tyrosine/threonine 1 | |
| 3137 | eukaryotic translation initiation factor 2 kinase 1 | 1037660-1038052 |
| 3141 | PAS domain containing serine/threonine kinase | 1039167-1039558 |
| 3145 | cyclin D3 | 1040554-1040910 |
| 3170 | PTK2 protein tyrosine kinase 2 | 1049366-1049709 |
| 3215 | c-abl oncogene 1, receptor tyrosine kinase | 1064790-1065134 |
| 3234 | FAST kinase domains 5 | 1071097-1071485 |
| 3264 | ribosomal protein S6 kinase polypeptide 3 | 1081273-1081650 |
| 3293 | glycogen synthase kinase 3 alpha | 1091000-1091318 |
| 3302 | integrin linked kinase | 1094162-1094466 |
| 3325 | fer (fms/fps related) protein kinase, testis specific 2 | 1101741-1102066 |
| 3390 | cell division cycle 2-like 1 | 1124002-1124331 |
| 3497 | CDC-like kinase 2 | 1159741-1160065 |
| 3517 | aarF domain containing kinase 1 | 1166401-1166741 |
| 3551 | RIKEN cDNA B230120H23 gene | 1177903-1178190 |
| 3583 | checkpoint kinase 1 homolog (S. pombe) | 1188354-1188736 |
| 3598 | cyclin-dependent kinase 2 | 1193336-1193684 |
| 3636 | vaccinia related kinase 3 | 1206468-1206770 |
| 3672 | MAP kinase-activated protein kinase 5 | 1218590-1218943 |
| 3697 | tyrosine kinase, non-receptor, 2 | 1227011-1227293 |
| 3752 | calcium/calmodulin-dependent protein kinase 2, β | 1245765-1246095 |
| 3761 | ataxia telangiectasia mutated homolog (human) | 1248864-1249255 |
| 3792 | salt inducible kinase 1 | 1259549-1259840 |
| 3803 | phosphoinositide-3-kinase, class 3 | 1263190-1263540 |
| 3810 | aarF domain containing kinase 2 | 1265631-1265906 |
| 3818 | tripartite motif-containing 24 | 1268181-1268568 |
| 3839 | MAP kinase-interacting serine/threonine kinase 1 | 1275270-1275564 |
| 3946 | polo-like kinase 4 (Drosophila) | 1310666-1311034 |
| 4001 | mitogen-activated protein kinase kinase 2 | 1329109-1329497 |
| 4017 | Janus kinase 3 | 1334368-1334721 |
| 4043 | CDC like kinase 4 | 1343146-1343482 |
| 4045 | SCY1-like 3 (S. cerevisiae) | 1343876-1344245 |
| 4071 | NIMA-related expressed kinase 2 | 1352509-1352861 |
| 4151 | vaccinia related kinase 2 | 1379213-1379553 |
| 4171 | casein kinase 2, alpha prime polypeptide | 1385888-1386249 |
| 4193 | mitogen-activated protein kinase 1 | 1393467-1393856 |
| 4201 | eukaryotic translation initiation factor 2 kinase 3 | 1396283-1396617 |
| 4255 | budding uninhibited by benzimidazoles 1 homolog, | 1414236-1414628 |
| | beta (S. cerevisiae) | |
| 4264 | vaccinia related kinase 1 | 1417312-1417688 |
| 4268 | STE20-related kinase adaptor beta | 1418669-1418996 |
| 4275 | FAST kinase domains 2 | 1421149-1421474 |
| 4299 | cyclin-dependent kinase 9 (CDC2-related kinase) | 1429472-1429796 |
| 4365 | lemur tyrosine kinase 2 | 1451144-1451458 |
| 4404 | Yamaguchi sarcoma viral (v-yes) oncogene homolog 1 | 1464339-1464640 |
| 4414 | cyclin-dependent kinase 5 | 1467595-1467925 |
| 4488 | bone morphogenic protein receptor, type II | 1492190-1492490 |
| | (serine/threonine kinase) | |
| 4502 | testis-specific kinase 2 | 1496336-1496660 |
| 4632 | cell division cycle 7 (S. cerevisiae) | 1539427-1539781 |
| 4652 | mitogen-activated protein kinase kinase 5 | 1545970-1546310 |
| 4686 | mitogen-activated protein kinase 1 | 1557428-1557817 |
| 4715 | ribonuclease L (2′,5′-oligoisoadenylate | 1567391-1567708 |
| | synthetase-dependent) | |
| 4744 | fibroblast growth factor receptor 1 | 1577052-1577365 |
| 4770 | protein kinase D3 | 1585680-1585976 |
| 4839 | cyclin-dependent kinase 4 | 1609522-1609852 |
| 4856 | protein kinase C, iota | 1615321-1615627 |
| 4867 | ribosomal protein S6 kinase, polypeptide 2 | 1618874-1619239 |
| 4903 | tyrosine kinase 2 | 1631375-1631670 |
| 4904 | FAST kinase domains 3 | 1631671-1632058 |
| 4928 | Phosphorylase kinase, gamma 2 (testis) | 1639845-1640227 |
| 4947 | protein kinase, AMP-activated, β 1 non-catalytic subunit | 1646526-1646858 |
| 4952 | tribbles homolog 3 (Drosophila) | 1648199-1648515 |
| 4980 | natriuretic peptide receptor 2 | 1658017-1658362 |
| 5012 | NIMA-related expressed kinase 8 | 1668806-1669200 |
| 5119 | protein kinase, X-linked | 1705097-1705372 |
| 5127 | interleukin-1 receptor-associated kinase 4 | 1707814-1708142 |
| 5155 | protein kinase, AMP-activated, γ 1 non-catalytic subunit | 1717347-1717743 |
| 5205 | serine/threonine kinase 10 | 1734723-1735086 |
| 5258 | protein kinase C, eta | 1752699-1753060 |
| 5260 | receptor (TNFRSF)-interacting serine-threonine kinase 2 | 1753377-1753673 |
| 5303 | protein kinase, AMP-activated, γ 2 non-catalytic subunit | 1767887-1768173 |
| 5443 | CHK2 checkpoint homolog (S. pombe) | 1817364-1817648 |
| 5466 | dual-specificity tyrosine-(Y)-phosphorylation | 1825671-1825984 |
| | regulated kinase 3 | |
| 5513 | NIMA-related expressed kinase 1 | 1842362-1842733 |
| 5526 | PDZ binding kinase | 1846866-1847240 |
| 5543 | Ttk protein kinase | 1852758-1853100 |
| 5580 | cell division cycle 2 homolog A (S. pombe) | 1865374-1865693 |
| 5636 | mitogen-activated protein kinase 7 | 1885325-1885696 |
| 5698 | aurora kinase A | 1907469-1907831 |
| 5753 | Eph receptor B3 | 1927508-1927885 |
| 5812 | oxidative-stress responsive 1 | 1948788-1949181 |
| 5833 | cyclin H | 1956302-1956671 |
| 5892 | inhibitor of kappaB kinase epsilon | 1978013-1978395 |
| 5902 | cell cycle related kinase | 1981792-1982170 |
| 5944 | serine/threonine kinase 38 like | 1997111-1997478 |
| 5974 | tribbles homolog 1 (Drosophila) | 2008081-2008383 |
| 6029 | mixed lineage kinase domain-like | 2027899-2028286 |
| 6121 | discoidin domain receptor family, member 1 | 2061270-2061663 |
| 6141 | aurora kinase B | 2068620-2068994 |
| 6178 | mitogen-activated protein kinase kinase kinase 14 | 2081730-2082108 |
| 6215 | RIKEN cDNA E130304F04 gene | 2095357-2095740 |
| 6281 | cyclin-dependent kinase-like 2 (CDC2-related kinase) | 2118747-2119146 |
| 6305 | dual-specificity tyrosine-(Y)-phosphorylation | 2127434-2127800 |
| | regulated kinase 2 | |
| 6404 | cyclin-dependent kinase (CDC2-like) 10 | 2162918-2163302 |
| 6480 | cyclin-dependent kinase 6 | 2189891-2190242 |
| 6633 | protein kinase D2 | 2243758-2244155 |
| 6653 | WNK lysine deficient protein kinase 4 | 2250760-2251118 |
| 6731 | G protein-coupled receptor kinase 5 | 2278131-2278499 |
| 6882 | aurora kinase C | 2329723-2330035 |
| 6891 | cyclin-dependent kinase-like 1 (CDC2-related kinase) | 2332108-2332434 |
| 6929 | RIKEN cDNA 4930444A02 gene | 2344573-2344930 |
| 6980 | p21 protein (Cdc42/Rac)-activated kinase 3 | 2361621-2361941 |
| 7029 | ribosomal protein S6 kinase, polypeptide 5 | 2378152-2378437 |
| 7063 | CDC-like kinase 1 | 2389819-2390124 |
| 7073 | PDLIM1 interacting kinase 1 like | 2393123-2393501 |
| 7086 | salt inducible kinase 2 | 2397231-2397606 |
| 7124 | homeodomain interacting protein kinase 2 | 2409808-2410107 |
| 7144 | serum/glucocorticoid regulated kinase 3 | 2416403-2416787 |
| 7151 | germ cell-specific gene 2 | 2418878-2419222 |
| 7165 | cyclin-dependent kinase-like 3 | 2423119-2423482 |
| 7167 | fibroblast growth factor receptor 3 | 2423777-2424112 |
| 7224 | NIMA-related expressed kinase 4 | 2443004-2443301 |
| 7242 | hormonally upregulated Neu-associated kinase | 2449048-2449437 |
| 7289 | inhibitor of kappaB kinase beta | 2464074-2464378 |
| 7487 | serum/glucocorticoid regulated kinase 2 | 2529508-2529774 |
| 7501 | 3-phosphoinositide dependent protein kinase-1 | 2534260-2534622 |
| 7507 | lymphocyte protein tyrosine kinase | 2536052-2536408 |
| 7604 | microtubule associated serine/threonine kinase-like | 2567713-2568021 |
| 7630 | serine/threonine kinase 11 | 2575716-2576017 |
| 7661 | MAP/microtubule affinity-regulating kinase 4 | 2585629-2585955 |
| 7781 | proviral integration site 1 | 2626615-2627001 |
| 7784 | serine/threonine kinase 17b (apoptosis-inducing) | 2627742-2628087 |
| 7797 | protein kinase C, epsilon | 2632117-2632509 |
| 7808 | myosin, light polypeptide kinase 2, skeletal muscle | 2635957-2636283 |
| 7841 | NIMA-related expressed kinase 3 | 2646895-2647246 |
| 7917 | PTK2 protein tyrosine kinase 2 beta | 2672668-2672997 |
| 7980 | endothelial-specific receptor tyrosine kinase | 2693563-2693919 |
| 8109 | thymoma viral proto-oncogene 3 | 2735270-2735575 |
| 8123 | citron | 2740025-2740319 |
| 8173 | NUAK family, SNF1-like kinase, 1 | 2755489-2755818 |
| 8206 | activin A receptor, type 1B | 2766172-2766565 |
| 8328 | FAST kinase domains 1 | 2806153-2806512 |
| 8469 | activin receptor IIB | 2854148-2854509 |
| 8556 | serine/threonine kinase 30 | 2882719-2883094 |
| 8662 | death-associated protein kinase 3 | 2918007-2918383 |
| 8760 | testis-specific serine kinase 6 | 2949013-2949363 |
| 8792 | RIKEN cDNA A630047E20 gene | 2959129-2959498 |
| 8890 | testis-specific serine kinase 4 | 2988076-2988379 |
| 8946 | G protein-coupled receptor kinase 1 | 3003705-3003945 |
| 9035 | PAN3 polyA specific ribonuclease subunit homolog | 3027117-3027350 |
| | (S. cerevisiae) | |
| 9149 | mitogen-activated protein kinase 2 | 3055949-3056195 |
| 9202 | calcium/calmodulin-dependent protein kinase IV | 3067906-3067965 |
| 9218 | ribosomal protein S6 kinase polypeptide 1 | 3070827-3071085 |
| 9232 | apoptosis-associated tyrosine kinase | 3074031-3074270 |
| 9252 | Eph receptor B4 | 3078422-3078630 |
| 9266 | serine/threonine/tyrosine kinase 1 | 3081287-3081520 |
| 9338 | testis-specific serine kinase 1 | 3097427-3097661 |
| 9460 | G protein-coupled receptor kinase 4 | 3120208-3120400 |
| 9526 | NUAK family, SNF1-like kinase, 2 | 3130443-3130616 |
| 9577 | FMS-like tyrosine kinase 1 | 3137414-3137564 |
| 9643 | testis-specific serine kinase 5 | 3143809-3143951 |
| 9672 | calcium/calmodulin-dependent protein kinase 1, | 3146563-3146684 |
| 9688 | tyrosine kinase, non-receptor, 1 | 3147699-3147819 |
| 9721 | phosphorylase kinase gamma 1 | 3149851-3149854 |
| 9722 | mitogen-activated protein kinase 7 | 3149855-3149946 |
| 3157213 | mitogen-activated protein kinase 5 | 3233617-3233716 |
| 3157247 | endoplasmic reticulum (ER) to nucleus signaling 1 | 3179284-3179383 |
| 3157267 | mitogen-activated protein kinase kinase kinase 2 | 3185971-3186070 |
| 3157347 | fibroblast growth factor receptor 4 | 3276349-3276448 |
| 3157427 | dual serine/threonine and tyrosine protein kinase | 3163684-3163783 |
| 3157453 | testis expressed gene 14 | 3276149-3276248 |
| 3157487 | NIMA-related expressed kinase 11 | 3167184-3167283 |
| 3157527 | NIMA-related expressed kinase 5 | 3275849-3275948 |
| 3157545 | death-associated protein kinase 2 | 3254417-3254516 |
| 3157639 | spleen tyrosine kinase | 3259705-3259804 |
| 3157684 | doublecortin-like kinase 2 | 3170684-3170783 |
| 3157692 | myosin, light polypeptide kinase | 3220991-3221090 |
| 3157728 | NA | 3235317-3235416 |
| 3157785 | TRAF2 and NCK interacting kinase | 3264805-3264904 |
| 3157794 | tribbles homolog 2 (Drosophila) | 3204997-3205096 |
| 3157808 | unc-51-like kinase 3 (C. elegans) | 3229117-3229216 |
| 3157827 | insulin receptor | 3239817-3239916 |
| 3157880 | PTK7 protein tyrosine kinase 7 | 3277549-3277648 |
| 3157993 | epidermal growth factor receptor | 3166784-3166883 |
| 3158134 | anaplastic lymphoma kinase | 3247317-3247416 |
| 3158136 | receptor tyrosine kinase-like orphan receptor 1 | 3228817-3228916 |
| 3158179 | NA | 3252117-3252216 |
| 3158184 | calcium/calmodulin-dependent protein kinase II | 3257905-3258004 |
| 3158194 | NA | 3255705-3255804 |
| 3158209 | fibroblast growth factor receptor 2 | 3207458-3207557 |
| 3158279 | unc-51-like kinase 4 (C. elegans) | 3273396-3273495 |
| 3158375 | megakaryocyte-associated tyrosine kinase | 3204897-3204996 |
| 3158394 | bone morphogenetic protein receptor, type 1B | 3218291-3218390 |

TABLE 61
Cytochrome reductases

| SEQ | | Avg | siRNA SEQ |
|---|---|---|---|
| ID NO: | Description | Cov | ID NOs: |
| 1124 | P450 (cytochrome) oxidoreductase | 18.96 | 353642-353994 |
| 1759 | cytochrome b5 reductase 4 | 14.829 | 569460-569777 |
| 2330 | ubiquinol-cytochrome c reductase complex | 18.852 | 763043-763396 |
| | chaperone, CBP3 homolog (yeast) | | |
| 3795 | ubiquinol-cytochrome c reductase core protein 1 | 109.161 | 1260523-1260890 |
| 3799 | cytochrome b5 reductase 3 | 78.623 | 1261910-1262218 |
| 3897 | cytochrome b reductase 1 | 1.445 | 1294703-1295101 |
| 4548 | ubiquinol cytochrome c reductase core protein 2 | 74.045 | 1511637-1511998 |
| 5706 | ubiquinol-cytochrome c reductase, Rieske iron- | 78.928 | 1910358-1910701 |
| | sulfur polypeptide 1 | | |
| 6495 | cytochrome b5 reductase 1 | 7.465 | 2195311-2195681 |
| 8631 | ubiquinol-cytochrome c reductase hinge protein | 4.546 | 2907991-2908330 |
| 8675 | ubiquinol-cytochrome c reductase binding protein | 3.239 | 2922032-2922391 |
| 9127 | ubiquinol-cytochrome c reductase, complex III | 2.023 | 3050777-3051054 |
| | subunit VII | | |

TABLE 21
Ubiquitin-thiolesterases

| SEQ | | | Avg | siRNA SEQ |
|---|---|---|---|---|
| ID NO: | consL | Description | Cov | ID NOs: |
| | 7293 | ubiquitin specific peptidase 9, X chromosome | 6.127 | 9772-10147 |
| 93 | 3839 | ubiquitin specific peptidase 48 | 5.077 | 39432-39822 |
| 95 | 3832 | ubiquitin specific peptidase 7 | 16.622 | 40175-40559 |
| 103 | 3754 | ubiquitin specific peptidase 40 | 2.183 | 42743-43018 |
| 273 | 3151 | ubiquitin specific peptidase 47 | 11.289 | 94293-94582 |
| 276 | 3145 | cylindromatosis (turban tumor syndrome) | 5.717 | 95119-95374 |
| 335 | 3057 | ubiquitin specific peptidase 8 | 10.752 | 111384-111738 |
| 514 | 2833 | ubiquitin specific peptidase 10 | 11.689 | 161987-162319 |
| 598 | 2741 | ubiquitin specific peptidase 15 | 10.777 | 185975-186368 |
| 625 | 2714 | ubiquitin specific peptidase 25 | 1.533 | 194182-194422 |
| 834 | 2567 | ubiquitin specific peptidase 38 | 3.655 | 258184-258571 |
| 931 | 2523 | ubiquitin specific peptidase 4 | 13.735 | 289262-289658 |
| | | (proto-oncogene) | | |
| 965 | 2501 | ubiquitin specific peptidase 16 | 11.237 | 300334-300663 |
| 980 | 2494 | ubiquitin specific peptidase 28 | 6.027 | 305222-305581 |
| 1311 | 2331 | ubiquitin specific peptidase 12 | 3.674 | 416087-416477 |
| 1499 | 2245 | ubiquitin specific peptidase 33 | 3.642 | 480167-480565 |
| 1502 | 2244 | ubiquitin specific peptidase 19 | 7.049 | 481244-481580 |
| 1541 | 2233 | ubiquitin specific peptidase 1 | 1.24 | 494093-494468 |
| 1612 | 2205 | OTU domain containing 7B | 0.437 | 518572-518901 |
| 1660 | 2188 | ubiquitin specific peptidase 54 | 0.655 | 535568-535921 |
| 1941 | 2098 | ubiquitin specific peptidase 11 | 3.914 | 631257-631579 |
| 2267 | 1990 | ubiquitin specific peptidase 14 | 2.01 | 741691-741995 |
| 2275 | 1989 | ubiquitin specific peptidase 39 | 11.625 | 744331-744665 |
| 2303 | 1982 | ubiquitin specific peptidase 46 | 1.193 | 753953-754261 |
| 2460 | 1942 | Brca1 associated protein 1 | 3.462 | 806747-807089 |
| 2596 | 1909 | ubiquitin specific peptidase 21 | 10.965 | 853543-853866 |
| 2634 | 1899 | ubiquitin specific peptidase 22 | 1.692 | 865729-866104 |
| 3030 | 1785 | ubiquitin specific peptidase 5 (isopeptidase T) | 13.894 | 1001194-1001562 |
| 3074 | 1774 | BRCA1/BRCA2-containing complex, subunit 3 | 1.488 | 1015902-1016231 |
| 3536 | 1662 | ubiquitin specific peptidase 27, | 0.685 | 1172962-1173239 |
| | | X chromosome | | |
| 3558 | 1654 | ubiquitin specific peptidase 52 | 3.654 | 1180058-1180445 |
| 3714 | 1620 | ubiquitin specific peptidase 30 | 0.966 | 1232956-1233353 |
| 3842 | 1586 | myb-like, SWIRM and MPN domains 1 | 0.676 | 1276194-1276510 |
| 3915 | 1570 | ubiquitin specific peptidase 3 | 6.65 | 1300512-1300831 |
| 4057 | 1535 | ubiquitin specific peptidase 18 | 3.571 | 1347935-1348245 |
| 4072 | 1530 | proteasome (prosome, macropain) 26S | 67.811 | 1352862-1353184 |
| | | subunit, non-ATPase, 14 | | |
| 4107 | 1522 | ubiquitin carboxyl-terminal esterase L5 | 10.895 | 1364288-1364643 |
| 4509 | 1434 | ubiquitin specific peptidase 20 | 0.904 | 1498598-1498950 |
| 4875 | 1353 | OTU domain containing 5 | 3.986 | 1621572-1621944 |
| 5615 | 1187 | ubiquitin specific peptidase like 1 | 1.464 | 1877785-1878169 |
| 5649 | 1178 | STAM binding protein | 2.283 | 1889758-1890088 |
| 6996 | 881 | ubiquitin carboxyl-terminal esterase L3 | 2.405 | 2367046-2367358 |
| | | (ubiquitin thiolesterase) | | |
| 8860 | 427 | ubiquitin carboxyl-terminal esterase L4 | 0.446 | 2979143-2979234 |
| 8992 | 395 | ataxin 3 | 0.087 | 3016154-3016402 |
| 9384 | 291 | ubiquitin specific peptidase 53 | 0.073 | 3106251-3106450 |
| 3157441 | 263 | ubiquitin specific peptidase 50 | 0.152 | 3267405-3267504 |
| 3157521 | 192 | ubiquitin specific peptidase 37 | 0.027 | 3170784-3170883 |
| 3157574 | 1203 | ubiquitin specific petidase 45 | 0.416 | 3242017-3242116 |

TABLE 23
E3 Ubiquitin Protein ligases

| SEQ | | | Avg | siRNA SEQ |
|---|---|---|---|---|
| ID NO: | consL | Description | Cov | ID NOs: |
| 9 | 4809 | ubiquitin protein ligase E3 component n-recognin 3 | 2.236 | 12279-12498 |
| 48 | 4159 | SMAD specific E3 ubiquitin protein ligase 2 | 7.495 | 24792-25162 |
| 64 | 3999 | itchy, E3 ubiquitin protein ligase | 4.833 | 29919-30278 |
| 101 | 3757 | ubiquitin protein ligase E3 component n-recognin 5 | 9.431 | 42166-42421 |
| 143 | 3560 | ubiquitin protein ligase E3C | 11.999 | 55140-55421 |
| 936 | 2521 | ubiquitin protein ligase E3 component n-recognin 2 | 3.175 | 290987-291365 |
| 1355 | 2311 | HECT domain and ankyrin repeat containing, | 11.689 | 431371-431703 |
| | | E3 ubiquitin protein ligase 1 | | |
| 2414 | 1956 | SMAD specific E3 ubiquitin protein ligase 1 | 0.804 | 791272-791663 |
| 3279 | 1724 | ubiquitin protein ligase E3 component n- | 2.904 | 1086176-1086492 |
| | | recognin 7 (putative) | | |
| 3531 | 1663 | ubiquitin protein ligase E3B | 1.82 | 1171311-1171631 |
| 3906 | 1573 | WW domain containing E3 ubiquitin protein ligase 2 | 1.581 | 1297605-1297894 |
| 4078 | 1528 | WW domain containing E3 ubiquitin protein ligase 1 | 0.308 | 1354729-1355093 |
| 6165 | 1066 | G2/M-phase specific E3 ubiquitin ligase | 0.358 | 2077605-2078002 |
| 6645 | 960 | ubiquitin protein ligase E3 component n-recognin 1 | 0.266 | 2248043-2248415 |
| 6760 | 934 | ubiquitin protein ligase E3A | 0.576 | 2287890-2288245 |
| 3157485 | 2014 | ubiquitin protein ligase E3 component n-recognin 4 | 0.639 | 3209658-3209757 |
| 3157673 | 192 | HECT, C2 and WW domain containing E3 | 0.017 | 3269496-3269595 |
| | | ubiquitin protein ligase 2 | | |

TABLE 24
STATs

| SEQ | | | Avg | siRNA SEQ |
|---|---|---|---|---|
| ID NO: | consL | Description | Cov | ID NOs: |
| 540 | 2799 | signal transducer & activator of | 1.323 | 169415-169753 |
| | | transcription 5B | | |
| 887 | 2543 | signal transducer & activator of transcription 1 | 5.548 | 274540-274924 |
| 2234 | 2001 | signal transducer & activator of transcription 6 | 2.945 | 730267-730586 |
| 2249 | 1997 | signal transducer & activator of transcription 3 | 0.987 | 735545-735924 |
| 3913 | 1571 | signal transducer & activator of | 1.268 | 1299843-1300222 |
| | | transcription 5A | | |
| 3157484 | 433 | signal transducer & activator of transcription 2 | 0.099 | 3168284-3168383 |
| 3157597 | 252 | signal transducer & activator of transcription 4 | 0.087 | 3226517-3226616 |

TABLE 27
Stress Response Genes

| SEQ | | | Avg | siRNA SEQ |
|---|---|---|---|---|
| ID NO: | consL | Description | Cov | ID NOs: |
| 74 | 3956 | mitogen-activated protein kinase kinase | 10.121 | 33333-33668 |
| | | kinase kinase 4 | | |
| 221 | 3285 | hypoxia up-regulated 1 | 59.506 | 78625-79007 |
| 279 | 3139 | methyl CpG binding protein 2 | 1.23 | 95910-96141 |
| 345 | 3034 | glycogen synthase kinase 3 beta | 0.647 | 114424-114743 |
| 444 | 2900 | heat shock protein 4 | 15.95 | 142820-143094 |
| 476 | 2865 | heat shock 105 kDa/110 kDa protein 1 | 19.863 | 151195-151420 |
| 485 | 2858 | AHA1, activator of heat shock protein | 16.103 | 153831-154084 |
| | | ATPase homolog 2 (yeast) | | |
| 579 | 2758 | heat shock protein 90, β(Grp94), member 1 | 606.207 | 180574-180954 |
| 594 | 2744 | heat shock protein 90, (cytosolic), class A | 93.844 | 184698-184927 |
| | | member 1 | | |
| 827 | 2572 | heat shock protein 9 | 28.56 | 255926-256325 |
| 977 | 2496 | heat shock protein 90 alpha (cytosolic), class | 609.5 | 304274-304591 |
| | | B member 1 | | |
| 1384 | 2293 | TNF receptor-associated protein 1 | 66.2 | 441242-441639 |
| 1489 | 2250 | mitogen-activated protein kinase associated | 9.725 | 476915-477307 |
| | | protein 1 | | |
| 1798 | 2143 | eukaryotic translation initiation factor 2 alpha | 2.779 | 582987-583297 |
| | | kinase 4 | | |
| 1842 | 2130 | MAP kinase-interacting serine/threonine | 2.895 | 597880-598207 |
| | | kinase 2 | | |
| 1967 | 2087 | serum/glucocorticoid regulated kinase 1 | 4.001 | 640401-640729 |
| 1979 | 2085 | histone deacetylase 5 | 7.779 | 644628-644970 |
| 2076 | 2052 | DnaJ (Hsp40) homolog, subfamily B, | 9.75 | 677203-677558 |
| | | member 1 | | |
| 2096 | 2045 | mitogen-activated protein kinase 14 | 7.294 | 683848-684174 |
| 2272 | 1990 | heat shock factor 2 | 2.598 | 743398-743788 |
| 2297 | 1984 | protein phosphatase 3, catalytic subunit, | 4.715 | 751950-752267 |
| | | alpha isoform | | |
| 2372 | 1964 | Ser (or Cys) peptidase inhibitor clade H member 1 | 125.59 | 777036-777317 |
| 2530 | 1925 | misshapen-like kinase 1 (zebrafish) | 1.615 | 830880-831232 |
| 2756 | 1869 | heat shock factor 1 | 25.227 | 907582-907889 |
| 2779 | 1862 | homocysteine-inducible, endoplasmic reticulum | 19.826 | 915394-915727 |
| | | stress-inducible, ubiquitin-like domain member 1 | | |
| 2929 | 1822 | protein disulfide isomerase associated 5 | 42.884 | 966735-967056 |
| 2974 | 1807 | heat shock protein 2 | 5.538 | 982428-982785 |
| 3063 | 1776 | heat shock protein 8 | 38.69 | 1012333-1012621 |
| 3137 | 1761 | eukaryotic translation initiation factor 2 alpha | 9.682 | 1037660-1038052 |
| | | kinase 1 | | |
| 3151 | 1757 | cancer susceptibility candidate 3 | 6.742 | 1042529-1042877 |
| 3589 | 1647 | calmodulin binding transcription activator 2 | 0.784 | 1190341-1190653 |
| 3699 | 1623 | transforming, acidic coiled-coil containing | 13.073 | 1227651-1228044 |
| | | protein 3 | | |
| 3754 | 1611 | isocitrate dehydrogenase 2 (NADP+), | 8.177 | 1246485-1246791 |
| | | mitochondrial | | |
| 3839 | 1586 | MAP kinase-interacting serine/threonine | 2.216 | 1275270-1275564 |
| | | kinase 1 | | |
| 3943 | 1563 | eukaryotic translation initiation factor 2, subnt 1 | 14.063 | 1309599-1309969 |
| 4201 | 1500 | eukaryotic translation initiation factor 2 | 2.46 | 1396283-1396617 |
| | | kinase 3 | | |
| 4434 | 1453 | protein kinase, interferon inducible double | 5.527 | 1474052-1474353 |
| | | stranded RNA dependent activator | | |
| 4947 | 1338 | protein kinase, AMP-activated, beta 1 non- | 5.753 | 1646526-1646858 |
| | | catalytic subunit | | |
| 5002 | 1323 | AHA1, activator of heat shock protein | 93.621 | 1665415-1665746 |
| | | ATPase homolog 1 (yeast) | | |
| 5155 | 1287 | protein kinase, AMP-activated, gamma 1 | 12.934 | 1717347-1717743 |
| | | non-catalytic subunit | | |
| 5251 | 1271 | antigenic determinant of rec-A protein | 1.928 | 1750245-1750559 |
| 5295 | 1259 | nuclear receptor subfamily 4, group A, | 0.73 | 1765734-1766070 |
| | | member 2 | | |
| 5303 | 1258 | protein kinase, AMP-activated, gamma 2 | 0.729 | 1767887-1768173 |
| | | non-catalytic subunit | | |
| 5406 | 1236 | cold inducible RNA binding protein | 32.931 | 1804466-1804836 |
| 5424 | 1231 | SMT3 suppressor of mif two 3 homolog 1 | 10.803 | 1810772-1811128 |
| | | (yeast) | | |
| 6622 | 965 | pyrroline-5-carboxylate reductase 1 | 0.9 | 2239835-2240228 |
| 7418 | 785 | myeloid differentiation primary response | 2.514 | 2506840-2507215 |
| | | gene 116 | | |
| 7981 | 638 | Parkinson disease (autosomal recessive, | 47.839 | 2693920-2694252 |
| | | early onset) 7 | | |
| 8048 | 615 | RIKEN cDNA 2310016C08 gene | 1.503 | 2715913-2716256 |
| 8085 | 605 | protein phosphatase 1, regulatory (inhibitor) | 0.176 | 2727942-2728269 |
| | | subunit 15b | | |
| 8155 | 587 | sphingomyelin phosphodiesterase 3, neutral | 0.179 | 2750331-2750645 |
| 8336 | 539 | heat shock protein 1 | 3.124 | 2809108-2809434 |
| 8405 | 517 | heat shock protein 1 (chaperonin 10) | 4.477 | 2833031-2833420 |
| 8780 | 444 | HIG1 domain family, member 1A | 0.685 | 2955263-2955620 |
| 8954 | 403 | junction-mediating and regulatory protein | 0.09 | 3005715-3006035 |
| 9679 | 173 | heat shock protein 1B | 0.091 | 3147029-3147080 |
| 9722 | 149 | mitogen-activated protein kinase kinase 7 | 0.089 | 3149855-3149946 |
| 3157247 | 594 | endoplasmic reticulum (ER) to nucleus | 0.18 | 3179284-3179383 |
| | | signaling 1 | | |
| 3157505 | 644 | crystallin, alpha B | 0.99 | 3280749-3280848 |
| 3157706 | 999 | family with sequence similarity 129, member A | 0.792 | 3219891-3219990 |
| 3158121 | 3735 | transformation related protein 53 inducible | 2.567 | 3197071-3197170 |
| | | nuclear protein 1 | | |
| 3158350 | 787 | response to stress | 0.417 | 3201697-3201796 |

TABLE 28
Glycosyltransferases

| SEQ | | | Avg | siRNA SEQ |
|---|---|---|---|---|
| ID NO: | consL | Description | Cov | ID NOs: |
| 150 | 3549 | UDP-N-acetyl-alpha-D-galactosamine:polypeptide | 11.757 | 57147-57422 |
| | | N-acetylgalactosaminyltransferase 1 | | |
| 178 | 3411 | UDP-N-acetyl-alpha-D-galactosamine:polypeptide | 22.835 | 65737-65999 |
| | | N-acetylgalactosaminyltransferase 2 | | |
| 270 | 3158 | UDP-GalNAc:betaGlcNAc beta 1,3- | 4.224 | 93348-93655 |
| | | galactosaminyltransferase, polypeptide 2 | | |
| 310 | 3102 | nicotinamide phosphoribosyltransferase | 5.348 | 104902-105169 |
| 439 | 2903 | poly (ADP-ribose) polymerase family, member 1 | 23.907 | 141472-141718 |
| 676 | 2680 | fucosyltransferase 8 | 9.927 | 209841-210227 |
| 818 | 2576 | poly (ADP-ribose) polymerase family, member 8 | 6.624 | 253302-253609 |
| 1075 | 2439 | TCDD-inducible poly(ADP-ribose) polymerase | 8.079 | 337086-337454 |
| 1172 | 2394 | exostoses (multiple) 1 | 13.888 | 370087-370311 |
| 1284 | 2341 | WD repeat and FYVE domain containing 3 | 0.277 | 407115-407476 |
| 1580 | 2217 | beta 1,3-galactosyltransferase-like | 3.289 | 507336-507709 |
| 1671 | 2185 | phosphatidylinositol glycan anchor | 2.327 | 539094-539385 |
| | | biosynthesis, class Q | | |
| 1720 | 2167 | protein-O-mannosyltransferase 2 | 1.099 | 555946-556293 |
| 1813 | 2138 | poly (ADP-ribose) polymerase family, member 16 | 4.303 | 588191-588503 |
| 1869 | 2123 | O-linked N-acetylglucosamine (GlcNAc) | 0.839 | 607012-607348 |
| | | transferase (UDP-N- | | |
| | | acetylglucosamine:polypeptide-N- | | |
| | | acetylglucosaminyl transferase) | | |
| 1899 | 2113 | glycogen synthase 1, muscle | 2.695 | 617021-617381 |
| 1998 | 2081 | exostoses (multiple)-like 3 | 0.53 | 650808-651119 |
| 2056 | 2058 | liver glycogen phosphorylase | 4.632 | 670012-670314 |
| 2088 | 2048 | ST3 beta-galactoside alpha-2,3-sialyltransferase 1 | 5.651 | 681105-681454 |
| 2167 | 2021 | ST3 beta-galactoside alpha-2,3- | 13.01 | 707535-707870 |
| | | sialyltransferase 4 | | |
| 2174 | 2019 | brain glycogen phosphorylase | 3.301 | 709790-710087 |
| 2211 | 2008 | glycosyltransferase-like domain containing 1 | 3.796 | 722365-722668 |
| 2254 | 1995 | mannoside acetylglucosaminyltransferase 4, | 27.246 | 737377-737697 |
| | | isoenzyme B | | |
| 2363 | 1967 | exostoses (multiple) 2 | 12.067 | 774056-774354 |
| 2417 | 1954 | mannoside acetylglucosaminyltransferase 2 | 5.098 | 792371-792746 |
| 2557 | 1918 | UDP-glucose ceramide glucosyltransferase | 1.94 | 840181-840538 |
| 2589 | 1909 | UDP-Gal:betaGlcNAc beta 1,4- | 18.933 | 851115-851489 |
| | | galactosyltransferase, polypeptide 3 | | |
| 2597 | 1909 | UDP-GlcNAc:betaGal beta-1,3-N- | 2.935 | 853867-854128 |
| | | acetylglucosaminyltransferase 9 | | |
| 2696 | 1886 | glycosyltransferase 25 domain containing 1 | 29.095 | 886942-887213 |
| 2783 | 1861 | protein O-fucosyltransferase 2 | 28.156 | 916726-917035 |
| 2830 | 1851 | asparagine-linked glycosylation 12 homolog | 9.883 | 932756-933070 |
| | | (yeast, alpha-1,6-mannosyltransferase) | | |
| 2920 | 1824 | asparagine-linked glycosylation 8 homolog | 6.563 | 963558-963865 |
| | | (yeast, alpha-1,3-glucosyltransferase) | | |
| 3065 | 1776 | UDP-N-acetyl-alpha-D- | 1.546 | 1013002-1013376 |
| | | galactosamine:polypeptide N- | | |
| | | acetylgalactosaminyltransferase 10 | | |
| 3249 | 1736 | UDP-GlcNAc:betaGal beta-1,3-N- | 5.258 | 1075997-1076374 |
| | | acetylglucosaminyltransferase 2 | | |
| 3332 | 1709 | UDP-GlcNAc:betaGal beta-1,3-N- | 24.577 | 1104024-1104401 |
| | | acetylglucosaminyltransferase 1 | | |
| 3411 | 1689 | ST3 beta-galactoside alpha-2,3- | 3.964 | 1131123-1131445 |
| | | sialyltransferase 3 | | |
| 3472 | 1674 | glycogenin | 12.806 | 1151366-1151643 |
| 3484 | 1672 | ST3 beta-galactoside alpha-2,3- | 21.148 | 1155324-1155711 |
| | | sialyltransferase 5 | | |
| 3594 | 1646 | phosphatidylinositol glycan anchor | 0.64 | 1191982-1192311 |
| | | biosynthesis, class M | | |
| 3711 | 1621 | nicotinate phosphoribosyltransferase domain | 9.212 | 1231855-1232201 |
| | | containing 1 | | |
| 3731 | 1616 | glucan (1,4-alpha-), branching enzyme 1 | 2.847 | 1238609-1238920 |
| 3887 | 1577 | UDP-Gal:betaGlcNAc beta 1,4- | 5.414 | 1291326-1291668 |
| | | galactosyltransferase, polypeptide 2 | | |
| 3937 | 1565 | exostoses (multiple)-like 2 | 2.123 | 1307522-1307889 |
| 4007 | 1548 | protein-O-mannosyltransferase 1 | 1.418 | 1331135-1331436 |
| 4105 | 1522 | UDP-N-acetyl-alpha-D-galactosamine:polypeptide | 1.816 | 1363583-1363970 |
| | | N-acetylgalactosaminyltransferase 11 | | |
| 4177 | 1507 | RIKEN cDNA A130022J15 gene | 1.007 | 1387950-1388266 |
| 4186 | 1504 | ST6 (alpha-N-acetyl-neuraminyl-2,3-beta- | 5.237 | 1391079-1391449 |
| | | galactosyl-1,3)-N-acetylgalactosaminide | | |
| | | alpha-2,6-sialyltransferase 6 | | |
| 4319 | 1476 | ST3 beta-galactoside alpha-2,3-sialyltransferase 2 | 1.043 | 1435989-1436317 |
| 4391 | 1460 | dolichyl-phosphate (UDP-N- | 10.516 | 1460002-1460374 |
| | | acetylglucosamine) | | |
| | | acetylglucosaminephosphotransferase 1 | | |
| | | (GlcNAc-1-P transferase) | | |
| 4654 | 1402 | UDP-N-acetyl-alpha-D-galactosamine: | 0.782 | 1546609-1546999 |
| | | polypeptide N-acetylgalactosaminyltransferase 7 | | |
| 4671 | 1399 | UDP-Gal:betaGlcNAc beta 1,4- | 3.652 | 1552461-1552728 |
| | | galactosyltransferase, polypeptide 4 | | |
| 4673 | 1398 | phosphatidylinositol glycan anchor | 0.875 | 1553085-1553453 |
| | | biosynthesis, class V | | |
| 4701 | 1392 | UDP-Gal:betaGlcNAc beta 1,4- | 2.241 | 1562813-1563108 |
| | | galactosyltransferase, polypeptide 5 | | |
| 4795 | 1370 | asparagine-linked glycosylation 1 homolog | 4.698 | 1594394-1594762 |
| | | (yeast, beta-1,4-mannosyltransferase) | | |
| 4883 | 1350 | glycosyltransferase 8 domain containing 1 | 12.347 | 1624267-1624637 |
| 4914 | 1345 | UDP-Gal:betaGlcNAc beta 1,4- | 0.514 | 1635173-1635561 |
| | | galactosyltransferase, polypeptide 6 | | |
| 4945 | 1339 | mannoside acetylglucosaminyltransferase 5 | 0.5 | 1645857-1646201 |
| 5003 | 1323 | poly (ADP-ribose) polymerase family, member 6 | 1.689 | 1665747-1666131 |
| 5314 | 1256 | phosphatidylinositol glycan anchor | 1.768 | 1771843-1772168 |
| | | biosynthesis, class A | | |
| 5410 | 1235 | queuine tRNA-ribosyltransferase 1 | 3.554 | 1805877-1806240 |
| 5523 | 1206 | xylosylprotein beta1,4-galactosyltransferase, | 4.56 | 1845828-1846182 |
| | | polypeptide 7 (galactosyltransferase I) | | |
| 5541 | 1201 | phosphatidylinositol glycan anchor | 1.816 | 1852108-1852474 |
| | | biosynthesis, class C | | |
| 5577 | 1195 | poly (ADP-ribose) polymerase family, member 2 | 2.269 | 1864411-1864683 |
| 5594 | 1191 | mannoside acetylglucosaminyltransferase 1 | 3.072 | 1870192-1870557 |
| 5596 | 1190 | uridine monophosphate synthetase | 2.109 | 1870945-1871338 |
| 5603 | 1189 | like-glycosyltransferase | 1.088 | 1873387-1873696 |
| 5740 | 1158 | protein O-linked mannose beta1,2-N- | 2.323 | 1922712-1923111 |
| | | acetylglucosaminyltransferase | | |
| 5782 | 1148 | UDP-Gal:betaGal beta 1,3- | 2.721 | 1938009-1938394 |
| | | galactosyltransferase, polypeptide 6 | | |
| 5811 | 1143 | UDP-GalNAc:betaGlcNAc beta 1,3- | 1.658 | 1948459-1948787 |
| | | galactosaminyltransferase, polypeptide 1 | | |
| 6018 | 1098 | phosphatidylinositol glycan anchor | 0.881 | 2023895-2024261 |
| | | biosynthesis, class B | | |
| 6204 | 1057 | methylthioadenosine phosphorylase | 15.667 | 2091342-2091736 |
| 6220 | 1053 | asparagine-linked glycosylation 5 homolog (yeast, | 4.737 | 2097263-2097647 |
| | | dolichyl-phosphate beta-glucosyltransferase) | | |
| 6257 | 1043 | UDP-GlcNAc:betaGal beta-1,3-N- | 0.564 | 2110626-2111006 |
| | | acetylglucosaminyltransferase-like 1 | | |
| 6374 | 1019 | asparagine-linked glycosylation 11 homolog | 1.981 | 2151968-2152316 |
| | | (yeast, alpha-1,2-mannosyltransferase) | | |
| 6415 | 1008 | glycosyltransferase 8 domain containing 3 | 0.363 | 2166772-2167170 |
| 6428 | 1006 | core 1 synthase, glycoprotein-N- | 0.85 | 2171365-2171714 |
| | | acetylgalactosamine 3-β-galactosyltransferase, 1 | | |
| 6531 | 983 | hypoxanthine guanine phosphoribosyl | 40.474 | 2207724-2208109 |
| | | transferase 1 | | |
| 6806 | 924 | purine-nucleoside phosphorylase 1 | 10.99 | 2304356-2304474 |
| 6857 | 913 | protein O-fucosyltransferase 1 | 0.441 | 2321807-2322122 |
| 6893 | 904 | asparagine-linked glycosylation 2 homolog | 0.997 | 2332768-2333127 |
| | | (yeast, alpha-1,3-mannosyltransferase) | | |
| 6925 | 899 | dolichol-phosphate (beta-D) | 3.276 | 2343195-2343568 |
| | | mannosyltransferase 1 | | |
| 6955 | 891 | asparagine-linked glycosylation 9 homolog | 1.514 | 2353366-2353756 |
| | | (yeast, alpha 1,2 mannosyltransferase) | | |
| 7217 | 834 | poly (ADP-ribose) polymerase family, member 14 | 0.115 | 2440491-2440873 |
| 7484 | 767 | UDP-Gal:betaGlcNAc beta 1,4- | 0.387 | 2528454-2528763 |
| | | galactosyltransferase, polypeptide 1 | | |
| 7778 | 694 | RFNG O-fucosylpeptide 3-beta-N- | 1.377 | 2625536-2625911 |
| | | acetylglucosaminyltransferase | | |
| 7893 | 663 | phosphatidylinositol glycan anchor | 5.595 | 2664400-2664764 |
| | | biosynthesis, class P | | |
| 8007 | 632 | asparagine-linked glycosylation 6 homolog | 1.15 | 2702432-2702775 |
| | | (yeast, alpha-1,3,-glucosyltransferase) | | |
| 8072 | 608 | dolichol-phosphate (beta-D) | 1.511 | 2724089-2724407 |
| | | mannosyltransferase 2 | | |
| 8110 | 598 | LFNG O-fucosylpeptide 3-beta-N- | 0.277 | 2735576-2735965 |
| | | acetylglucosaminyltransferase | | |
| 8126 | 593 | fucosyltransferase 11 | 0.72 | 2740650-2740952 |
| 8137 | 591 | asparagine-linked glycosylation 13 homolog | 1.131 | 2744301-2744619 |
| | | (S. cerevisiae) | | |
| 8277 | 553 | adenine phosphoribosyl transferase | 7.251 | 2789152-2789451 |
| 8302 | 547 | poly (ADP-ribose) polymerase family, | 0.182 | 2797670-2797988 |
| | | member 11 | | |
| 8323 | 541 | ADP-ribosyltransferase 3 | 0.457 | 2804437-2804812 |
| 8510 | 493 | UDP-Gal:betaGlcNAc beta 1,3- | 0.099 | 2867869-2868208 |
| | | galactosyltransferase, polypeptide 1 | | |
| 8536 | 489 | UDP-N-acetyl-alpha-D- | 0.096 | 2876241-2876595 |
| | | galactosamine:polypeptide N- | | |
| | | acetylgalactosaminyltransferase 4 | | |
| 8900 | 417 | UDP glucuronosyltransferase 1 family, | 0.382 | 2990930-2991111 |
| | | polypeptide A6B | | |
| 9154 | 351 | UDP glucuronosyltransferase 1 family, | 0.106 | 3057120-3057211 |
| | | polypeptide A6A | | |
| 9275 | 322 | UDP-GlcNAc:betaGal beta-1,3-N- | 0.228 | 3083416-3083607 |
| | | acetylglucosaminyltransferase 4 | | |
| 3157421 | 431 | glycosyltransferase 8 domain containing 2 | 0.2 | 3173684-3173783 |
| 3157495 | 1014 | phosphatidylinositol glycan anchor biosynthesis, | 1.147 | 3183184-3183283 |
| | | class H | | |
| 3157929 | 501 | ADP-ribosyltransferase 2b | 0.579 | 3280549-3280648 |
| 3157944 | 155 | beta-1,4-N-acetyl-galactosaminyl transferase 2 | 0.038 | 3175384-3175483 |
| 3157960 | 2282 | ST8-N-acetyl-neuraminide-2,8-sialyltransferase 4 | 1.629 | 3246817-3246916 |
| 3158019 | 362 | ABO blood group (transferase A, 1-3-N- | 0.204 | 3185571-3185670 |
| | | acetylgalactosaminyltransferase, transferase B, 1- | | |
| | | 3-galactosyltransferase) | | |
| 3158211 | 343 | ST6 (-N-acetyl-neuraminyl-2,3-β-galactosyl-1,3)- | 0.282 | 3260605-3260704 |
| | | N-acetylgalactosaminide-2,6-sialyltransferase 4 | | |
| 3158222 | 726 | asparagine-linked glycosylation 10 homolog B | 0.262 | 3163121-3163220 |
| | | (yeast, -1,2-glucosyltransferase) | | |

TABLE 29
GTPase activators

| SEQ | | | Avg | siRNA SEQ |
|---|---|---|---|---|
| ID NO: | consL | Description | Cov | ID NOs: |
| 15 | 4557 | RIKEN cDNA B230339M05 gene | 3.965 | 14108-14438 |
| 58 | 4061 | TBC1 domain family, member 2B | 20.58 | 27984-28289 |
| 102 | 3754 | neurofibromatosis 1 | 1.523 | 42422-42742 |
| 128 | 3628 | regulator of G-protein signaling 17 | 3.266 | 50726-50999 |
| 231 | 3253 | SLIT-ROBO Rho GTPase activating protein 2 | 3.644 | 81642-81883 |
| 288 | 3130 | ArfGAP w/ SH# domain, ankyrin repeat & | 5.511 | 98329-98712 |
| | | PH domain 1 | | |
| 339 | 3047 | active BCR-related gene | 7.246 | 112574-112969 |
| 382 | 2979 | breakpoint cluster region | 3.754 | 125289-125540 |
| 385 | 2977 | GTPase activating RANGAP domain-like 1 | 1.897 | 126120-126355 |
| 422 | 2926 | Rho GTPase activating protein 18 | 15.948 | 136578-136825 |
| 469 | 2875 | ralA binding protein 1 | 6.921 | 149400-149662 |
| 574 | 2762 | GTPase activating protein & VPS9 domains 1 | 3.958 | 179030-179286 |
| 651 | 2697 | USP6 N-terminal like | 3.097 | 202215-202493 |
| 743 | 2635 | signal-induced proliferation-associated 1 like 1 | 5.005 | 230159-230551 |
| 766 | 2610 | Rho GTPase activating protein 21 | 4.9 | 236928-237164 |
| 872 | 2550 | ArfGAP with GTPase domain, ankyrin repeat | 0.806 | 269740-270071 |
| | | and PH domain 1 | | |
| 877 | 2547 | Rho GTPase activating protein 22 | 46.084 | 271221-271503 |
| 919 | 2530 | IQ motif containing GTPase activating protein 2 | 7.731 | 285026-285361 |
| 1013 | 2474 | ArfGAP with FG repeats 1 | 7.52 | 316623-316999 |
| 1019 | 2471 | TBC1 domain family, member 1 | 3.523 | 318888-319270 |
| 1021 | 2471 | Rho GTPase activating protein 24 | 7.769 | 319636-320032 |
| 1180 | 2390 | G protein-coupled receptor kinase-interactor 1 | 9.642 | 372750-373054 |
| 1202 | 2381 | G protein-coupled receptor kinase-interactor 2 | 1.721 | 380043-380305 |
| 1209 | 2378 | tuberous sclerosis 2 | 2.396 | 382192-382530 |
| 1231 | 2366 | ADP-ribosylation factor GTPase activating | 13 | 389186-389510 |
| | | protein 2 | | |
| 1237 | 2364 | rabaptin, RAB GTPase binding effector protein 1 | 1.86 | 391313-391594 |
| 1251 | 2357 | G-protein signalling modulator 2 (AGS3- | 25.263 | 396073-396448 |
| | | like, C. elegans) | | |
| 1391 | 2292 | ecotropic viral integration site 5 like | 2.064 | 443532-443866 |
| 1408 | 2285 | TBC1 domain family, member 15 | 5.501 | 449214-449575 |
| 1410 | 2285 | Rho GTPase activating protein 12 | 1.14 | 449921-450284 |
| 1449 | 2267 | guanosine diphosphate (GDP) dissociation | 25.652 | 463287-463618 |
| | | inhibitor 1 | | |
| 1479 | 2253 | TBC1 domain family, member 10b | 11.038 | 473445-473815 |
| 1513 | 2240 | RAN GTPase activating protein 1 | 12.173 | 484741-485095 |
| 1562 | 2226 | small G protein signaling modulator 3 | 9.371 | 501162-501548 |
| 1634 | 2197 | Rho GTPase activating protein 29 | 3.76 | 526292-526588 |
| 1642 | 2193 | IQ motif containing GTPase activating protein 1 | 0.799 | 529103-529460 |
| 1649 | 2191 | ADP-ribosylation factor GTPase activating | 17.61 | 531693-532043 |
| | | protein 1 | | |
| 1752 | 2158 | ArfGAP with GTPase domain, ankyrin repeat | 11.364 | 567066-567372 |
| | | and PH domain 3 | | |
| 1803 | 2141 | Rho GTPase activating protein 17 | 3.223 | 584731-585028 |
| 1858 | 2125 | TBC1 domain family, member 9B | 5.288 | 603350-603639 |
| 1886 | 2116 | ArfGAP with RhoGAP domain, ankyrin | 4.242 | 612818-613159 |
| | | repeat and PH domain 3 | | |
| 1922 | 2106 | stromal membrane-associated protein 1 | 12.305 | 624987-625343 |
| 1926 | 2104 | Rho guanine nucleotide exchange factor (GEF) 1 | 5.042 | 626255-626602 |
| 2031 | 2067 | TBC1 domain family, member 25 | 6.666 | 661569-661914 |
| 2165 | 2022 | RIKEN cDNA A230067G21 gene | 0.566 | 706803-707157 |
| 2223 | 2004 | Ras and Rab interactor 2 | 5.703 | 726472-726765 |
| 2289 | 1985 | amyotrophic lateral sclerosis 2 (juvenile) | 0.792 | 749132-749432 |
| | | homolog (human) | | |
| 2291 | 1985 | TBC1 domain family, member 17 | 6.336 | 749822-750199 |
| 2301 | 1983 | ADP-ribosylation factor GTPase activating | 5.309 | 753270-753612 |
| | | protein 3 | | |
| 2309 | 1981 | RAB GTPase activating protein 1-like | 1.389 | 755934-756259 |
| 2365 | 1966 | stromal membrane-associated GTPase- | 7.748 | 774678-775049 |
| | | activating protein 2 | | |
| 2419 | 1954 | RAB3 GTPase activating protein subunit 1 | 1.494 | 793063-793349 |
| 2479 | 1938 | oligophrenin 1 | 2.039 | 813214-813607 |
| 2534 | 1925 | signal-induced proliferation associated gene 1 | 3.696 | 832257-832632 |
| 2559 | 1917 | guanosine diphosphate (GDP) dissociation | 4.745 | 840859-841143 |
| | | inhibitor 2 | | |
| 2621 | 1902 | Rac GTPase-activating protein 1 | 19.316 | 861408-861766 |
| 2622 | 1902 | RAS p21 protein activator 3 | 2.103 | 861767-862055 |
| 2695 | 1886 | TBC1 domain family, member 22a | 1.294 | 886641-886941 |
| 2854 | 1845 | leucine-rich repeat kinase 2 | 1.495 | 940941-941325 |
| 2862 | 1841 | ArfGAP w/ coiled-coil, ankyrin repeat & PH | 1.693 | 943650-943952 |
| | | domains 2 | | |
| 3038 | 1783 | Rho GDP dissociation inhibitor (GDI) alpha | 85.766 | 1003934-1004232 |
| 3084 | 1771 | myosin IXb | 1.071 | 1019313-1019670 |
| 3134 | 1761 | resistance to inhibitors of cholinesterase 8 | 5.191 | 1036587-1036933 |
| | | homolog (C. elegans) | | |
| 3144 | 1759 | disabled homolog 2 (Drosophila) interacting | 1.484 | 1040220-1040553 |
| | | protein | | |
| 3163 | 1754 | rabaptin, RAB GTPase binding effector | 3.591 | 1046902-1047174 |
| | | protein 2 | | |
| 3512 | 1667 | RAS p21 protein activator 4 | 1.866 | 1164603-1164943 |
| 3637 | 1637 | Rho GTPase activating protein 25 | 4.095 | 1206771-1207157 |
| 3644 | 1635 | phosphatidylinositol-3,4,5-trisphosphate- | 2.011 | 1209078-1209429 |
| | | dependent Rac exchange factor 2 | | |
| 3676 | 1627 | ArfGAP with RhoGAP domain, ankyrin | 0.823 | 1219997-1220302 |
| | | repeat and PH domain 1 | | |
| 3750 | 1612 | SLIT-ROBO Rho GTPase activating protein 3 | 1.234 | 1245082-1245453 |
| 3760 | 1610 | TBC1 domain family, member 20 | 6.983 | 1248542-1248863 |
| 3805 | 1596 | signal-induced proliferation-associated 1 like 2 | 1.048 | 1263925-1264323 |
| 3902 | 1573 | GIPC PDZ domain containing family, | 31.917 | 1296244-1296541 |
| | | member 1 | | |
| 3911 | 1571 | TBC1 domain family, member 23 | 0.785 | 1299237-1299523 |
| 4133 | 1516 | ALS2 C-terminal like | 1.264 | 1373305-1373600 |
| 4479 | 1441 | DEP domain containing 1B | 2.389 | 1489111-1489393 |
| 4536 | 1428 | Rho GTPase activating protein 1 | 2.875 | 1507506-1507890 |
| 4552 | 1425 | Rho GTPase activating protein 6 | 0.435 | 1512969-1513333 |
| 4775 | 1373 | ecotropic viral integration site 5 | 1.536 | 1587335-1587660 |
| 4892 | 1348 | ADP-ribosylation factor-like 2 binding protein | 13.977 | 1627434-1627798 |
| 4971 | 1331 | WD repeat domain 67 | 0.743 | 1654864-1655263 |
| 5128 | 1294 | TBC1 domain family, member 10c | 1.46 | 1708143-1708504 |
| 5234 | 1274 | TBC1 domain family, member 4 | 0.291 | 1744511-1744853 |
| 5247 | 1272 | choroidermia | 0.842 | 1749109-1749507 |
| 5475 | 1218 | DEP domain containing 1a | 0.524 | 1828873-1829271 |
| 5704 | 1165 | Rho GTPase activating protein 10 | 4.456 | 1909622-1909976 |
| 5893 | 1127 | RIKEN cDNA 4933428G20 gene | 0.385 | 1978396-1978755 |
| 6057 | 1091 | TBC1 domain family, member 7 | 8.529 | 2037948-2038347 |
| 6189 | 1061 | SH3-domain binding protein 1 | 2.587 | 2085849-2086155 |
| 6387 | 1016 | development & differentiation enhancing factor 2 | 0.44 | 2156641-2157022 |
| 6449 | 1001 | TBC1 domain family, member 14 | 0.485 | 2178913-2179271 |
| 6597 | 969 | G-protein signalling modulator 3 (AGS3- | 10.243 | 2231290-2231663 |
| | | like, C. elegans) | | |
| 6629 | 963 | ankyrin repeat domain 27 (VPS9 domain) | 0.299 | 2242342-2242728 |
| 6789 | 928 | Rho GTPase activating protein 19 | 0.204 | 2298285-2298665 |
| 7012 | 877 | TBC1 domain family, member 24 | 0.285 | 2372442-2372763 |
| 7028 | 874 | T-cell lymphoma invasion and metastasis 2 | 0.333 | 2377813-2378151 |
| 7443 | 777 | TBC1 domain family, member 8 | 0.219 | 2515218-2515579 |
| 7553 | 749 | choroideremia-like | 0.203 | 2551113-2551507 |
| 7888 | 664 | StAR-related lipid transfer (START) domain | 0.12 | 2662630-2662978 |
| | | containing 13 | | |
| 7967 | 642 | RNA binding protein 1 | 2.033 | 2689665-2689951 |
| 8020 | 627 | Rho GTPase-activating protein | 0.115 | 2706942-2707263 |
| 8021 | 626 | RAS p21 protein activator 2 | 0.141 | 2707264-2707590 |
| 8342 | 537 | Rho GTPase activating protein 28 | 0.108 | 2811107-2811423 |
| 8393 | 522 | proline rich 5 (renal) | 0.462 | 2828643-2828993 |
| 8701 | 458 | TBC1 domain family, member 13 | 0.867 | 2930463-2930783 |
| 8702 | 458 | family with sequence similarity 13, member B | 0.273 | 2930784-2931124 |
| 8792 | 441 | RIKEN cDNA A630047E20 gene | 0.215 | 2959129-2959498 |
| 8865 | 425 | CDC42 GTPase-activating protein | 0.055 | 2980492-2980833 |
| 8990 | 396 | GTPase activating RANGAP domain-like 3 | 0.117 | 3015728-3016007 |
| 9085 | 369 | glucocorticoid receptor DNA binding factor 1 | 0.084 | 3040212-3040461 |
| 9146 | 354 | ArfGAP with FG repeats 2 | 0.239 | 3055161-3055411 |
| 9161 | 349 | RAB GTPase activating protein 1 | 0.083 | 3058415-3058689 |
| 9322 | 307 | Ras and Rab interactor 1 | 0.073 | 3093895-3094135 |
| 9483 | 252 | G-protein signalling modulator 1 (AGS3- | 0.075 | 3123987-3124129 |
| | | like, C. elegans) | | |
| 9653 | 186 | Rho GTPase activating protein 27 | 0.054 | 3144717-3144852 |
| 9665 | 179 | regulator of G-protein signaling 2 | 0.059 | 3145905-3146047 |
| 3157157 | 1019 | Rho guanine nucleotide exchange factor | 0.439 | 3188671-3188770 |
| | | (GEF) 19 | | |
| 3157282 | 1366 | regulator of G protein signaling 7 | 1.027 | 3244017-3244116 |
| 3157556 | 1034 | SLIT-ROBO Rho GTPase activating protein 1 | 0.398 | 3185171-3185270 |
| 3157624 | 439 | Rho GTPase activating protein 9 | 0.242 | 3186071-3186170 |
| 3157647 | 369 | Rho GTPase activating protein 20 | 0.059 | 3273896-3273995 |
| 3157800 | 319 | Ras and Rab interactor 3 | 0.082 | 3255305-3255404 |
| 3157893 | 356 | muscle-related coiled-coil protein | 0.173 | 3166984-3167083 |
| 3158205 | 1690 | TBC1D12: TBC1 domain family, member 12 | 2.618 | 3168384-3168483 |
| 3158329 | 1467 | synapse defective 1, Rho GTPase, homolog 1 | 1.092 | 3213858-3213957 |
| | | (C. elegans) | | |
| 3158404 | 1495 | NA | 0.581 | 3227117-3227216 |

TABLE 65
GTPases

| SEQ | | | Avg | siRNA SEQ |
|---|---|---|---|---|
| ID NO: | consL | Description | Covg | ID NOs: |
| 47 | 4181 | eukaryotic translation initiation factor 5B | 7.249 | 24507-24791 |
| 121 | 3653 | G1 to S phase transition 1 | 4.531 | 48461-48813 |
| 309 | 3103 | guanine nucleotide binding protein (G | 308.482 | 104658-104901 |
| | | protein), beta 1 | | |
| 333 | 3061 | guanine nucleotide binding protein (G | 12.233 | 110847-111128 |
| | | protein), alpha inhibiting 3 | | |
| 491 | 2850 | eukaryotic translation elongation factor 2 | 331.312 | 155612-155855 |
| 498 | 2844 | signal recognition particle receptor | 23.636 | 157648-157932 |
| | | (‘docking protein’) | | |
| 758 | 2618 | elongation factor Tu GTP binding domain | 10.74 | 234313-234699 |
| | | containing 1 | | |
| 869 | 2551 | Ras-related GTP binding C | 52.673 | 268890-269114 |
| 872 | 2550 | ArfGAP with GTPase domain, ankyrin | 0.806 | 269740-270071 |
| | | repeat and PH domain 1 | | |
| 874 | 2549 | elongation factor Tu GTP binding domain | 13.667 | 270373-270590 |
| | | containing 2 | | |
| 938 | 2520 | G elongation factor, mitochondrial 1 | 60.355 | 291757-292001 |
| 1104 | 2424 | ras homolog gene family, member Q | 4.127 | 346976-347213 |
| 1333 | 2322 | dynamin 2 | 10.975 | 423531-423830 |
| 1378 | 2296 | mitofusin 1 | 1.418 | 439108-439451 |
| 1397 | 2290 | RAS-related C3 botulinum substrate 1 | 73.806 | 445639-445879 |
| 1487 | 2250 | guanine nucleotide binding protein, alpha q | 1.455 | 476277-476517 |
| | | polypeptide | | |
| 1520 | 2239 | optic atrophy 1 homolog (human) | 2.52 | 487010-487405 |
| 1709 | 2172 | guanine nucleotide binding protein | 70.605 | 552132-552530 |
| | | (G protein), alpha inhibiting 2 | | |
| 1769 | 2154 | EH-domain containing 1 | 11.604 | 572945-573251 |
| 1816 | 2137 | dynamin 1-like | 4.171 | 589195-589429 |
| 1944 | 2097 | cell division cycle 42 homolog | 189.607 | 632324-632630 |
| | | (S. cerevisiae) | | |
| 2009 | 2076 | guanine nucleotide binding protein, 13 | 2.993 | 654543-654775 |
| 2124 | 2034 | ras homolog gene family, member A | 135.612 | 693012-693333 |
| 2488 | 1937 | GTP binding protein 2 | 5.681 | 816419-816817 |
| 2525 | 1927 | myxovirus (influenza virus) resistance 2 | 8.118 | 829145-829432 |
| 2560 | 1916 | EH-domain containing 2 | 3.355 | 841144-841487 |
| 2575 | 1913 | Hbs1-like (S. cerevisiae) | 2.621 | 846230-846577 |
| 2700 | 1885 | GUF1 GTPase homolog (S. cerevisiae) | 4.872 | 888158-888500 |
| 2834 | 1851 | neuroblastoma ras oncogene | 2.46 | 934198-934494 |
| 2857 | 1844 | guanine nucleotide binding protein, alpha | 2.474 | 942072-942447 |
| | | transducing 1 | | |
| 2918 | 1824 | eukaryotic translation initiation factor 2, | 14.911 | 962789-963172 |
| | | subunit 3, structural gene X-linked | | |
| 3009 | 1792 | eukaryotic elongation factor, | 3.035 | 994350-994678 |
| | | selenocysteine-tRNA-specific | | |
| 3041 | 1782 | GTP binding protein 1 | 3.109 | 1004869-1005198 |
| 3244 | 1737 | tubulin, alpha 1B | 543.754 | 1074476-1074632 |
| 3372 | 1701 | guanine nucleotide binding protein | 5.812 | 1117711-1118107 |
| | | (G protein), beta 4 | | |
| 3427 | 1687 | RAB5A, member RAS oncogene family | 21.29 | 1136305-1136633 |
| 3455 | 1678 | guanine nucleotide binding protein, alpha O | 0.792 | 1145689-1145997 |
| 3661 | 1631 | tubulin, beta 5 | 61.529 | 1214795-1215127 |
| 3670 | 1628 | atlastin GTPase 3 | 1.006 | 1217824-1218196 |
| 3715 | 1620 | tubulin, gamma 1 | 36.02 | 1233354-1233745 |
| 3812 | 1594 | tubulin, alpha 1A | 100.894 | 1266291-1266518 |
| 3829 | 1591 | guanine nucleotide binding protein | 74.137 | 1271846-1272244 |
| | | (G protein) β2 | | |
| 3862 | 1582 | guanine nucleotide binding protein, 11 | 4.154 | 1282881-1283160 |
| 3992 | 1550 | tubulin, 1C | 191.248 | 1326132-1326373 |
| 4044 | 1539 | tubulin, β2C | 81.933 | 1343483-1343875 |
| 4168 | 1509 | G elongation factor, mitochondrial 2 | 1.773 | 1384797-1385138 |
| 4180 | 1507 | mitofusin 2 | 4.551 | 1389006-1389340 |
| 4212 | 1498 | RAB5C, member RAS oncogene family | 34.285 | 1400104-1400434 |
| 4325 | 1476 | eukaryotic translation elongation factor 1 2 | 3.269 | 1437945-1438305 |
| 4398 | 1459 | tubulin, alpha 4A | 8.154 | 1462310-1462667 |
| 4458 | 1447 | GTP binding protein 3 | 3.549 | 1482368-1482685 |
| 4496 | 1437 | GNAS (guanine nucleotide binding protein, | 670.983 | 1494365-1494682 |
| | | alpha stimulating) complex locus | | |
| 4559 | 1425 | RAS-related protein-1a | 12.202 | 1515193-1515550 |
| 4689 | 1394 | mitochondrial translational initiation factor 2 | 1.08 | 1558510-1558896 |
| 4774 | 1373 | guanylate binding protein 2 | 1.175 | 1586947-1587334 |
| 4912 | 1345 | v-Ki-ras2 Kirsten rat sarcoma viral | 3.151 | 1634477-1634773 |
| | | oncogene homolog | | |
| 5185 | 1283 | Tu translation elongation factor, | 19.719 | 1727760-1728085 |
| | | mitochondrial | | |
| 5399 | 1238 | RAN, member RAS oncogene family | 61.287 | 1802120-1802418 |
| 5621 | 1186 | ras homolog gene family, member G | 3.894 | 1879861-1880245 |
| 5703 | 1165 | guanine nucleotide binding protein, 12 | 3.153 | 1909321-1909621 |
| 5909 | 1123 | RAB34, member of RAS oncogene family | 14.774 | 1984213-1984547 |
| 6358 | 1022 | EH-domain containing 3 | 1.748 | 2146156-2146534 |
| 6499 | 987 | guanine nucleotide binding protein | 0.658 | 2196424-2196754 |
| | | (G protein), inhibiting 1 | | |
| 6599 | 969 | epsilon-tubulin 1 | 0.387 | 2232061-2232442 |
| 6669 | 955 | ras homolog gene family, member U | 0.296 | 2256530-2256915 |
| 6843 | 915 | RAB13, member RAS oncogene family | 14.169 | 2316888-2317279 |
| 7557 | 748 | ADP-ribosylation factor related protein 1 | 2.613 | 2552598-2552994 |
| 7670 | 721 | myxovirus (influenza virus) resistance 1 | 0.687 | 2588615-2588951 |
| 7944 | 647 | ras homolog gene family, member J | 0.275 | 2681897-2682206 |
| 7975 | 639 | tubulin, beta 3 | 2.093 | 2692217-2692262 |
| 8248 | 561 | tubulin, beta 4 | 0.376 | 2779208-2779248 |
| 8318 | 541 | T-cell specific GTPase | 0.193 | 2802893-2803167 |
| 8330 | 540 | atlastin GTPase 2 | 0.154 | 2806902-2807275 |
| 8367 | 530 | ADP-ribosylation factor-like 4A | 0.247 | 2819826-2820225 |
| 8407 | 517 | guanine nucleotide binding protein, alpha | 0.16 | 2833728-2833995 |
| | | stimulating, olfactory type | | |
| 8423 | 514 | guanine nucleotide binding prot (G protein), β 3 | 0.305 | 2839381-2839711 |
| 8694 | 459 | tubulin, alpha 3A | 0.369 | 2928173-2928397 |
| 8711 | 456 | guanylate binding protein 5 | 0.254 | 2933557-2933829 |
| 8739 | 451 | tubulin, alpha 8 | 0.315 | 2942782-2943028 |
| 9004 | 392 | tubulin, beta 2A | 2.629 | 3019264-3019285 |
| 9250 | 330 | tubulin, beta 2B | 0.402 | 3078180-3078203 |
| 9400 | 283 | guanine nucl binding prot. (G protein), γ 3 | 0.168 | 3109391-3109586 |
| 9520 | 237 | RAS-like, family 2, locus 9 | 0.34 | 3129635-3129703 |
| 9605 | 205 | RAS-related C3 botulinum substrate 2 | 0.555 | 3140533-3140548 |
| 3157235 | 968 | Ras-like without CAAX 2 | 1.124 | 3191071-3191170 |
| 3157288 | 395 | RAB5B, member RAS oncogene family | 0.422 | 3248917-3249016 |
| 3157535 | 325 | interferon inducible GTPase 1 | 0.11 | 3164284-3164383 |
| 3157709 | 573 | guanine nucl binding prot, transducing 2 | 0.496 | 3265005-3265104 |
| 3157755 | 370 | interferon gamma induced GTPase | 0.182 | 3283049-3283148 |
| 3157887 | 312 | dynamin 3 | 0.068 | 3263705-3263804 |
| 3158025 | 336 | RAB37, member of RAS oncogene family | 0.154 | 3216491-3216590 |
| 3158055 | 477 | tubulin, alpha-like 3 | 0.154 | 3281749-3281848 |
| 3158311 | 545 | RAS, dexamethasone-induced 1 | 0.595 | 3272596-3272695 |

TABLE 66
Cytoskeleton

| SEQ | | | Avg | siRNA SEQ |
|---|---|---|---|---|
| ID NO: | consL | Description | Covg | ID NOs: |
| 19 | 4458 | platelet-activating factor acetylhydrolase, | 4.915 | 15430-15711 |
| | | isoform 1b, subunit 1 | | |
| 33 | 4278 | bicaudal D homolog 2 (Drosophila) | 8.144 | 19767-20155 |
| 38 | 4237 | hook homolog 3 (Drosophila) | 2.298 | 21465-21748 |
| 44 | 4201 | SH3-domain kinase binding protein 1 | 6.615 | 23443-23756 |
| 60 | 4019 | MYC binding protein 2 | 2.593 | 28599-28954 |
| 76 | 3941 | neuron navigator 1 | 0.619 | 34046-34322 |
| 125 | 3643 | eukaryotic translation initiation factor 3, | 40.603 | 49822-50120 |
| | | subunit A | | |
| 140 | 3579 | actinin, alpha 1 | 23.486 | 54297-54516 |
| 146 | 3553 | microtubule-actin crosslinking factor 1 | 3.329 | 56027-56372 |
| 165 | 3467 | radixin | 17.836 | 61786-62020 |
| 173 | 3427 | protein phosphatase 4, regulatory subunit 2 | 12.016 | 64291-64567 |
| 174 | 3423 | myosin phosphatase Rho interacting protein | 10.215 | 64568-64841 |
| 214 | 3308 | microtubule-associated protein, RP/EB | 9.685 | 76455-76767 |
| | | family, member 2 | | |
| 269 | 3164 | filamin, beta | 2.477 | 93056-93347 |
| 272 | 3152 | Rho-associated coiled-coil containing | 3.17 | 94052-94292 |
| | | protein kinase 1 | | |
| 278 | 3141 | abl-interactor 1 | 4.255 | 95601-95909 |
| 284 | 3135 | fermitin family homolog 2 (Drosophila) | 27.426 | 97199-97521 |
| 289 | 3129 | testis specific gene A14 | 3.473 | 98713-99031 |
| 301 | 3110 | MAP/microtubule affinity-regulating kinase 1 | 3.607 | 102310-102609 |
| 322 | 3079 | plectin 1 | 3.784 | 108038-108268 |
| 324 | 3075 | parvin, alpha | 6.971 | 108553-108801 |
| 380 | 2981 | topoisomerase (DNA) II binding protein 1 | 7.196 | 124761-125048 |
| 400 | 2954 | moesin | 56.571 | 130562-130798 |
| 408 | 2949 | protein Tyr phosphatase, non-receptor type 14 | 0.65 | 132677-132944 |
| 446 | 2899 | actinin alpha 4 | 23.469 | 143309-143623 |
| 451 | 2894 | kinetochore associated 1 | 2.501 | 144746-145029 |
| 477 | 2865 | spindlin 1 | 18.581 | 151421-151677 |
| 480 | 2863 | erythrocyte protein band 4.1-like 2 | 9.783 | 152372-152645 |
| 505 | 2836 | myosin, heavy polypeptide 9, non-muscle | 1.62 | 159627-159938 |
| 508 | 2836 | filamin, alpha | 21.729 | 160437-160654 |
| 518 | 2828 | FERM domain containing 4A | 2.061 | 163151-163399 |
| 527 | 2815 | spectrin beta 2 | 2.13 | 165820-166071 |
| 528 | 2814 | spastin | 4.005 | 166072-166288 |
| 543 | 2791 | Janus kinase 2 | 4.149 | 170408-170768 |
| 562 | 2773 | uveal autoantigen with coiled-coil domains | 14.958 | 175535-175851 |
| | | and ankyrin repeats | | |
| 573 | 2763 | calmodulin 1 | 15.152 | 178775-179029 |
| 581 | 2754 | tubulin, gamma complex associated protein 5 | 3.189 | 181260-181476 |
| 617 | 2725 | dynactin 1 | 7.088 | 191583-191944 |
| 621 | 2718 | catenin (cadherin associated protein), alpha 1 | 30.996 | 192742-193116 |
| 659 | 2690 | kinesin family member 15 | 9.379 | 204514-204832 |
| 664 | 2688 | tetratricopeptide repeat domain 21B | 5.893 | 205946-206342 |
| 666 | 2688 | adducin 1 (alpha) | 12.01 | 206742-207131 |
| 706 | 2661 | retinoic acid induced 14 | 5.867 | 218315-218707 |
| 730 | 2639 | microtubule associated serine/threonine kinase 2 | 9.069 | 225909-226275 |
| 749 | 2626 | WD repeat domain 1 | 18.988 | 231778-232036 |
| 763 | 2614 | capping protein (actin filament) muscle Z- | 5.404 | 235917-236159 |
| | | line, alpha 1 | | |
| 766 | 2610 | Rho GTPase activating protein 21 | 4.9 | 236928-237164 |
| 806 | 2584 | spermatid perinuclear RNA binding protein | 1.175 | 249509-249890 |
| 811 | 2582 | ajuba | 12.735 | 251195-251502 |
| 812 | 2581 | outer dense fiber of sperm tails 2 | 4.42 | 251503-251729 |
| 830 | 2569 | Fgfr1 oncogene partner | 3.18 | 256961-257251 |
| 831 | 2569 | microtubule-associated protein 7 domain | 16.621 | 257252-257564 |
| | | containing 1 | | |
| 841 | 2564 | kinesin family member 5B | 3.218 | 260377-260685 |
| 848 | 2561 | ARP1 actin-related protein 1 homolog A, | 27.559 | 262622-262828 |
| | | centractin alpha (yeast) | | |
| 860 | 2555 | cortactin | 45.514 | 265970-266319 |
| 889 | 2543 | katanin p80 (WD40-containing) subunit B 1 | 12.112 | 275290-275634 |
| 905 | 2536 | ADP-ribosylation factor-like 8B | 2.122 | 280457-280707 |
| 962 | 2503 | expressed sequence AW555464 | 2.283 | 299312-299692 |
| 972 | 2498 | ARP3 actin-related protein 3 homolog (yeast) | 166.603 | 302483-302872 |
| 993 | 2485 | ARP2 actin-related protein 2 homolog (yeast) | 26.066 | 309842-310230 |
| 997 | 2483 | abl-interactor 2 | 1.097 | 311332-311712 |
| 1006 | 2477 | large tumor suppressor 2 | 3.379 | 314156-314545 |
| 1021 | 2471 | Rho GTPase activating protein 24 | 7.769 | 319636-320032 |
| 1026 | 2466 | FERM domain containing 4B | 2.223 | 321426-321672 |
| 1062 | 2447 | septin 2 | 12.767 | 333080-333462 |
| 1069 | 2440 | dishevelled, dsh homolog 1 (Drosophila) | 21.381 | 335136-335489 |
| 1081 | 2436 | ezrin | 31.498 | 339220-339540 |
| 1085 | 2434 | Wiskott-Aldrich syndrome-like (human) | 1.492 | 340449-340691 |
| 1094 | 2430 | SCY1-like 1 (S. cerevisiae) | 12.863 | 343589-343905 |
| 1097 | 2428 | sarcolemma associated protein | 1.377 | 344524-344917 |
| 1103 | 2426 | dystonin | 1.863 | 346599-346975 |
| 1117 | 2418 | drebrin 1 | 25.781 | 351269-351567 |
| 1126 | 2412 | spectrin alpha 2 | 4.506 | 354395-354680 |
| 1133 | 2410 | Rpgrip1-like | 0.564 | 357006-357378 |
| 1175 | 2393 | inositol polyphosphate phosphatase-like 1 | 3.628 | 371083-371386 |
| 1189 | 2386 | talin 1 | 2.605 | 375983-376311 |
| 1208 | 2379 | CDC14 cell division cycle 14 homolog A | 2.141 | 381807-382191 |
| | | (S. cerevisiae) | | |
| 1247 | 2359 | microtubule-associated protein, RP/EB | 18.63 | 394632-394981 |
| | | family, member 1 | | |
| 1255 | 2354 | centrosomal protein 110 | 0.814 | 397494-397774 |
| 1278 | 2344 | FERM domain containing 6 | 4.1 | 404997-405390 |
| 1279 | 2343 | TRIO and F-actin binding protein | 34.395 | 405391-405739 |
| 1296 | 2335 | amyloid beta (A4) precursor protein-binding, | 13.338 | 411043-411389 |
| | | family B, member 1 interacting protein | | |
| 1314 | 2327 | centrosomal protein 135 | 0.683 | 417267-417520 |
| 1327 | 2324 | centrosomal protein 55 | 19.363 | 421520-421872 |
| 1333 | 2322 | dynamin 2 | 10.975 | 423531-423830 |
| 1349 | 2315 | erythrocyte protein band 4.1-like 1 | 3.165 | 429287-429612 |
| 1353 | 2311 | centrosomal protein 63 | 8.32 | 430642-430998 |
| 1359 | 2308 | smoothelin | 3.137 | 432687-433041 |
| 1366 | 2303 | cofilin 2, muscle | 5.323 | 435213-435610 |
| 1392 | 2291 | tubulin folding cofactor E-like | 2.632 | 443867-444266 |
| 1404 | 2287 | A kinase (PRKA) anchor protein (gravin) 12 | 7.444 | 447806-448127 |
| 1434 | 2273 | expressed sequence AI314180 | 9.004 | 458166-458524 |
| 1458 | 2262 | Alstrom syndrome 1 homolog (human) | 0.712 | 466342-466731 |
| 1466 | 2259 | coiled-coil domain containing 85B | 25.622 | 469052-469416 |
| 1505 | 2243 | growth arrest-specific 2 like 1 | 14.146 | 482255-482606 |
| 1506 | 2243 | WAS/WASL interacting protein family, | 5.215 | 482607-482938 |
| | | member 1 | | |
| 1513 | 2240 | RAN GTPase activating protein 1 | 12.173 | 484741-485095 |
| 1519 | 2239 | KRIT1, ankyrin repeat containing | 9.236 | 486770-487009 |
| 1530 | 2238 | tropomodulin 3 | 3.292 | 490452-490783 |
| 1531 | 2237 | twinfilin, actin-binding protein, homolog 1 | 14.634 | 490784-491124 |
| | | (Drosophila) | | |
| 1557 | 2227 | annexin A11 | 55.567 | 499580-499921 |
| 1558 | 2227 | parvin, beta | 4.466 | 499922-500228 |
| 1565 | 2224 | ZW10 homolog (Drosophila), | 12.629 | 502292-502621 |
| | | centromere/kinetochore protein | | |
| 1566 | 2224 | coronin, actin binding protein 1C | 4.605 | 502622-502971 |
| 1577 | 2218 | transforming, acidic coiled-coil containing | 1.821 | 506354-506697 |
| | | protein 2 | | |
| 1582 | 2214 | family with sequence similarity 83, member D | 12.849 | 508106-508316 |
| 1593 | 2210 | rho/rac guanine nucleotide exchange factor | 3.451 | 511846-512237 |
| | | (GEF) 2 | | |
| 1610 | 2205 | ankyrin 2, brain | 0.639 | 517928-518264 |
| 1673 | 2184 | adducin 3 (gamma) | 5.724 | 539781-540145 |
| 1682 | 2180 | microtubule associated monoxygenase, | 6.737 | 542784-543124 |
| | | calponin and LIM domain containing 1 | | |
| 1767 | 2154 | programmed cell death 6 interacting protein | 24.668 | 572196-572546 |
| 1820 | 2137 | slingshot homolog 3 (Drosophila) | 2.567 | 590404-590772 |
| 1831 | 2134 | dystroglycan 1 | 3.205 | 594147-594505 |
| 1850 | 2128 | nephronophthisis 4 (juvenile) homolog (human) | 2.545 | 600625-600911 |
| 1886 | 2116 | ArfGAP with RhoGAP domain, ankyrin | 4.242 | 612818-613159 |
| | | repeat and PH domain 3 | | |
| 1903 | 2112 | nuclear distribution gene E-like homolog 1 | 8.837 | 618380-618725 |
| | | (A. nidulans) | | |
| 1910 | 2110 | macrophage erythroblast attacher | 48.23 | 620748-621108 |
| 1939 | 2098 | leucine zipper, putative tumor suppressor 2 | 14.187 | 630655-630915 |
| 1940 | 2098 | kinesin family member C3 | 6.785 | 630916-631256 |
| 2010 | 2075 | myosin XVIIIA | 1.283 | 654776-655088 |
| 2020 | 2072 | vasodilator-stimulated phosphoprotein | 13.006 | 658006-658374 |
| 2023 | 2072 | zyxin | 12.684 | 658946-659253 |
| 2033 | 2066 | nucleoporin 85 | 17.448 | 662254-662568 |
| 2050 | 2061 | engulfment and cell motility 2, ced-12 | 7.176 | 668000-668354 |
| | | homolog (C. elegans) | | |
| 2095 | 2045 | CAP, adenylate cyclase-associated protein 1 | 88.915 | 683551-683847 |
| | | (yeast) | | |
| 2105 | 2042 | CD2-associated protein | 0.744 | 686855-687170 |
| 2124 | 2034 | ras homolog gene family, member A | 135.612 | 693012-693333 |
| 2136 | 2031 | midline 2 | 0.659 | 697033-697389 |
| 2160 | 2024 | lethal giant larvae homolog 1 (Drosophila) | 2.293 | 705082-705399 |
| 2175 | 2018 | dishevelled 2, dsh homolog (Drosophila) | 3.722 | 710088-710457 |
| 2191 | 2013 | ARP8 actin-related protein 8 homolog | 8.289 | 715461-715836 |
| | | (S. cerevisiae) | | |
| 2204 | 2010 | actin filament associated protein 1 | 1.126 | 719890-720203 |
| 2205 | 2010 | CDC42 effector protein (Rho | 4.544 | 720204-720579 |
| | | GTPase binding) 1 | | |
| 2212 | 2008 | thyroid hormone receptor interactor 10 | 30.196 | 722669-723012 |
| 2220 | 2005 | tropomyosin 4 | 428.406 | 725519-725834 |
| 2232 | 2001 | gene model 114 | 3.412 | 729587-729910 |
| 2235 | 2001 | septin 7 | 3.112 | 730587-730976 |
| 2295 | 1984 | microcephaly, primary autosomal recessive 1 | 0.629 | 751244-751582 |
| 2346 | 1973 | calmodulin 3 | 14.014 | 768392-768693 |
| 2354 | 1970 | protein phosphatase 1, regulatory subunit 9B | 2.194 | 771093-771432 |
| 2375 | 1964 | amyloid beta precursor protein (cytoplasmic | 13.369 | 778032-778283 |
| | | tail) binding protein 2 | | |
| 2379 | 1963 | protein regulator of cytokinesis 1 | 14.63 | 779205-779513 |
| 2387 | 1962 | intraflagellar transport 80 homolog | 0.991 | 782001-782399 |
| | | (Chlamydomonas) | | |
| 2416 | 1954 | kinesin family member C1 | 16.341 | 792040-792370 |
| 2430 | 1949 | anillin, actin binding protein | 2.848 | 796726-797054 |
| 2441 | 1946 | CLIP associating protein 2 | 1.013 | 800461-800731 |
| 2466 | 1941 | centrosomal protein 170 | 0.772 | 808772-809083 |
| 2479 | 1938 | oligophrenin 1 | 2.039 | 813214-813607 |
| 2482 | 1938 | leucine rich repeat containing 49 | 3.959 | 814326-814699 |
| 2506 | 1931 | Mid1 interacting protein 1 (gastrulation | 129.96 | 822665-823028 |
| | | specific G12-like (zebrafish)) | | |
| 2510 | 1930 | Bardet-Biedl syndrome 4 (human) | 5.356 | 824110-824394 |
| 2512 | 1930 | formin homology 2 domain containing 1 | 2.963 | 824760-825066 |
| 2520 | 1929 | drebrin-like | 40.695 | 827385-827727 |
| 2543 | 1922 | beclin 1, autophagy related | 22.681 | 835365-835694 |
| 2546 | 1921 | actin, gamma, cytoplasmic 1 | 284.261 | 836348-836704 |
| 2551 | 1919 | coiled-coil and C2 domain containing 2A | 0.604 | 838097-838446 |
| 2578 | 1912 | hook homolog 2 (Drosophila) | 4.1 | 847312-847598 |
| 2583 | 1910 | inner centromere protein | 4.499 | 848988-849386 |
| 2605 | 1907 | protein serine kinase H1 | 2.142 | 856267-856572 |
| 2609 | 1905 | Janus kinase 1 | 7.769 | 857488-857805 |
| 2621 | 1902 | Rac GTPase-activating protein 1 | 19.316 | 861408-861766 |
| 2644 | 1897 | protein phosphatase 2 (formerly 2A), | 46.955 | 869071-869380 |
| | | catalytic subunit, alpha isoform | | |
| 2691 | 1887 | growth arrest specific 2 | 2.282 | 885284-885579 |
| 2745 | 1872 | mitotic arrest deficient 1-like 1 | 4.132 | 903571-903958 |
| 2764 | 1866 | DDB1 and CUL4 associated factor 12 | 5.371 | 910380-910622 |
| 2775 | 1862 | actin, beta | 57.391 | 913994-914315 |
| 2805 | 1856 | enabled homolog (Drosophila) | 2.768 | 924287-924598 |
| 2816 | 1854 | coronin, actin binding protein 1B | 56.328 | 928073-928458 |
| 2841 | 1849 | tubulin, gamma complex associated protein 3 | 3.057 | 936562-936886 |
| 2844 | 1847 | large tumor suppressor | 0.394 | 937654-937969 |
| 2880 | 1837 | actin related protein 2/3 complex, subunit 5 | 60.269 | 949749-950130 |
| 2896 | 1832 | centromere protein E | 1.871 | 955437-955745 |
| 2943 | 1818 | LIM and SH3 protein 1 | 13.57 | 971615-971919 |
| 3042 | 1782 | sphingosine-1-phosphate phosphatase 1 | 3.922 | 1005199-1005578 |
| 3050 | 1780 | centrosomal protein 68 | 0.822 | 1007927-1008310 |
| 3069 | 1775 | centlein, centrosomal protein | 0.588 | 1014347-1014609 |
| 3082 | 1772 | pleckstrin homology domain containing, | 3.954 | 1018621-1018991 |
| | | family H (with MyTH4 domain) member 3 | | |
| 3084 | 1771 | myosin IXb | 1.071 | 1019313-1019670 |
| 3104 | 1768 | capping protein (actin filament) muscle Z- | 15.011 | 1026343-1026702 |
| | | line, 2 | | |
| 3147 | 1758 | dynein cytoplasmic 2 heavy chain 1 | 0.317 | 1041205-1041524 |
| 3170 | 1752 | PTK2 protein tyrosine kinase 2 | 5.096 | 1049366-1049709 |
| 3172 | 1752 | FYVE, RhoGEF and PH domain containing 1 | 5.286 | 1050013-1050360 |
| 3199 | 1747 | vimentin | 514.871 | 1059326-1059717 |
| 3207 | 1744 | ring finger protein 19A | 1.513 | 1062111-1062496 |
| 3211 | 1742 | phosphodiesterase 4D interacting prot | 1.285 | 1063460-1063768 |
| | | (myomegalin) | | |
| 3215 | 1742 | c-abl oncogene 1, receptor tyrosine kinase | 0.436 | 1064790-1065134 |
| 3223 | 1741 | CDC42 effector prot (Rho GTPase binding) 3 | 6.317 | 1067503-1067844 |
| 3230 | 1739 | destrin | 50.913 | 1069789-1070099 |
| 3263 | 1730 | tubulin-specific chaperone E | 13.488 | 1080945-1081272 |
| 3306 | 1717 | CLIP associating protein 1 | 0.948 | 1095379-1095748 |
| 3341 | 1708 | sorbin and SH3 domain containing 3 | 7.794 | 1107024-1107409 |
| 3502 | 1669 | microtubule-associated protein 6 | 3.649 | 1161307-1161624 |
| 3505 | 1668 | katanin p60 (ATPase-containing) subunit A1 | 32.182 | 1162218-1162611 |
| 3541 | 1661 | membrane protein, palmitoylated | 15.267 | 1174530-1174867 |
| 3577 | 1650 | cell division cycle 25 homolog B (S. pombe) | 1.866 | 1186395-1186715 |
| 3583 | 1649 | checkpoint kinase 1 homolog (S. pombe) | 3.146 | 1188354-1188736 |
| 3590 | 1647 | capping protein (actin filament) muscle Z- | 60.716 | 1190654-1190998 |
| | | line, beta | | |
| 3593 | 1647 | serologically defined colon cancer antigen 8 | 3.621 | 1191627-1191981 |
| 3609 | 1642 | tubulin, delta 1 | 13.501 | 1197043-1197421 |
| 3643 | 1635 | metastasis suppressor 1 | 0.4 | 1208709-1209077 |
| 3692 | 1625 | family with sequence similarity 82, member A2 | 4.761 | 1225295-1225616 |
| 3715 | 1620 | tubulin, gamma 1 | 36.02 | 1233354-1233745 |
| 3720 | 1619 | CDK5 regulatory subunit associated protein 2 | 1.713 | 1235062-1235355 |
| 3724 | 1618 | catenin (cadherin associated protein), -like 1 | 0.699 | 1236365-1236728 |
| 3774 | 1605 | family with sequence similarity 110, | 2.345 | 1253240-1253580 |
| | | member B | | |
| 3781 | 1603 | profilin 2 | 23.497 | 1255751-1256078 |
| 3796 | 1599 | phosphatidylinositol transfer protein, | 0.365 | 1260891-1261174 |
| | | membrane-associated 2 | | |
| 3846 | 1585 | centrosomal protein 72 | 5.434 | 1277509-1277820 |
| 3850 | 1585 | actin related protein 2/3 complex, subunit 1A | 46.114 | 1278978-1279372 |
| 3898 | 1574 | twinfilin, actin-binding protein, homolog 2 | 27.133 | 1295102-1295393 |
| | | (Drosophila) | | |
| 3901 | 1574 | FYVE, RhoGEF and PH domain containing 6 | 0.595 | 1295966-1296243 |
| 3910 | 1572 | cyclin B1 | 25.641 | 1298863-1299236 |
| 3933 | 1566 | ARP10 actin-related protein 10 homolog | 11.257 | 1306422-1306806 |
| | | (S. cerevisiae) | | |
| 3946 | 1562 | polo-like kinase 4 (Drosophila) | 2.986 | 1310666-1311034 |
| 3949 | 1562 | Ena-vasodilator stimulated phosphoprotein | 3.874 | 1311646-1311940 |
| 4009 | 1547 | ELMO domain containing 2 | 0.601 | 1331721-1332074 |
| 4014 | 1545 | protein phosphatase 2 (formerly 2A), | 82.162 | 1333415-1333732 |
| | | catalytic subunit, beta isoform | | |
| 4017 | 1545 | Janus kinase 3 | 1.252 | 1334368-1334721 |
| 4036 | 1541 | diaphanous homolog 1 (Drosophila) | 1.436 | 1340818-1341199 |
| 4088 | 1525 | ectodermal-neural cortex 1 | 2.166 | 1357871-1358264 |
| 4103 | 1522 | HAUS augmin-like complex, subunit 4 | 20.991 | 1362890-1363204 |
| 4160 | 1510 | fibronectin type 3 and SPRY domain- | 2.066 | 1382212-1382607 |
| | | containing protein | | |
| 4163 | 1510 | glycophorin C | 7.299 | 1383318-1383614 |
| 4176 | 1507 | WASP family 1 | 1.25 | 1387619-1387949 |
| 4180 | 1507 | mitofusin 2 | 4.551 | 1389006-1389340 |
| 4181 | 1507 | protein Tyr phosphatase, non-receptor type 13 | 0.677 | 1389341-1389646 |
| 4199 | 1500 | cytoskeleton associated protein 2 | 1.674 | 1395624-1396011 |
| 4202 | 1500 | intraflagellar transport 57 homolog | 4.102 | 1396618-1396929 |
| | | (Chlamydomonas) | | |
| 4220 | 1496 | centrosomal protein 57 | 2.62 | 1402802-1403129 |
| 4238 | 1493 | nucleoporin 62 | 5.816 | 1408710-1409085 |
| 4239 | 1493 | tripartite motif-containing 54 | 10.739 | 1409086-1409394 |
| 4251 | 1492 | UBX domain protein 6 | 21.107 | 1412861-1413233 |
| 4257 | 1491 | LIM domain and actin binding 1 | 0.916 | 1414950-1415263 |
| 4260 | 1489 | TRAF3 interacting protein 1 | 1.646 | 1415915-1416305 |
| 4285 | 1483 | dynactin 4 | 1.16 | 1424542-1424937 |
| 4370 | 1466 | shroom family member 3 | 0.482 | 1452845-1453240 |
| 4386 | 1462 | growth arrest specific 8 | 4.02 | 1458247-1458599 |
| 4408 | 1457 | influenza virus NS1A binding protein | 0.809 | 1465620-1465977 |
| 4457 | 1447 | erythrocyte protein band 4.1 | 0.529 | 1481994-1482367 |
| 4484 | 1440 | sarcoglycan, epsilon | 14.957 | 1490848-1491203 |
| 4498 | 1437 | slingshot homolog 1 (Drosophila) | 1.043 | 1494976-1495267 |
| 4503 | 1435 | ARP1 actin-related protein 1 homolog B, | 3.69 | 1496661-1496992 |
| | | centractin beta (yeast) | | |
| 4550 | 1426 | PDZ and LIM domain 1 (elfin) | 53.065 | 1512325-1512634 |
| 4552 | 1425 | Rho GTPase activating protein 6 | 0.435 | 1512969-1513333 |
| 4564 | 1423 | paxillin | 2.436 | 1517047-1517389 |
| 4570 | 1422 | coactosin-like 1 (Dictyostelium) | 22.98 | 1519097-1519422 |
| 4604 | 1415 | CAP-GLY domain containing linker protein 2 | 1.613 | 1530649-1531015 |
| 4612 | 1413 | cysteine and glycine-rich protein 1 | 17.093 | 1533366-1533652 |
| 4616 | 1412 | microtubule associated monoxygenase, | 0.37 | 1534571-1534894 |
| | | calponin and LIM domain containing-like 1 | | |
| 4667 | 1399 | family with sequence similarity 110, | 4.673 | 1551090-1551435 |
| | | member A | | |
| 4729 | 1387 | regulator of chromosome condensation 2 | 9.39 | 1571986-1572324 |
| 4732 | 1386 | sirtuin 2 (silent mating type information | 9.325 | 1573015-1573411 |
| | | regulation 2, homolog) 2 (S. cerevisiae) | | |
| 4775 | 1373 | ecotropic viral integration site 5 | 1.536 | 1587335-1587660 |
| 4778 | 1373 | tropomyosin 1, alpha | 14.432 | 1588306-1588667 |
| 4811 | 1366 | coiled-coil domain containing 99 | 1.214 | 1599899-1600288 |
| 4852 | 1357 | syntrophin, basic 2 | 0.315 | 1614004-1614358 |
| 4869 | 1354 | transforming growth factor beta 1 induced | 2.305 | 1619537-1619815 |
| | | transcript 1 | | |
| 4892 | 1348 | ADP-ribosylation factor-like 2 binding protein | 13.977 | 1627434-1627798 |
| 4903 | 1347 | tyrosine kinase 2 | 0.405 | 1631375-1631670 |
| 4907 | 1346 | CDC42 small effector 2 | 1.468 | 1632810-1633100 |
| 4913 | 1345 | ninein-like | 0.788 | 1634774-1635172 |
| 4941 | 1339 | catenin (cadherin associated protein), beta 1 | 0.495 | 1644372-1644747 |
| 4956 | 1336 | ADP-ribosylation factor-like 6 interacting | 32.187 | 1649516-1649856 |
| | | protein 5 | | |
| 4987 | 1326 | actin related protein 2/3 complex, subunit 4 | 80.61 | 1660460-1660839 |
| 5010 | 1321 | protein phosphatase 4, catalytic subunit | 90.194 | 1668127-1668488 |
| 5024 | 1319 | pre-B-cell leukemia transcription factor | 2.045 | 1672920-1673252 |
| | | interacting protein 1 | | |
| 5066 | 1310 | centrosomal protein 97 | 0.234 | 1687017-1687411 |
| 5084 | 1303 | Sfi1 homolog, spindle assembly associated | 0.686 | 1693415-1693807 |
| | | (yeast) | | |
| 5091 | 1302 | proline-serine-threonine phosphatase- | 12.697 | 1695903-1696267 |
| | | interacting protein 1 | | |
| 5104 | 1300 | nuclear distribution gene C homolog | 102.462 | 1699971-1700369 |
| | | (Aspergillus) | | |
| 5108 | 1299 | actin, alpha 2, smooth muscle, aorta | 3.284 | 1701331-1701660 |
| 5171 | 1285 | fuzzy homolog (Drosophila) | 6.367 | 1722855-1723213 |
| 5186 | 1283 | neurofibromatosis 2 | 0.719 | 1728086-1728462 |
| 5198 | 1282 | centrosomal protein 120 | 2.153 | 1732348-1732733 |
| 5208 | 1279 | nucleolar and spindle associated protein 1 | 2.386 | 1735724-1736042 |
| 5253 | 1270 | dynein cytoplasmic 2 light intermediate chain 1 | 9.834 | 1750866-1751258 |
| 5274 | 1266 | protein Tyr phosphatase, non-receptor type 21 | 0.472 | 1758166-1758517 |
| 5370 | 1243 | HAUS augmin-like complex, subunit 7 | 59.234 | 1791926-1792280 |
| 5402 | 1237 | myristoylated Ala rich protein kinase C | 3.148 | 1803092-1803482 |
| | | substrate | | |
| 5448 | 1226 | RIKEN cDNA F630043A04 gene | 2.085 | 1819143-1819511 |
| 5503 | 1212 | stomatin (Epb7.2)-like 2 | 17.579 | 1838816-1839204 |
| 5654 | 1177 | SMEK homolog 1, suppressor of mek1 | 0.871 | 1891648-1892008 |
| | | (Dictyostelium) | | |
| 5678 | 1171 | actin related protein 2/3 complex, subunit 2 | 15.986 | 1900301-1900676 |
| 5698 | 1166 | aurora kinase A | 16.855 | 1907469-1907831 |
| 5701 | 1166 | telomeric repeat binding factor 1 | 2.789 | 1908582-1908967 |
| 5716 | 1164 | cofilin 1, non-muscle | 107.826 | 1914036-1914356 |
| 5771 | 1151 | TNFRSF1A-associated via death domain | 11.061 | 1934043-1934332 |
| 5773 | 1151 | protein tyrosine phosphatase 4a1 | 0.279 | 1934685-1935079 |
| 5774 | 1151 | centrobin, centrosomal BRCA2 interacting prot | 1.021 | 1935080-1935410 |
| 5785 | 1148 | dynactin 5 | 5.2 | 1939165-1939526 |
| 5791 | 1147 | microtubule-associated protein 1S | 6.328 | 1941401-1941793 |
| 5864 | 1133 | kinesin family member 18A | 1.465 | 1967839-1968177 |
| 5882 | 1129 | calmodulin 2 | 263.807 | 1974401-1974748 |
| 5943 | 1115 | PDZ and LIM domain 7 | 17.513 | 1996784-1997110 |
| 5944 | 1115 | serine/threonine kinase 38 like | 0.267 | 1997111-1997478 |
| 6060 | 1089 | cell division cycle associated 8 | 7.204 | 2039068-2039461 |
| 6067 | 1087 | sorbin and SH3 domain containing 1 | 1.201 | 2041684-2042038 |
| 6068 | 1087 | tropomodulin 1 | 0.607 | 2042039-2042410 |
| 6084 | 1083 | bridging integrator 3 | 4.997 | 2047682-2048036 |
| 6099 | 1080 | actin related protein 2/3 complex, subunit 5-like | 28.479 | 2053256-2053599 |
| 6141 | 1070 | aurora kinase B | 6.311 | 2068620-2068994 |
| 6179 | 1062 | CDC42 effector prot (Rho GTPase binding) 4 | 0.921 | 2082109-2082464 |
| 6258 | 1043 | gene trap ROSA b-geo 22 | 28.608 | 2111007-2111388 |
| 6278 | 1038 | tubulin tyrosine ligase-like family, member 5 | 0.196 | 2117720-2118059 |
| 6291 | 1035 | formin binding protein 1 | 0.384 | 2122377-2122769 |
| 6318 | 1030 | centrin 2 | 4.69 | 2131765-2132103 |
| 6338 | 1027 | FERM domain containing 8 | 1.308 | 2139056-2139394 |
| 6354 | 1023 | centrosomal protein 70 | 0.548 | 2144764-2145134 |
| 6460 | 997 | ELMO/CED-12 domain containing 3 | 3.427 | 2182595-2182941 |
| 6467 | 995 | Leber congenital amaurosis 5 (human) | 0.247 | 2185145-2185497 |
| 6500 | 987 | phosphodiesterase 4D, cAMP specific | 0.47 | 2196755-2197145 |
| 6516 | 984 | dystrophin, muscular dystrophy | 0.119 | 2202415-2202812 |
| 6526 | 983 | huntingtin interacting protein 1 related | 0.441 | 2205988-2206301 |
| 6534 | 981 | discs, large (Drosophila) homolog- | 3.759 | 2208846-2209155 |
| | | associated protein 5 | | |
| 6553 | 976 | RIKEN cDNA 2810433K01 gene | 2.289 | 2215581-2215976 |
| 6581 | 971 | HAUS augmin-like complex, subunit 1 | 5.105 | 2225453-2225779 |
| 6599 | 969 | epsilon-tubulin 1 | 0.387 | 2232061-2232442 |
| 6626 | 964 | centrosomal protein 290 | 0.132 | 2241296-2241579 |
| 6651 | 958 | family with sequence similarity 82, member B | 0.84 | 2250023-2250412 |
| 6713 | 943 | centrosomal protein 250 | 0.433 | 2271720-2272085 |
| 6735 | 938 | tropomyosin 3, gamma | 2.656 | 2279590-2279877 |
| 6766 | 934 | family with sequence similarity 82, member A1 | 0.931 | 2290005-2290384 |
| 6782 | 929 | nuclear distribution gene E homolog 1 | 7.884 | 2295836-2296146 |
| | | (A. nidulans) | | |
| 6806 | 924 | purine-nucleoside phosphorylase 1 | 10.99 | 2304356-2304474 |
| 6822 | 920 | tropomyosin 2, beta | 4.355 | 2309610-2309944 |
| 6832 | 917 | RIKEN cDNA 2700060E02 gene | 9.838 | 2313045-2313404 |
| 6834 | 917 | v-abl Abelson MLV oncogene homolog 2 | 0.618 | 2313687-2314064 |
| | | (arg, Abelson-related gene) | | |
| 6882 | 908 | aurora kinase C | 14.218 | 2329723-2330035 |
| 6898 | 903 | spindle assembly 6 homolog (C. elegans) | 0.224 | 2334515-2334801 |
| 6953 | 892 | nucleotide binding protein 2 | 2.113 | 2352711-2353003 |
| 6991 | 884 | dynactin 6 | 9.052 | 2365341-2365718 |
| 7003 | 880 | neural precursor cell expressed, | 0.33 | 2369333-2369684 |
| | | developmentally down-regulated gene 1 | | |
| 7007 | 879 | diacylglycerol kinase, theta | 0.274 | 2370707-2371011 |
| 7040 | 872 | CDC42 small effector 1 | 2.926 | 2382000-2382296 |
| 7096 | 860 | slingshot homolog 2 (Drosophila) | 0.517 | 2400517-2400895 |
| 7125 | 853 | profilin 1 | 11.177 | 2410108-2410492 |
| 7146 | 848 | RIKEN cDNA 2410017P07 gene | 1.326 | 2417114-2417508 |
| 7175 | 841 | baculoviral IAP repeat-containing 5 | 0.966 | 2426437-2426713 |
| 7208 | 836 | leucine rich repeat and coiled-coil domain | 0.248 | 2437517-2437910 |
| | | containing 1 | | |
| 7236 | 829 | DNA segment, Chr 15, Wayne State | 0.268 | 2446945-2447339 |
| | | University 169, expressed | | |
| 7249 | 826 | RIKEN cDNA 4922501C03 gene | 0.438 | 2451461-2451761 |
| 7291 | 813 | HAUS augmin-like complex, subunit 2 | 3.496 | 2464662-2464966 |
| 7323 | 806 | dynein light chain LC8-type 1 | 4.71 | 2475322-2475644 |
| 7330 | 803 | MAD2L1 binding protein | 3.685 | 2477746-2478077 |
| 7365 | 796 | cDNA sequence BC023882 | 0.603 | 2489301-2489640 |
| 7368 | 795 | RIKEN cDNA 6720456B07 gene | 3.581 | 2490278-2490569 |
| 7378 | 793 | tubulin folding cofactor B | 8.324 | 2493603-2493993 |
| 7379 | 793 | ankyrin repeat, family A (RFXANK-like), 2 | 0.45 | 2493994-2494317 |
| 7426 | 782 | engulfment and cell motility 1, ced-12 | 0.528 | 2509515-2509793 |
| | | homolog (C. elegans) | | |
| 7472 | 769 | palladin, cytoskeletal associated protein | 0.53 | 2524218-2524585 |
| 7486 | 767 | melanophilin | 0.258 | 2529148-2529507 |
| 7488 | 766 | WAS protein family, member 2 | 0.188 | 2529775-2530138 |
| 7552 | 749 | mitogen-activated protein kinase 1 | 1.45 | 2550744-2551112 |
| | | interacting protein 1 | | |
| 7588 | 742 | vinculin | 0.23 | 2562670-2562963 |
| 7654 | 724 | dynamin binding protein | 0.201 | 2583481-2583787 |
| 7756 | 700 | Rap1 interacting factor 1 homolog (yeast) | 0.083 | 2618117-2618471 |
| 7794 | 691 | giant axonal neuropathy | 0.587 | 2631132-2631429 |
| 7826 | 683 | Mediterranean fever | 0.311 | 2642002-2642302 |
| 7889 | 664 | ubiquitously expressed transcript | 1.147 | 2662979-2663371 |
| 7899 | 659 | ADP-ribosylation factor-like 3 | 2.999 | 2666529-2666853 |
| 7902 | 658 | intraflagellar transport 20 homolog | 4.021 | 2667596-2667912 |
| | | (Chlamydomonas) | | |
| 7904 | 657 | gamma-aminobutyric acid receptor | 2.814 | 2668257-2668616 |
| | | associated protein | | |
| 7937 | 649 | trichoplein, keratin filament binding | 0.484 | 2679418-2679802 |
| 7975 | 639 | tubulin, beta 3 | 2.093 | 2692217-2692262 |
| 7978 | 639 | BCL2 modifying factor | 0.17 | 2692923-2693205 |
| 8020 | 627 | Rho GTPase-activating protein | 0.115 | 2706942-2707263 |
| 8031 | 622 | B9 protein domain 2 | 12.725 | 2710630-2711005 |
| 8052 | 613 | ARP6 actin-related protein 6 homolog | 0.57 | 2717297-2717635 |
| | | (yeast) | | |
| 8079 | 606 | ADP-ribosylation factor-like 2 | 4.584 | 2726337-2726723 |
| 8108 | 598 | thymosin, beta 4, X chromosome | 24.043 | 2734875-2735269 |
| 8123 | 594 | citron | 0.131 | 2740025-2740319 |
| 8147 | 588 | ankyrin 1, erythroid | 0.072 | 2747574-2747883 |
| 8176 | 583 | dynactin 3 | 1.37 | 2756466-2756744 |
| 8301 | 547 | UBX domain protein 11 | 0.465 | 2797362-2797669 |
| 8335 | 539 | par-3 (partitioning defective 3) homolog | 0.154 | 2808716-2809107 |
| | | (C. elegans) | | |
| 8358 | 532 | myomesin 1 | 0.149 | 2816775-2817100 |
| 8401 | 519 | erythrocyte protein band 4.1-like 5 | 0.187 | 2831535-2831924 |
| 8402 | 519 | ciliary rootlet coiled-coil, rootletin | 0.102 | 2831925-2832268 |
| 8451 | 506 | catenin (cadherin associated protein), alpha 2 | 0.122 | 2848720-2849102 |
| 8516 | 492 | filamin C, gamma | 0.062 | 2869737-2870106 |
| 8610 | 475 | erythrocyte protein band 4.1-like 4a | 0.123 | 2900673-2901022 |
| 8638 | 469 | formin 1 | 0.04 | 2910464-2910758 |
| 8660 | 465 | kinesin family member 2A | 0.256 | 2917368-2917680 |
| 8677 | 463 | pericentriolar material 1 | 0.077 | 2922701-2923049 |
| 8680 | 462 | 4HAUS augmin-like complex, subunit 8 | 1.099 | 2923769-2924049 |
| 8771 | 446 | calcium binding and coiled-coil domain 2 | 1.247 | 2952270-2952623 |
| 8808 | 439 | centrin 3 | 1.05 | 2963461-2963764 |
| 8846 | 430 | thymosin, beta 10 | 5.35 | 2975022-2975322 |
| 8852 | 429 | actin related protein M1 | 0.429 | 2976880-2977149 |
| 8881 | 421 | protein (peptidyl-prolyl cis/trans isomerase) | 1.474 | 2985485-2985777 |
| | | NIMA-interacting, 4 (parvulin) | | |
| 8907 | 416 | formin binding protein 1-like | 0.166 | 2992924-2993272 |
| 8931 | 410 | kinesin family member 1B | 0.059 | 2999526-2999824 |
| 8932 | 409 | SAC3 domain containing 1 | 0.452 | 2999825-3000109 |
| 9057 | 376 | FYVE, RhoGEF and PH domain containing 4 | 0.233 | 3032941-3033212 |
| 9073 | 372 | spectrin alpha 1 | 0.087 | 3037049-3037302 |
| 9085 | 369 | glucocorticoid receptor DNA binding factor 1 | 0.084 | 3040212-3040461 |
| 9137 | 356 | FERM, Rho GEF and pleckstrin domain | 0.091 | 3053199-3053462 |
| | | protein 2 | | |
| 9147 | 353 | tetratricopeptide repeat domain 8 | 0.154 | 3055412-3055707 |
| 9161 | 349 | RAB GTPase activating protein 1 | 0.083 | 3058415-3058689 |
| 9222 | 337 | inversin | 0.261 | 3071675-3071916 |
| 9322 | 307 | Ras and Rab interactor 1 | 0.073 | 3093895-3094135 |
| 9361 | 297 | tubulin cofactor A | 1.057 | 3102113-3102283 |
| 9367 | 295 | Fc receptor, IgG, low affinity IIb | 0.189 | 3103313-3103351 |
| 9473 | 256 | engulfment and cell motility 3, ced-12 | 0.119 | 3122400-3122588 |
| | | homolog (C. elegans) | | |
| 9486 | 251 | ninein | 0.027 | 3124390-3124544 |
| 9587 | 211 | tensin 4 | 0.089 | 3138556-3138633 |
| 9617 | 200 | tropomodulin 2 | 0.02 | 3141512-3141584 |
| 9677 | 173 | radial spoke head 9 homolog | 0.187 | 3146825-3146949 |
| | | (Chlamydomonas) | | |
| 9701 | 161 | Rho family GTPase 1 | 0.152 | 3148560-3148596 |
| 9750 | 135 | actin-binding LIM protein 2 | 0.039 | 3151347-3151451 |
| 9753 | 132 | actin, alpha 1, skeletal muscle | 0.093 | 3151503-3151520 |
| 3157155 | 394 | adducin 2 (beta) | 0.13 | 3183484-3183583 |
| 3157158 | 478 | envoplakin | 0.075 | 3268105-3268204 |
| 3157230 | 310 | LIM domain binding 3 | 0.065 | 3227217-3227316 |
| 3157293 | 264 | formin homology 2 domain containing 3 | 0.259 | 3166084-3166183 |
| 3157294 | 353 | family with sequence similarity 33, member A | 0.31 | 3266905-3267004 |
| 3157319 | 402 | HAUS augmin-like complex, subunit 5 | 0.183 | 3232617-3232716 |
| 3157357 | 735 | PDZ and LIM domain 2 | 1.175 | 3190471-3190570 |
| 3157369 | 1826 | RIKEN cDNA 2310014H01 gene | 2.285 | 3250317-3250416 |
| 3157379 | 252 | P140 gene | 0.045 | 3193771-3193870 |
| 3157397 | 305 | receptor-associated protein of the synapse | 0.188 | 3284249-3284348 |
| 3157398 | 818 | protein Tyr phosphatase, non-receptor type 4 | 0.196 | 3205097-3205196 |
| 3157429 | 809 | sarcoglycan, (dystrophin- | 2.184 | 3188371-3188470 |
| | | associated glycoprotein) | | |
| 3157432 | 395 | myosin VIIA | 0.054 | 3266305-3266404 |
| 3157485 | 2014 | ubiquitin protein ligase E3 component n- | 0.639 | 3209658-3209757 |
| | | recognin 4 | | |
| 3157505 | 644 | crystallin, alpha B | 0.99 | 3280749-3280848 |
| 3157523 | 803 | centromere protein V | 3.696 | 3267205-3267304 |
| 3157536 | 307 | FYVE, RhoGEF & PH domain containing 3 | 0.099 | 3205697-3205796 |
| 3157684 | 329 | doublecortin-like kinase 2 | 0.081 | 3170684-3170783 |
| 3157726 | 995 | desmin | 1.2 | 3159421-3159520 |
| 3157766 | 167 | radial spoke head 4 homolog A | 0.117 | 3201497-3201596 |
| | | (Chlamydomonas) | | |
| 3157768 | 326 | myosin regulatory light chain interacting protein | 0.109 | 3182784-3182883 |
| 3157794 | 2378 | tribbles homolog 2 (Drosophila) | 1.6 | 3204997-3205096 |
| 3157801 | 379 | tropomodulin 4 | 0.308 | 3221891-3221990 |
| 3157821 | 390 | tubulin tyrosine ligase-like family, member 11 | 0.203 | 3159121-3159220 |
| 3157887 | 312 | dynamin 3 | 0.068 | 3263705-3263804 |
| 3157957 | 150 | erythrocyte protein band 4.2 | 0.043 | 3187271-3187370 |
| 3157963 | 1734 | symplekin | 1.095 | 3217191-3217290 |
| 3158016 | 395 | FERM domain containing 5 | 0.095 | 3184871-3184970 |
| 3158035 | 383 | septin 1 | 0.279 | 3259205-3259304 |
| 3158061 | 191 | protein Tyr phosphatase, non-receptor type 3 | 0.03 | 3234617-3234716 |
| 3158125 | 849 | actin related protein 2/3 complex, subunit 3 | 23.491 | 3268805-3268904 |
| 3158127 | 427 | tubulin tyrosine ligase-like family, member 3 | 0.294 | 3262005-3262104 |
| 3158142 | 421 | myosin binding protein C, slow-type | 0.554 | 3202897-3202996 |
| 3158154 | 347 | microtubule-associated protein tau | 0.08 | 3245217-3245316 |
| 3158176 | 705 | IAP promoted placental gene | 0.395 | 3167984-3168083 |
| 3158226 | 185 | tripartite motif-containing 36 | 0.119 | 3176384-3176483 |
| 3158232 | 888 | Wiskott-Aldrich syndrome homolog (human) | 0.603 | 3278849-3278948 |
| 3158242 | 3612 | SMEK homolog 2, suppressor of mek1 | 9.065 | 3210258-3210357 |
| | | (Dictyostelium) | | |
| 3158328 | 1531 | RAB11 family interacting protein 3 (class II) | 0.975 | 3221991-3222090 |
| 3158344 | 550 | cortactin binding protein 2 | 0.187 | 3165384-3165483 |
| 3158346 | 482 | NA | 0.075 | 3269396-3269495 |
| 3158380 | 464 | tubulin Tyr ligase-like family, member 6 | 0.277 | 3185771-3185870 |
| 3158411 | 1049 | erythrocyte protein band 4.9 | 0.588 | 3254017-3254116 |

The application's sequence listing, which the Patent Office published only in electronic form, follows.

SEQUENCE LISTING (3290939 sequences)

SEQ ID NO: 1 - DNA, 7293 bp, Cricetulus griseus
gctgctattgatcttagtaagaaaggtcttgatgttaaaagtgaagcatgtcagcgatttttcagagatgggctaacaatctcattcacaaaatccttacagatgaagcagtgagtggttggaagtttgagattcatagatgtattattaacaatactcatcgcctggtggagctgtgtgtggctaagttggcccaagactggtttccacttctagaacttcttgccatggccttaaatcctcattgcaagttccatatctacaatggtacacgtccatgtgaatcagtgtctgcaagtgcccaggtgcctgaagatgaactcttcgctcgttctccagaccctcgatcaccaaaaggttggctggtagatctgctcaacaaatttggcactttaaatggattccagatattgcatgatcgttttattaatggatcagcattaaacgttcagataattgcagcccttagcaaagaatgaagccaaaaatgatgctctttcaatgattattaaatctttgaagaatttagcttcccgggttcctggacaagaagaaactgtaaagaacttagaaatatttagattaaaaatgatacttagattattacaaatttcttctttcaatggaaaaatgaatgcactgaatgaagttaataaagtaatttctagtgtgtcatactatacccatcggcatggcaatcctgaggaagaagagtggctcacggcagagaggatggctgaatggatacaacagaataatattttatccatagttttaagagatagtcttcatcaaccacagtatgtagagaaactagaaaagatccttcgttttgtcatcaaagaaaaagctctcaccttggaagaccttgataatatctgggcagcacaggcagggaaacatgaagccattgtaaagaatgtacatgatctactggccaaattggcttgggatttttctcctgaacaacttgatcatctttttgattgctttaaggccagttggacaaatgcaagtaaaaacaacgtgaaaagctccttgagctgattcgccgtcttgcagaggatgataaagatggtgtaatggcgcataaagtattgaaccttctgtggaatctagcccatagtgatgatgtgcctgtagatatcatggacctggctctcagtgctcatatcaaaatactagattatagttgctcccaggaccgggacacacaaaagatccagtggatagatcgctttatagaagaacttcgcacaaatgacaaatgggtcattcctgcactgaaacaaattagagaaatttgtagtttgtttggtgaagcgcctcaaaatttgagtcaaactcagcgaagcccccatgtattttatcgtcatgacttaattaatcaacttcagcacaatcatgccctagttactttggtagcagaaaaccttgcaacttacatggaaagcatgagattgtatgccagagatcatgaagattatgacccacaaactgtgagactgggaagtagatatagtcatgttcaagaagtccaagaacggcttaactttcttagatttttattgaaggatggccaactgtggctgtgtgctcctcaggcaaaacaaatatggaagtgcttagctgaaaatgcagtttacctctgtgatcgtgaagcctgttttaagtggtattccaaattaatgggggacgaaccagacttagatcctgatatcaataaggacttctttgaaagtaatgtgcttcagcttgatccttccttgttaactgagaatgggatgaaatgctttgagagattcttcaaagctgtgaattgtcgagaaggaaaactggtagcaaaaagaagagcctatatgatggatgatttggagttgataggattagactatctttggagggttgtaattcagagtaatgatgatattgccagccgagctatagatcttcttaaagagatatacacaaaccttggtccaaggctgcaggtcaatcaggtggtgatccacgaagacttcattcagtcttgctttgatcgtttgaaagcctcttatgacacgttgtgtgttttggatggtgacaaagacagtattaattgtgcaagacaggaagctgttcgaatggttcgagtattaactgttctaagagaatatataaatgaatgtgacagtgattatcatgaagaaagaacaattttgcctatgtcaagagctttccgtggtaaacacctctcttttatagttcgatttccaaaccagggcagacaagtagatgacttggaggtctggtctcatacaaatgatacaattggttcagttcgacgatgtattctcaatcgcattaaagctaatgtagctcatacaaaaattgaactctttgtgggtggtgagctgattgatccgggagatgacagaaaattgattggacaattaaacctaaaagacaaatcactaattacagccaaacttacacaaataagctccaatatgccttcaagtcctgatagctcttctgattcctcaactggatctcctggaaaccatggtaatcattacagtgacggccccaatccagaagtggaaagctgtttgcctggagtgaaaacgattcgattatgactggggaaagagaatgtgcaatcaagttcaatgatttactttgaacttttcccccgagagttagacatggaaccttacacagttgcaggtgttgctaagctgggagggggataatgtaaacccagaaagtcaactgatacaacagaatgagcagtctgaagagaaagcaggaagcacaaaatacagacttgtgggtgtgcttgtgcacagtggtcaagcaagtggaggacattactattcttacatcattcagaggaatggaggagatggtgaaaagaatcgctggtataaatttgatgatggagatgttatcactacaaggcctcatcagattgttatgccatcagccattgagagaagtgttcggaagcagaatgtgcagttcatgcacaatcgcatgcagtacagtttggaatactttcagtttatgaaaaaactgcttacgtgtaatggtgtttacttaaacccgcctccagggcaagatcacctgtctcctgaagcagaagaaatcactatgattagtattcagcttgctgccaggttcctctttactacaggatttcacacaaagaaaatagttcgtggctctgccagtgattggtatgatgcattgtgtattctccttcgtcacagcaagaatgttcggttttggtttgctcacaatgtcctttttaatgtttcaaaccgattctctgaataccttttggaatgccctagtgcagaagtgagaggtgcatttgctaaacttatagttttcattgcacatttttccttgcaagatggaccatgtccttcaccttttgcatctcctggaccttctagtcaggcttatgacaacttaagcttgagtgatcacttactaagagcagtactgaatctcttgaggagggaagtttcagagcatggacgtcatttgcagcagtatttcaacttgtttgtaatgtatgccaatttaggagtggcagaaaagacacagctgctgaaactgagtgtacctgctacctttatgcttgtgtccttagatgaaggtcctggtcctccaattaaatatcagtatgctgaattaggcaaattatactcagtagtgtcacagctaatccgctgttgcaatgtctcctcaagaatgcagtcttcaatcaatggtaatccttctcttccaaatcctttcggtgatcctaatttatcacaacctataatgccaattcaacaaaatgtggtagacattttatttgtgagaacaagttatgtgaagaaaattatcgaagactgcagtaactctgatgagaccgtcaaattgcttcgcttttgctgctgggagaatcctcagttctcatctaccgtcctcagtgaacttctttggcaggttgcgtattcctatacttatgaacttcgtccctatttggatctgcttttacaaatcttactgattgaagactcctggcagactcacagaattcataatgcccttaaaggaattccagatgaccgagatgggctgtttgacacaatccagcgttctaagaatcactatcaaaaaagagcataccaatgtataaaatgtatggtagctctctttagcagttgtcctgttgcttaccagatccttcagggcaatggagatcttaaaaggaaatggacctgggcggtggaatggcttggagatgaactcgaaagaagaccatacactggcaatcctcaatacacttacaacaattggtctcccccagtgcaaagcaatgaaacatcaaatggctatttcttggagagatcacatagtgctagaatgacacttgcaaaagcttgtgaactctgtcctgaggaggaaccagatgaccaagatgccccagatgagcatgagtcacctccaccggaagatgccccattatacccccattctcctggatctcaatatcaacagaataaccatgtgcatggacagccatatacaggcccagcagcacatcacatgaataaccctcagagaactggccaacgagcacaagaaaattatgaaggcagtgaagaagtgtccccacctcaaactaaggatcagtgaaatgcacatattaactggttccatcaagactgtgcacccaggccttacagtccaacttttttctgtgtctggctaatatttaaaactagaaaaactattcctaatcaacatggagtgtggagagtttattcactgtcttatctgcagaaatatgctgtcaatatataaccagcctgcagtggaaagtgtatagtgttttgtaataaatggcctgatgctaaagtgtaaatggcaaaggtgtatatagtatattaatgtttgactgttaattcttaagcaagtaaactttttttccttgagactcacagatctacaaaaactacatacattaattttcttgttacacccactgcactgcagccagtgttgcctaccttgtggctagttggatcacctcctttacaaaaacaaaagtaaaccaacagcaacaaaacagcccattcattcatgacacaccaatagtttcgtgttcgttctttgccactggagtcaattttattatgagcaatgtaaggctggttaccttttaattatttggttgatgtggaaaattggtgatgtactatgtttctagatctttttccattgccttttattctgatgttaggttaatcactttgaagctatagatatgctgtaacatttagcatggcttcacacaagttagtgtagccaacgaggaaatattaccataatgactgcagttgtcctgacatgggggctgcattgctcggagctttccttcttaaaccctagactataaaatacaggttgaggggagaactgtggcaagcaggcagttctcaattgcacacatgttcctttgtgtttgacagtgcagatctctgggtggaataaagaacacttaaatttactgatttagtggtgggaattttgaaagatttaaaacatctgcaaaaatttgttatgccaggatgctgactggagcctagtagaagactgtatttggtgtgcttgttttgttctttggtagagcttactaagtgactctttctcaaactgtccttcttttctgctccttaacgaaattatgaaatacataaaacttagtgacttcctagataagagaaaacttgacattttcaaaggctgtgaattttttgtcatggagggattcccccctccctattaagttgctttgagtgtataagcccaccagttcctaatgagggcttatgagtcatgtttccctccatttgaggaagagccggtctgtgttgtgaccatgagtgagggaaaatgaacagagttatttttgtttgttttgtgcaaatttattttctatatttaactctttaagcattaatgtataaccagaaattttaagatgcatgttattgtaagagcaacatagtggtgattttgaggtctttctctaaaacaaatggcacgttttaaatttcaagtcttaaagtgcctaaaaattatttgattctctcaactaattcttttgagccatatgtttcctctcttaaatgtttgttgcagaatcactagtcttcctttgaaaaactcccacgtttctaaatggcatgattactctattgaagacagtagaatctgttaacataaggactgaagagattttagttgtgaaactgtatgaactggggctttgcccagtcagatctaagtatttccatgtacaacttggtaaacaccatattgctgctgtttctaagccctccaccaaacaaattctcatgttcagcatcacagaggcagaaatacaaacataatcatatttgggctttgtttcttttcattgatttttctcagtgatgatctcccagctttttttttttttgtctcagctataattatacagacctagaattattaaaatgttttctattttcatgattaacatttattagtgaacaataacaacttaagtctttaatcctcatattggttaaaaatatgaggagccttttttatttgaattacttttataaaggaacgtaacagtctgaatattcaggtgactactttggaatagttcttcgggtttttattagtatttttccaggttatgttctcccatggactattttactttgtcgatttttgtggttaatttggtggctatatcctgccttattttagaattttagaaaattgccttttgggggataagtgcccagttttgatttctagtttgaaggtacgaggacatacagactgctgataaagaaaaacagcacccctttgccccagcttttgtgttaccaacaatgcacctacctgagtgttgcatattgaaaataaggtttttgggtgtgataagtcactacagaagtgctgaatgtattagaacttgctgccgattgtatttctaacttattttgtgtttgcagaagtatgtagcacttgtcctccaaacttacaggtgtaagggggaaggtgaaccacattttaaagtcacttaatgagtgcaattttttttattttggaattggggttcccaaaaggaaatttcaccacccaaatctcacatacttcttagccttttacaagccaacagactgacataaaagattgtctgcagttcgtaagatctagcacatatacaaaataaacttataaattaaa

SEQ ID NO: 2 - DNA, 6620 bp, Cricetulus griseus
  modified_base (3692)..(3692): a, c, t, g, unknown or other
tatgatggcaaagttgatgtatggtctcttggaataacatgtattgaattagcggagaggaagcctcctttatttaatatgaatgcaatgagtgccttatatcacatagcccaaaatgaatcccctacactacagtctaatgaatggtctgattattttcgaaactttgtagattcttgcctccagaaaatccctcaagatcgccctacatcagagaacttttaaagcacatgtttgttcttcgagagcgcccggaaacagtgttaatagatcttattcaaaggacaaaggatgcagtaagagaactggacaatctgcagtatcgaaagatgaagaaactccttttccaggaggcacataatggaccagcagtggaagcacaggaagaagaggaggagcaagatcatggtgttggccggacaggaacagtgaatagtgttggaagtatcagtccattcccagtatgtctatcagtgcaagcagacagatgcaagagcatgagcaggactctgaacttagagaacagatgtctggttacaagaggatgaggcggcagcatcaaaagcagctgatgactctaaaaaaataaataaaaggcagagatggatgaacaccgtctacagattagacaaagatcttgaaactcagcgtaacaattttgctgcagaaattggagaaacttaatcaaagaaacaccaagctgctatggaaaaagaggcaaaagtgatggccaatgaggagaaaaaattccagcaacacattcaggctcaacagaagaaagagctgaatagctttttggagtcccaaaaaaagagaatataaacttcgaaaagagcagcttaaggaggagctgaatgaaaatcagagcacacctaaaaagaaaagcaggaatggctttcaaagcagaaggagaatatacaacatttccaggcagaagaagaagctaaccttcttcgacgctagaatgtcgtcgcttcaagagaagaatgttacttgggcgacataacttggaacaggaccttgtcagggaggagttaaacaaaaggcaaactcagaaggacttggaacatgctatgctactacgacagcatgaatccatgcaagaactggagtttcgccacctcaatactattcagaagatgcgttgtgagttgatcagactgcagcatcaaactgagctcactaaccagctagaatacaataagcgaagggaacgggaactaaggcgaaaacatgttatggaagttcgacaacaacctaagagtttgaagtctaaagaactccagataaaaaagcaatttcaggacacatgcaaaattcaaaccagacagtacaaagcattaagaaaccacctactggagactacaccaaagagtgagcacaaagctgttctgaaaagactcaaggaggaacagactcggaagttagccatcttggctgagcagtatgatcatagcattaatgaaatgctttccacacaagctctgcgtttggatgaagcacaggaagcagaatgccaggttttgaagatgcagctgcagcaggaactggagctattgaatgcatatcagagcaaaatcaagatgcaggctgaggcccaacatgatcgagagcttcgagagctggaacagagggtctcccttcgcagggcactcttagaacaaaagattgaagaagagatgttggctttgcagaatgaacgcacagaaagaatacgtagcctgctcgagcgtcaagccagagaaattgaagcttttgactctgaaagcatgagactaggttttagtaacatggttctttctaacctctcccctgaggcattcagccacagctacccaggagcttctagttggtctcacaatcctactgggggtccaggacctcagtggggtcatcccatgggtggcacaccacaaggttggggccatccaatgcaaggtggaccccagccatggggtcatccctcagggccaatgcaaggggtccctcgaggtagcagtatgggagtccgcaatagcccccaggctctgaggcggacagcttctgggggacggacggaacagggcatgagcagaagcacgagtgtcacttcacaaatatccaatgggtcacacatgtcttacacatagtaattgaaagtggcaattctgctggagctgtctgccaaaagaaactgcctacagacatcatcacagcagcctcctcacttgggtactaccgtgtggaagctgagtgcatatggtatattttattcgtttttgtaaagcgttatgttttgtgtttactaattgggatgtcatagtatttggctgccgggtttttgtggttggctttttgttcttttgtttttgacttttggaaaattttaaaagtgggaatagataaataatttcatatgtgtggcaaaaaaaaaattggcttaatagaaggagttttatctgaacaatgtaaaaataaaatgaaccaaactggcctgaatcatcactttaggatgtccatagcctcaaagggttattggaagatataatgccttcttccatattccaaattcttcgagtcactgacagcaggcagcatctatactgaaacacaatattagggcagtttgttttgcctttgcacataacttttaaacttaactctaaccctaaattgtgacatcagagagtgtttgcactgtgtagcaatgctagctgaaagcgtgtttatttttatagcgctcctgtccttttactcatttccataactagacatgaatagtcctgaacgagaagtcacacccacaggagacacacacttagtctcaagtcgaggcctatccagtaaagtggaacttcgtacatagtcatgattttttgactgcctggacatcaagtaaataacattcaaaacactaaagaaactgtcctggagattccatcctgctaacaactttttgtgtacatctttttttttcccctagatcttaaggcagaatttagtaattttgtgcttctgtaaatgtctagcattttgaacatatagaatacattgttttggactactggaataatatgtatttatcctaaactgtaaaatcataggagatggtcactgggaaagaaggcatgatactggttttgaagggctgtctccttttaacttactattcttgcttgctaatagtaagttctttatgcaccttccaccccttctgagccactactactcaagctgagatttagtccaacacaacacccctttcttagttttgcttcttttcttttgagacaccaccatgctcaaccacagcaaccctttcttttggaagttttatagttctgcatttgactcatattcagaatgtgaagtgtcctaatgtgtattaaagtcagaaagataatatatttaagctatactaagcatgaatctgctataatgatgaaaaattctcacttcttacttagagccttctctaaggagcaaagtcaaaatttgggccatcatcattgagctgcttatcaaaatacaggtcattatttaagataaacacattctgttttgttttgtccccgttacagaagtctcccttccctggtttagcatcgccttttaaaaggcactcacccttagttaagaactggaaattcctaccctcggattccttaaaggatgaagagtgtgctgtacactcagcatacgtgcctcttgtntgcaaggactactgattgaagtctgtttgctgtctggttatgttgtctgattaactttttttttttttttttgattatatggtgtagggagtctcccacccccagtggccatgtttacagagtgttttgtctataaagtgcaagtgtgttaatgtttatgtaaattatgcaggtgataactatggtttgggactgtttatgggctcttttaactgaattttaaaatgaaatgaactatgtttattgctggcacattgatcccatttctggaacatttttcctacttccagaattccgttatgttccttagacattacccccacttaacctcccttcctctgatatgccttgtagctaagatattaaagactgttgaacttagatgagggaaatgcatttcttaaaaatccatgaaccctcaattgtatgctttcagtattgtgttatatgtttctatggcaactttgaagtcagtggtttagaaatgagataccaatgttaatgaaaagtatgtactctttgcttttgcatggcttggcttagtatccaaggtatattagagccacttgaaagcatgaagaccagttatatggaaacaggtttctctcagtggcacattttgctttttcttagcccacaaatacattgccttggcatgaaaattattgttaatacaaatttcacatggtcatcaagcaaattctgtaattttgaaagatgcaactgcctaatgtttgcagtttggttggtctctatctccagtaacaatgtgggtatggagtccttcttgcgcgtttgggggtcataaacagttggatcagcttatcagggctttggctgcccctggggtattgccatgctgttgtctttgcttcccattcattccacatgtgcggtgtcctttcttgcacgtcattctctcaaaccatcacccttcctaacaattttattttgtcttttattcacattaaatgggaattgtgcctatttagattgcccctctacttaaatacacatataacccaagccagaaacaaggtgaagaaacattttattttccaagtccacttggccagtaagttacctacaaacttttaccacattagcttgacacttgatagaagagcctattaggagtcacagtggttccatagagtaaaatccaagtgaagagggatgtgtggggtttccattaggaaataattttgttcttagtttatcttttatgattcttttctgctagtttagaataggttctctctctttttttttaattttttagggaaatttttacaaaaataatgatctgatgtaaataacattttaaagtacagtgcacataacttccctaggctgttccaacctatttgtaaatgctttagagtttttaaattaacacttgtgttgctaaatcctatttatgtaagtctgaaaaggtttttaacccatataaaacatttaaatagtgcaggttataatgaggcaagttagctttgagaacccccttcctttagtatataaaaacctaatgcgcattaatgaggttggagagactatgagaaatatgtatagtgtatattttaaacagctttgcttgtattgtgaagatttaagaacaaacttgagatttttaaagttaactattaacacagttttaacataagttatcccactgggtttaaaagcatcttgaatgtataacccttctataacccagattggtttctgcttttaccgaatcatctagacgttatttatatgtttagtttcatgtactcatttctttttgttttcctcaaacagcatgttttttttttgcacatgtagaaatttttaaaagaaggaaattgatacatgatttttctctggattttcttcacttcagtctttctactaacctcttaaggccatggcattcctatttgtctttatttgtgcaaatgcctagggttggccttttatttttatttttgctatttacctagaaaaaaaaaaagacaatgcttcagtcgattgcttttttaatttaaattttaaaaaaaaaaaaaaaaaaaaaaaagactgtaaccttatcatttctgagtagaccattgagagagaaatgcacacctgtcagcccaggaccagctttggtggctaaagggaatattttaactaacaaaaaatgttctgtacaaaacatgttattcacagtctgtttcagttattcccacaagtcaggtcctgataaatgagggttatcagctaactgatatgttatcattgaggttcgtcaatgaatttgtacatttctagttccctttggtgaaggggaaaatgatgattttgcaagacctagattttggcttgttttcttgccttcttttttggcagccttcatcttttcctaaagcccttgagcctgtagggttttcatagtggacaaaggacttatggtcgttttaaaactggcatagagtgggggtggggggaggacaagagattatcataacaggatcctaacacttttaacagtggataatttttagtaaaaccagtcctttccaattttagactagacagatgcccacagtggaggcttaccaagggttgcaatgaggaagaagcctctccctcactgtcagcaccagctggcaaaggtgactgcaggtgtgcattttcctgttggtagaatggtccacagcactaactggtaaggcttattgtacagtatattgtcagtattcttctggttcagcatacttatagttcgtatataacctgtattaattgtatagattgtgcatttaaagctgttaccaagttgtcagaaccttaagaacgaaaacaggtcatatgtaatattttgtttgtaagtatcctttgtatcatagcaaaggaaatgtttaaaagatcaactgtaaaattaaaagtaattttaagtaaaca

SEQ ID NO: 3 - DNA, 6436 bp, Cricetulus griseus
aggcagttatacttaagcatgaacattgacgacaaactggaaggattgtttcttaaatgtggcggcatagacgaaatgcagtcttccagggcaatggttgtaatgggtggagtgtctggccagtctgctgtgtctggagaactgcaagagtcagtacttcaagatcgaagtttgcctgcaccagggagatccttgctgcagatgaagtgttacaagagagtgaaatgagacagcaggatatgatacataaacgtatgtgccatgaaaatcatgacaaaaaactcaacagatgtgccatcaaaggtggccttctcacttcagaggaagattctggcttttctacatcaccaaaagataattcactgccaaaaaagaaaaggcaaaaaactgagaagaaatcatctggaatggacaaagagagtaccttggacaaatctgacatgaagaaagacaaaaatgattacctgcccctctactcttcaagcactaaagttaaaaaatgaatacatggttgcagaatatgctgttgaaatgccacattcttcagttggaggatcccatttggaagatgcatctggagaaatacaccctcccaagttggttactacaaaaaaaatacaatagtaagagaagtctgaaacagcccctggaacaaaatcaaaccatttcacccctgtccacttacgaagacagcaaagtttcaaagtatgcatttgagcttgtggataagcaggctttactggactcggaaggcagtgctgacatcgatcaagtggataacttgcaggaggggcccagcaaacctgtgcacagcagtactaattacgatgatgccatgcagtttctgaaaaagaagcgttatcttcaagctgcaagtaacaacagcagggagtacgcgctgaatgtgggtaccatagcttctcagccttcggtcacacaagcagctgtggccagcgtcattgacgagagcaccacagcatccatactggattcccaggcacttaatgtggagattaagagcaatcatgacaaaagcgttattccagatgaggtcctgcagactctgctagatcattactcccactcccacaaggctaatggacagcacgagatttccttcagtgttgccgatacggaagtgacttctagcatatcaatcaattcttctgacgtacccgaagtcaccccatcagagaatgttggatcaagctcccaagcatcctcggcagataaagctaacatgctgcaggaatactccaaattcttgcagcaggctttggacagaactagccaaaatgatgcctatttgaatagcccaagccttaactttgtgactgataaccagacccttccaaatccgccagcattctcttccatagacaagcaagtctatacagccatgcccatcaatagctttcgatcaggaatgaattctccattaagaacaactccagataagtcccactttggactaatagttggtgactcacagcacccgtttcccttttcaggtgacgagacaaaccacgcctctgccacatcaactgcagactttttggatcaagtgacttctcagaagaaagctgaggcacagcctgtccaccaggcttaccaaatgagctcctttgaacagcccttccgtgctccatatcatggatccagagctgggatagcaactcaatttagcactgccaatggacaggtgaaccttcggggaccagggacaagtgctgaattttcagtaactttcccttggtgaatgtaaatgataatagagctgggatgacatcttcaccagatgccacaacaaaaaaaaagtaaaagtaaaataatactggcactttagaacagattaatcgagagtgggttcctctgtgtaaaatggagtgctatacagatttaagagcaatgcgttcatagcaagctgataagaatagcaagataatccaatacctgcatttcgtttggttagtgcgcattcctcgaactgccttatgtgttgtcaccgttatagagcaatgcatttactcgttttagatcagaaccttgctatcgacccacaccaagaataaaaaggaaaagactttcgcacaattgtttcctaactgataacattgtacagttgacatagagcacttagaattaatcgggtattttgatttctcaagttaaaaaaaatagatttttaggcttgatatggttgtgtcataatcatctcgtaattgacaattttgctttttggcaataaaaggaagttgggatatctttggactgtaaaacctggtctaattcttctctttctggactcttgatagattggataattaaacagtatcccaagaactaaagaatggcattttaattgcttattttaagttacttttaagtgaatactgctcacaacagttttacaaagaggaagtgcttactgattccagtaactgcaatttctttttcagctagatgagtgatcggaaattttttgttgcatttcaaaatctaaataaactacagactttatccttatacgaagaatgtttttttatatatgtatactttgtcttaaaataatacagcatggtacaataaatagtgcttttatatacacgtatatatatatgtggtttcctctacactttgttatgacactttgcttgaaatcatagttttcccacttgacagctttgctgtcagatcttcaagaactttaagacttctttgaagtaaatattttaagttctgccattggtctgaagaccgctgtgtcggtggcacatcacctcagcgcaggaatgcttcatcagatgaggtgttatgggaccgtgctcaccctctatgagcgtttgtatttttctatagtacttttgataagagtagacattaatttcctaagtcgagcctgattttaaaaaattgtagttccactgagaactggatacttttcttgtacagtgtaaggggttttgtttgtaacatcaccagcacaggtttaagaatgtgacagttgctgagcggttcaggtacccttaggaagaaaaggcttggaaaatggaagttctgtaaacagaatttcaggtgttgcattcctgtcgtaaacacgtttctttaaatctacacgatggcagactttcctaccaggttataacatttgaggtaactgatagccagcataacttattgacttaccattaaagtgtagtcatcactcttactgtgacgtcctgaatgcctgccaggctcagcttgtttcttcatcattcgagaagcatctcaaaagttgggtttctcctactttggttcagaaagttctgggtgttagaggaaggaagtggccttgtgtgctgctcgagacggatccctgcccactagacagggcagggagctctccagcattggaaacattgttgcttttttgagcttcagttattactgcacattatttcattgggtttagaatagctgagtggctcctacacaatttttttggctttgatctacagtgcgcatgtgctacctaggcaggtaggaatccaccatcttagctctgactcagggtgccaacaatgggtcatttatcttcctaagaggtagaagaggccttgtgctcagggcaagctttcattcccacagatgagagacacttgcaaagtgccagtgaggttagattcttttgtccacttctctgtatttttatagagctcatcttttccgtgtgtttacttgaagaagcactattagaatcagtgagaatttatttgagtctgcaatttaatttaaaccttttccgtttcaaattgctttatttcagggaaataattttccagttgtttttgctatattctgcaaatgtttatttaatgttatgcattcctaattgtttgaagtgagtaccaatgtgctaatttgtattgtctgaaagtatgtaatgtttttactagcttgttttttaagtactctgtaaatatgtacaaaccaatcacagtacggctttatgttagaaggcgtgtgatgtactgtatgtaagcaataatacatagcagttgctaactttacaagtagcatcaggaacgttcttattagaaacaattttcagagttgtttgttagttatccttatttcattttaacaatgattatctttaatcagtttttataagcagattccattgttccttctgttggaacgtaacactgtttacacagcataattgacgttgcaggggagacaggctagacctggcttcgtctgcgctcactctcactaagcattgaatggccttaccactcttgtgcaaagatggaggaagaccacagaacttagtgcccatcacaactgaaggaagggatgttgtttttgttttatgaatttactcaacttcaattacaaagaaagacaaacttatagcttgaagtgagtagatcctgtactgtacagaacagctctctgaacacccgtcactgctttagaaatgaagccgccaatttataactgattctgacctacattttatagggaaatgttttaatgctagtcatttatatattgtgctttgaaggatttgctagtccactcctgtcactttttagtacactggtaccttttctatgtaatgtatgctttttattattgtagcaaagcatttcagtagaaagacttttgcaacaatatgggggaaatttttcattgttgggtttgaattatactggattttatctgtctagtcttacttgtctttattttaatgctgtctggaagggaccttggtacccaaataaagcaggttaacctcattgcttcaagggcatactgtgtagtgctgagtttcacctggaaatctgatgactttgaaaagaaaaacacatttataaaaattgtacagaagaaattaaatgtgtgatggaaatcctgatggtggagcacgttgaattttctgagacatagtgttattttcctggaatcccttatgccttctttgtattccaaccaataaaagaaaaccttgtcattgaaagtggtaggctgataggatattctgattatacagtattactttcctgtcttattctctgaccccttctcaatcactgtaaatttttatttctatttttctattgctaattaaacatgtatataatgtagaggccgttgtatagaactgaatgaattgggttgctatgcttgaatgggtagctacatggaaatatttgatgggggaaggcctcagcagatgcttcctgcaccctagggggtcagtgggaggatcagctgcaaactcagtatcagacaagaggggctttccttcccttcccccaaaacatgagcactagatttcaaagtctactcaggtgaaatcgcttcacagtgaaacttaaccacattgaaattttcactgttaaatactatatttgtgatatttttaaatacaaacttttacactgcggtcagcagcctaaccattgaaattttagccaagatattttaaaatgtaattatcctccatgtataattgtctttaaacaattgggaggatttttcagtggcggcttgtttcatgcctagtcatcagactcgaactgacgttacgagggttaacgagttcatagcttttggcactgtcgtcatggagttcaccttgcctcttggagtttataataccattttatgtattgtgatactaaaggaagctgttttactttattttaaattgaattattagattaacttatatttgcaaattctgcattttaaatgtggacacttggctgtttgaaaataaatacagaatacagttttatgaataattttctagctgaatttttcacagtactttgaaccaaatgactaatggtaaatatagacaaaaaaaaaatgtggtacacagttattaagaggaaaggatgtccatgtggaattaccagttccatgggttaagtaacagtatcagggcctttactgtggcttgctgtagaatgtcacgagttccaagatcaagttaactgttaactgtcatcaactctttcagattgaaccatgttgagcatagagctaagatgatgtgtggcttttcctttaaagataagattctccattaaccttttccattagcgtagatagatttgttttcattcaccaaccaccttgccgggaccttgtcttctgacagtgaggtgcattgtgaggaagcagtctacagttaacagtgctgcttaggtccttgggacagacttgagttaactggcccttgcagtagtcagtgctcagacctggcttattagcatggtgctgtaaccaactacgtaatggtaccactgatggtctactattgcatttcctacatcccagttcctgagtgatttggcttggtggggaaaggggtggggagataactctacctgacacttctcccaccttttgaagattaataacaaaaaaaaaa

SEQ ID NO: 4 - DNA, 5678 bp, Cricetulus griseus
aaacagtgtcaagcatcagctttgtttcagtttgcagagatctcttcaagcacttcacagttgggtggtcctgagcctgtgaaacgctgtgggaattctgcgctctttcaactggcagagatgtgcctggcatcagagggcatgaaaatggatgaaacaaaactaataaaatcaaaagaatcagatggtgggagaattaaagaaatggaaaagggaaggaagagagagatataaaaatggagaaaaacaatgaagctgggttccagaaggaagcagaatttgagaaaccatctaaggaaaatataagagagcctaaggacttaaaaaactttagaggaactacaaataggataatagtaatggactaataaaaatggaagaccccaaagaagttagaaaaggaaataacagaggatgatcagaagtacagtcacttccctgatttttcttactctgccagtagcaagataataattagtgatgtcccagtggaaaagagcacatgtgtcaccctcatggaattaagagggcatgaaagcagagcccttgacacccacagaggatgccctgccacctagcctaccaggacagaccaagcctgaggacagtgactgtcacagaaaaacagagacatgtggctccaggaaatctgagaggtcttgcaaaggtgctctttataaaaccctggtgtcagagggcatgctcacctccctccgagctaatgttgacagagggaaacgaagctcaggaaaaggaaactcctctgatcatgaagggtgttggagtgaagagagctggacatttaaccagagtgggaccagtgggagcaagaagtttaagaagaagctaagggaagactccttccttggttctgcaaagctggatgaagaatttgaaaagaaattcaacagccttcctcaatatagccctcttacatttgaccggaaatgtgtatctattccaaggaaaaagaagaagactggaaacatgtcctcagaatcgactaaaaccagcaaaggaagtggggataaatggtcacacaagcaattcttcttggattccattcaccctacagaagccatatttccagaagacaaaaacaccgcagagcctgcttataaggttaaaaatgccctatccattcccaacactccagagccagcaatgcaagaacctttggtggcagccaaaagagaaaagcaaggaaaaccaagatcacacaccttgtcaggactgcagatggccagtatcaccagcaggaggtaccctggatgacaaaccaaaggaacaactgcagaggcgtctcccctgaggttgcagccatggagaatgtgcacagaggtcagaggtcaactccgctcacccatgatggacagccaaaagaaatgccacaggctcctgtacttatttcttgtgctgaccagtgaagcaccctttaattgtaaaacattgtgctttacctaactaccctagccttgtcttttaccagggatgctagcaagtccatgtggtgggaagttacagactacagacaagtgcttgttgccccacacagcccagaatcacttgaagcagaacttagcattctgagctcatttgttgtttcagaagccacaatttttgagggcagtgttacttcgtgatactgagcaaaagcaaagtgatttggacctttgctttgcatggaaggaaggcttttgacagtgaccagtggtaacttggtaaaagactgcctttattgtagctcatccagcatctcttttaccaaccagagagtgtgaaactagtttcatatattacctagttattctttcaaaacaaacaaaaaaccctgacgcactgcactagttattattagaaattcttagtcttttgtacatgaagatttaagttctaagatggtttatataataggttatacctacatttatattgtagaataaataattaaaaagcctgtaccagagactcccaagcagcatgggcaggcagacgtaccattgttagcggtgtatgtggcagagagagagagagagagagagagagagagaccttttacattcatcacagacagactggacgggttgcgattgctatgcaggcctaataggcactgcaggttttaggagctatttggagtttgtgttgttgaggaggtattgagtacacgaggggggaggtgtctgaagtgtgcctctcagtcagatccacctacaagtttctgtttccttttcatgttttgttgcttttaagcataaaaccaaccatatgccagtgccaagtggattaactggcttaacaacaattcaacatattgacttaaccacccctagcaacagatgcaaagtgatacatcaaattaatctgaggctacagattttacagggtatttgttccatagcacaaagtatttccccactcttgcattacagcacaaactaccaaattttaattttggatcccagcaataatttttaatagttttcaaactggtggagttttgatagtgctagctggaatttgaagcttttgaattagatctctaaatggtgacagtttacatggttttatctagctttcttatttatacttgactgaaatttgttaattgttaatttttttcttaatttgtaatttgacctaatagccatataaaatgactctattaatactgtctaggtctagcttctcatggttgtagatattacttcagttccggtgctggaaaatatgtacaacaatactaacagagttgaaaaagtagaggtttgtttggttttgttgttatttttccaaagcaggtagggagggcagcagagtattaaaattgtgtcctcaaaagttcatgttcattgtagggatgaaggaagcaggagttagtaaaaggtaaatcagtaggtatagcttaaccccattcttggaaattgctgggcctgatgttggtggctgttggagttttggaccacttgctagcagtgatttaaaatgataattaagctaaaacccaaaaaaattagtaacaaaagtagaaaaccaacaattgcattggtgcagaacatgcatcttgacaatggtactaacttgttattctctagagtacattagaatagatctatttttgccagagcaccctccttcagtcctccgaatacatttcagtagggtcccttaagagattgctgtatattcctgagaccttttttttttaaaaaaagaagcaaataagagatgacttttctatatggttaatatcttacctggtctgcttcctgaaccccaagtggctattcccttaggcagggtactcttccagtgttccttagccttttatttattttagttattctggtatttccaatgtaattttgaactgtctagagtatattatagtaactaaaactgcagctcttaagctgagtgcaagaaaaaatactgtaagacatccttgaagttttgtttgtttgggcactgtaaatgagaaaaagagaaaagaaaaaaaatatcccacagccacattggaaaccacaggttcttgtccccaaattaggttagtctcagattgtggatcaaaactctgtgtttgcactctgcagtctttggcttccgcgtacggaagtgtttgcaccgatgtaaaatctcaagcaaattataaattgctatggaacagacattagttgaaaactgaatgacgtgtttgtttatagagtggggtggggaatactacatagctctgttccaagcttggcatttgatgttaatgtgaagcagtgggaccatgctgcctgctaaactactgtatgcgtcctaagtgttctgaagaccagcagctggaagctggaggacagcacccaatcaacagagaagcaccactgggagtccccgcttgtaagggaagtgttggggtgtagatgatgctgttgagattcacctttgattgcactgctccacagagtcctcagataaggccaatcctcatgggctacctcggcttccaaagttagtttcagtaagtctgtctttcgcttctaccttcagtgccacgattttccactgcagtgttttgactttaccaaaccagcttctccggagagatcaacatcttgctgaaatgagcagtaggagcaagtgcttatcacatttgacctgctaaagtgtttggagtgactgctaggtggaaattgaatttagcttctccccacacatccttgttctgcactttatgcaaagtgtactaattgttaattagatgttgtttctgtttatacaggcattcccaaagagttagactggacttggttttatttgagtttggggagtgttaaagtcttacttagattaacaacatgtgtataatgaaaacagaagcatctgtgtagttcatggaaccatggatctagtgaagcgtcagggtttgatggactactttgcttgtgtttggaagtgatagctacgttcgttatactccatgctgaaggactgtccttttaaggggggacattattaccttcttacatttcagaacaaagaagtgacagaactaaatgacatatgcttgacttctttgtatatctgcacctatctgtgctatccttccctccaaatatataaatatacattatgagggagggaaagtttcctcttttgaccaaattttatctgtggtggtgtgatttttactgataaaagtcacaggaggaactttgtagttaaaagttctgtggccactgttttgttttgttcttttggtttttttgttttgttttgtttttttttggttttttgtttgattttttttttttttctttggcagacagtggtcaaactgatcatgtcttcaaattgattttcatgcacagaactagttgttgtgaacattactactacttccaaagatttttctgagaacttgggccagaactggtgactgagtaacaaggatctgattgaatgcctccaaacccacccacccacaacacgaatcttacctcacaagctctaacctaaatcatagagacactcatgttccatggaatgtcactgacttctctgttgctcgccagaaggtgtttgctcttgtctcctgactcctcacgttagtgcctcggctcttggagcagcagaacctagggtcaggaagactggggaccttgagcttagtgattgctcagccacattttcatgtcattagcactaagcaagcctctggctctcaggaatttgtcagaacattgataaaacctcctgagattccacacaccaggttataaactggttctcataggtttgaattgcttacttacatgtcataaataaaccatagcttcatttgacccctggtcttaagtctgttgacagtttcagcatgacctattcgctcattttatttttttttttttttttgctttggaaattggcttggttctctttagagttggtgtaaacatgccatgtaataaatgatttccagttaatggtacaacagaattattgctttcttagatgtatgtgtagtaaaagtcaatatacacatttatataatttcttcaaaatcttatacctaatttgatatttctaaaaattgcacatgtaaatcatgtgtataacatgctaaagtactttaactgtgatcttaaaactgaataaaatatttaataaaaatttgaaatattttaaacata

SEQ ID NO: 5 - DNA, 5069 bp, Cricetulus griseus
  modified_base (358)..(358): a, c, t, g, unknown or other
  modified_base (2220)..(2220): a, c, t, g, unknown or other
caagaactcatcaggccacaagccatccagcaacagagagtcatctaagcagagtagtacaaaagaaaaggatttgctaccttcacctgctgggcctgttccttcaaaagattcaaaaccagagcatggctctcggaagaggactgtcagtcagtcttcttccttaaaatccagcagtgccaacaacaaggagaatagcagcagcagcagcagcaagaatagttcctccacttcaaagcagaagaagactgaagggaaagtttccagcagttccaaagagaaccaaggaaaaggctccaagtagctcctctaattgtcctccatctacaccaactcctgacttctcgaagcctcgganaacaagcttgcctttgataaaaaaactacaaaacacaatgcagatgctttgtctgataggtttgagaaagcagtttactaccttgatgctgtagtgtctttcattgagtgtgggaatgcattagagaagaacgctcaggaatccaagtctccgtttcctatgtactcagacacggtggagctcatcaaatacactatgaaactaaagaattatttggcaccagatgctacagctgcagacaagagactcacagtactttgcctgagatgccagtcattgctgtacctgaggctgttcaaactgaagaaggagaatgctctgaagtactctaagacgctgactgagcacctgaagaattcttacagtaattctcaagcaccttcacctggcttggggagcaaagctgttgggatgccttcccctgtttctccaaagctgtcaccaggcaactctggaagttactcttctgggggcagtagtgcttcagcaagtggtgcttcagtgaccattccacagaagatccaccagatggcagcaagctatgtccaggttacatctaacttcctctatgccactgaaatttgggaccaagctgaacagctttccaaagaacaaaaagaattctttgctgaattggacaaagtgatgggccctctcatctttaatgcaagcatcatgacagatctggctcgttacacccggcagggactgcattggcttcggcaggatgccaagttgatatcttgaactgaacatattctcgttgcctctgatttttttccacaacaactgtgtcacatcacaaaggaaaactgccataacacaccacctagtcgacactaagaatgaggaatggttttctcctttttggtttatgttgtttcttataacccaaagccatcatatcaactgaccctttcaatattcccaatgtgacaagtatttaaatgcttctaaattggagcttgtttaaagtttagttattcctgtctataaatttattctgttgaatatttagcataaatttaatgtaggcattttatttatatatttggggagctgtgttacttaatgtcttttaagaaaagagttggcttgtccaagacaggacatgttctttctacagctaattacctgatgttatttcaagtcttactacagttttattattgttggatttatgcttggtattaaggatgctcttccacatgtgaaaagtcacttaaacatgagaagacagcattctacatgggtgcaaaaatgaagtgggtctggtttggtgtgcattatttcaaaactgtgaatgtgtgttagaaacactagcaatcacaaggtgactacattgcatctaatgcattacaaaaagcagatagacttgctgggacaagcacatcatactgaatggcttcataaaggacaatcttaaactgtgggtttattaaaaccttttattctgaagatagtgagctttgtcctgcagtctcatatttacagagcttaactgctttgtacctcattattttacataccgttgagggttaatatctacagcctatgctgaatttaaaattttcccttggagaagttgcctctgatacctttctaatttaattgtagtgtgtttaaggaataatttttcctcagaggctactgtctcctctcttgtgctagtaacttacatggtctgacagttgtgtgtcctgtccttgcctcttctctctcactctggctccttaacttcagggaggtcttagaagtggaacaagtgccccctgggcttttagacttcagcagctgcagtgctagcctctgctttccagctctgggccgtgtgtatagttagtaatagaaatagcaactanctttaatgctcagttcactgctcttaagatcacacttctatgccaggaggcagcagcgtataccattagactctggacaggcaccccacacaattgcagtgatggagctgtcacagtagtcctgcctggaagagactgggctgtggggagcactcccctctgggcatttaagattacacagcctagcccatgccccccattctggctggagagcacccagccctttccttgctcagtgacacctttttctgggcaagaagctatgaagtcactttattatcagtgagtcttcaaatatattcatagatataactgctgaagggagaagattgaccactactgatttaattctccaatataaaagcaattcagagtaatgtgtgcacatgtccacacttgcccatttttctgggaagttcttgcaccagggatttataggcatctgggctgcactttgaatgacacacttgtggcttttagagtagctgttgattgtgttgttttgaaattgttctttgtttcttttcgttaaagatttaagcagctagattaggcaccatcatttgtatttaactgctgaaactttggtacattgatgtttaatgaatgagcttggattgtgtagccagggcctacaaaggtggttgtcagaagtacaagtactgcctgaggccagtgctcagaggtgtttgtagtgcagccagtgatagctcatttagatgatgcctagctcagttgagaaggggaatgctgtgcactcttctaggtctgagggtatgcaactttggatcttaaaattatgtacacatacacactttatatatatgtacgtatgtatgtatgaaaacatggggttagtttgtcaaaatgtgtgtgtttagtattttagcttagtgcaactatttccacattatttattaaattgatctaagacactttgttcttggcaccttgaatattaacattcaagggtgcaatgtgtattcctttagattgttaaagcttaattattatgatttgtagtaaattaacttttgaaatatatttgagcccttctgtagtgtaatggggctcttacagggtgggaaagattttaattttccaatagctaattgaacaaatggcttcgttgtatattttgatttataggagtctataggtgtctggctcccaaagatatctaccgaggatgactgttgtaggctgggtgtggtgatggttagactaaacctaagtgacttggagagccagagcaccttgttcaagtctgtagactcctgtaactcatattcccctaggatgtggaacacaaatcccatccatcttcacatctcagttagagaggcagacttcttttccagtagtattgcacacctagtgttgctgtgagtaaaatcagcagaaagaataatgagtgagtgactgggaagttgcactgatgaggcccagttgtcacctttgtgaatgtacttttcacatacttacagtggagcattcagtttcaactttcagaccctgaaaccaagccagcaagtaacaaaagtccttatgattagagaatgacaggagtgctgcttcataccctgaggtaatggtcagccttttcaactaagtcagagtttccagcttaaatagctaatttttaagaagttgattttcaggattgtccgcatgcgcctctcttcttgctgccattgctcagctaagccaaaataatcatccataaacccgaagaaagcgcttaagtgagcgtggacaagctcccacccagaaatcctaataatacttggctttgaccttgctgcttctgtgttaggtttcttctcagcttttagccactggggtttctgcctgttctgtacctctctggaagacatcagtttataagtgctgcctttcaaaccaacaaacaccatggcttctgtattgttgagcttcttgttgtctcagaggtgtccccattatgcacacacctggcacatcactgacatgagcattcaacagtactggggtggggcggggctcaccaacagcgctggcttacttagcagggcctgcaaaggccacacttgagggtcagacgcccagttggtaagcacagttagggaaatttctacctagcctccgttttgaatgattttgagaagttttatatatggaggatggaaatgcttatatatttattgaagatctttttatttgaaattgaaatcatttggtaaatagtggtttgctatttggggagggttttggaggggaagtaacacggttgacaaagtacagacatgttgcctctgcagaaaggcactgttgctgataggaggccttcaacttgtacatgatccactctttgtctgacggttcttttatccaaaacatctaggcatctgacactttcaaccaaaatttcaattatatactgtgatttttatttgttgcaatacattaaatttcagaggtactttggggctcaaaagctaggatttctaagtcagtatgtgcatttcacataataagctgttaatggtgagcaaagtattatatactaactagattttccacatctgtatagtatattatatgtattttgtggtattgagattatagaaagtttagagtgtcaaacatgcgtttaatgtgtatttttaaacaaatttatggcaattaaaatatttggagacaagggtatcacatttcaatttgtaaaactctttttaactctactgtgtcattatgatgctttgtataatgccaaaccatagctggagaaactacgtttaataaatatcagatagcttttctgtataacgtttatatgcatgtgctctcacttcttcagctcctgttgt

SEQ ID NO: 6 - DNA, 5005 bp, Cricetulus griseus
  modified_base (485)..(485): a, c, t, g, unknown or other
gagtcaagagaactgtatgtgatggagatatctgataacccaggtgtccatgaaccaggggaaccagaatttaagtatattggaaatatgcatggaaacgaagtggttggaagagaactgctactaaatctcatcgaatacctttgcaagaactttggaacagaccctgaagtaaccgatttggttcgcagcactagaattcaccttatgccatccatgaatcccgacgggtatgaaaagtcccaggaaggagactcagtaagtgtagttggcagaaacaacagcaaacaactttgacctaaaccgaaatttcccagaccagtttgttacaatcacagatcctacccaaccagagaccatcgctgtgatgagctggataaaagtcctatccatttgtactgtcagccaatctgcatggaggttctttggtggttaactatccttttgatgataatgaaacaaggagttgctacatacagtaaatnaccagatgatgaatgaatcaaagaaaggaaagggggctagcaccagcactgatgattccagtgacccaactaccaaagagtttgaagcattaatcaaacacctttctgctgagaatggtttagaaggcttcatgttaagctcgtcctcagacctggctctgtatcgataccattcatacaaagacttatccgagttcctgagaggacttgtaatgaactacccacacattacaaatcttaccactttgggacagagtgctgagtatcgtcacatttggtccctcgaaatctccaataaacccaacgtatcagaacctgaagaaccaaagattcgttttgttgctggtatccatggaaatgctccggttggaactgaactgcttttggctctggcagaatttctttgcctgaattacaaaaagaacccagttgttacccaattggttgacaggactagaattgtgatcgtaccttctctaaatccggatggacgagaacgagcacaagagaaagagtgtacctcaaagattgggcaaacaaatgcccgtggcaaagacctggacacagacttcacaagtaatgcttcccaacctgagaccaaagccatcattgaaaacttgattcaaaaacaggatttcagcctttctattgctttagacggtggttctgtactggtcacatatccctatgacaagccagtccagacagtggaaaataaagaaactttaaagcatttggcatctctttatgcaaataaccatccatcgatgcacatgggtcagcccagttgcccaaataagtcagatgagaacattccaggaggagtaatgcgtggagcagaatggcacagtcatctgggcagcatgaaggattatagtgttacctatggccattgcccagaaatcactgtgtatacaagctgttgctacttccctagtgcagctcaactccctgccttgtgggcagagaacaagaggtctctccttagcatgttggtagaggtccacaaaggagtccatgggttagttaaagacaagactggtaaaccgatctctaaagcagtcattgtacttaatgatggaataaaagtgcacacaaaagaggggggttatttccatgtgcttttagctcctggtgtccataacatcaatgccatcgctgaagggtaccagcagcagcattcacaggtctttgtacatcatgatgcagccagttctgtgctaatagtctttgatacagataaccggatatttggtttgccaagggaactcgtggtaactgtatcaggtgccacaatgtcagcattgatcctaacggcttgcatcatttggtgcatctgctccatcaagtctaacagacacaaagatggcttccatcggctgcgacagcaccatgatgagtatgaagatagaaatccgaatgatgtctactggctccaagaagtccctcctaagccatgagttccaggatgaaacagacacagaggaggaaacgttatattctagcaaacattgaaaaccatgttttgcatatgtccctgcataaacaccaagtaaaatgacagctcctcttgggagacactgcagtaagaagagggattccttccttcctcaaagagctttgggaagtgaacctgctaagtgcatattctctgaataccataggcagttctgaacttccctcccttaaagtactcttatccttttctaaaacttgagattttctccatctactgagttctcttctccagttagcaaataggctggggtttctcttattcaggtaatggaggctggatgattcttaaacatatatgacattaggaaacggaataagcgggcttccgtatttgtctttctacctgtttccaagctggatcagaactggtgggctgtgctgtagcagggttttactacctctctggtagggttatcaaagctctcaataccctcatcttaaggggaactcactggctttgctatggaggcgccaggggtcctgtgagtagaagtgagagggagtgattcctttgacggtccttttctttttttttcttcaaaatcaagcaattatgttaaaattttcagttcaaagcttttaaatatggctccctccatttaaaaaaagtcaactgaaggactgccgtgtgatgggacagtggtgtgaaggtgtcctcttcactgccagtcaggcaaagacctgaaagatttgcattttattgtgtctcttaatgctgttcagtggaatgatctttttgtaagtgagtcttaccaatgacgtaacagtttaatatctttgaatgttttaatggccaagttgctgctgaacttgtactaaatcaggggatcaaaaaactagctcttacctttccaaactgtattgataccattaatttatcagttaccccaaagcctcagctcacctaggtcgctcagccactctttgtgaggaatgcaccaccgagtggctgtacgaaatggagatcctggttagtagaaaggagtaatgagatcatgacatttgttagctgtggtcagttaggtggcttaggttcggccactctggaatcagcgctggcattaccaggtctgaatccctgttttgccacagggacagaatagttcgtggaagttaatactaatgacgggcacatggtttcatttcttccaataacactttgtgtttttctaaatgatgtgtattgctctttttcagctttatttttaaaagtgccaagtcagaaaaccaacaaggggcttatggctgggccctgcttgggacattacagctggaaaccaagttcatgtgacagcctttgctttactagtgccttttaaaggatgtgtgaaagttttagagataaatatacagaatagttctcttagtcgttttgttttctgaaatgaaacccaaattctaagtctgtaatgaacttctaatgcattaagctggaaaccagccctccccaccctctgttacctatgaacatgaatgtatgggatccatgactgctaagactgtgttcttacccctgccttcttttatgcgtggatctaatctaatcttggaccactttggcagcagagggcaatgaagccatatgggatggggaatgcatttcttcagtgtttctcctggagactttccatttctctagagtcatggacccaacttagtgtcacagtgttaggacatttgccccagtctgagatgtgccttccctttgctcacaaggcattgttttgtcctggtgatgagcttacaagccttcttccctccctgctccttaataaaagaacatgagtggtaggtaatgtttaaagtgtctgcctgtgaggatgcgcttgtgaactctgggtggtgatgggatctatccagtgaagagcacttgccatcctcactgaagggaactggctttgggactcttgtcagtctcgaggaaggatacattgtatttttggttcagtgtgcttggttgatcttggtgatttcatctgaatgagatttgctgaattagtgaatattaaatttaaaaccaattatgagtggaaaaataaaaaggtagtgcttatgtctgaactggctgtgtttttcagcgagcaccaggttaccagtaaccaagacttgctcctccgttcatttccactcattctcagcactaaatagttctgttgtcttgttgtactcacacttgtgtcaggttttgtccctgctctcttagaagtttcttggctatgaatatgtcatggtgtccttctgtgtaggtctctggtgggattgttttacagtagcagcccagcatttcccccaattttttcctttattattacgaaaattccactaatggttaaatattcattgatctttctatatagcaacttgttaataactttaggtttctggtttgttttaattttagcagttttggggggagggtgattaggatgtttgattaatgtcaattgaatttggatttctagttcttgaagaaaaccctcccaacacccacttctcctttaatttagaaaaaaaattcattaatggttccactgactctcagaaatctctcctagttgattttgaaatttgaaagtaggttaccattttgaggcaattggacaaaaattatgtaaatatagacaaatacaatgtttataaatggcataacatgaatgtactagctacgttctgtgctgcagattttttggaggtatgacatggaatttttttatgttattttcaccactctgctttttttcagaatgataactccccagctccaaaactgtccatagctatttctgtgacataatactcattcatcttaagtgctcagtcttttgttttagttcatgcactgtgccttcaaaatgaaaattttaaagggactttaaaaagaatagtagttttaaaagttaatctgtgtaatttatgtgaaatctaactataatgaggtcctttgtttttatatgtaaacagatctactaatcctgtataaaagttattttatgatgtttgtc

SEQ ID NO: 7 - DNA, 4892 bp, Cricetulus griseus
cgggacttggtgtcgctgagagtcggaacgcaggggctctgcgctccgcacccagctcctcccgcgccagggtccccttagtccttttgctcgccaatcccagccagggacgctggggccaggaggccggcgcccacggtgcagaaccagaagggcctggccgctggtgtgcagcgggcctgcgcttcttcaggggcccatgcgcgcgagcagcagctcctgacgcgggaccctgaggttagaagggtaccaagctgagcctagagctgtgagactgggatcatggaccgagtgaagttctcagtgtctggccctgccctgagagggtggctgctactggcgactgtgacagtgggactcctggctcagagcgtcttggctggggtgaagaagttggatgtgccctgcggagggagagactgcagtggtggctgccagtgctaccccgaaaaaggagcacggggtcagccggggccagtgggcacccaggggtacaatggccccccagggttgcaaggcttcccaggactacagggccgcaaaggagacaagggtgaacggggagctcctgggccgactggaccaaaaggagatgtgggagccagaggcgtctctggattccccggcgcagatggaattcctggacatccagggcaaggtgggccccgaggaagaccaggctatgatggttgcaatgggaccagaggagacgcaggtccacaagggccctctggatctgggggcttctatggctcccctgggccccaaggacccaaggggcagaaaggtgaaccttacgtactgcgtaaagaagaccaagacaaatacaggggtgaacctggagagcctggacagatcggctaccaggggcctcctggccgcctggggctgataggacagatgggtcccatgggagcacccggaagaccgggaccaccagggccccctggacccaaaggacaaccaggcaaccgaggacttggttttacggaaagaagggtgaaaagggtgacgtaggacagccaggacccaatgggatcccatccgacatcacactcattgggcccacaacaacaacgtaccgtccagatcagtacaagggtgaaaagggaagcagaggagaccaagggataccaggcccctccttgaaaggcgaggaaggcatcatgggattcccaggaacacggggtcatcccggcattgatggagaaaaaggaatcttcggacagaaaggaagcagaggcctggatggtttccaaggccccagtggacctcgaggacccaagggagaacgtggacagcaaggccctccaggaccccctgtctactcgccccatccatccctggcaaaaggtgccagaggtgacccaggattcccaggtgctcatggggaaccaggaagccgaggcgagccaggagaccctggccccatgggacccccaggcccatctattggagatgaagatacaaaaagaggccttccaggggagatgggacccaaaggcttctcaggagaaccgggccacccagcaccctatccaggtccaccaggagctgatggaaaaccaggtctccaaggagtacctggacctgcaggcccacctggaccagatggttcccaggacccccagggttcatggggcctcgaggatccaaaggtgctacaggcctccctggcccagatggactcccaggccccactggactttccaggaccagctggaccccctggaagacagagggattccaggagggggacagaggtgatgtcggcatatcaggcgagcgtggtcatcccggaagccctggaattaaaggagtggcggggatgcctggcaaccctgggcaaaaaggcgatcgagggtcacctggaatggatggcttccagggcatgttgggactcaaaggaagaccagggttccctggagtcaaaggagaagcagggttctttggagtgcctggtctgaagggcatgcctggagaaccaggtgttaaaggaaatcggaggggaccggggccccccaggacccacctcctgtcatcctgccggcttgccaggacagccaggggtggttggtactcctggaattaccgggttcccaggattcataggaagccggggagaaaagggtgctccaggaagagcagggctttttggcgagattggccttactggggactttggtgatattggggatactgtggacttaccaggaagcccgggcctgaagggggaacgaggagtcactggaattccaggtctcaaggggaatcttgggagagaaaggaactgagggtgaagttggatttcccgggataacaggcatggctggaccccagggctctcctggacttaaaggacagacaggttttccagggctcacaggcctgcaagggccacagggagacccgggaaggagcggagtacccggtgacaagggagattacggctggccaggggtagtcagggttaccaggttttccaggaatccgggggatcagcggattacacggcctgccaggcaccaaaggcttccccggatccccaggagctgacgtccatggagaccccgggttcccaggccctgctggagacaggggtgaccgaggagaagccaacacacttccaggccctgtgggagctgcagggcagaaaggggagcggggaaccccaggggagcgtggcccagctggaagcccaggacttcagggtttccctgggatctctccactatccaacatctctgggtcacctggtgatgtaggggcgccaggaatatttggctctgaaggctaccgaggccctccaggaccacctgggccaaacgcacttcctggaatcaaaggagacgaggggagcgtaggagctgcaggattccctggacagaaaggatgggttggggacccagggctccagggccagcccggtgtagttggtcttccaggagagaaagggcccaagggtgagcaaggattcatgggcaacactgggccctctggggctgtgggtgacagaggccccaaaggacccaaaggagaccaaggattcccaggtgctcctggctccgtgggatccccaggcattccaggcatcccccagaagattgccatccaacctgggaccatgggtccccagggcaggagaggccttcccggtgcacagggagagatgggacctcagggccctcctggagatccaggtttccgtggggctccaggcaagactgggccccagggcagaggaggcgtgtctgctgttccagggttccggggagaccaagggcccatgggacaacagggcccaattggccaggaaggggagccaggccgtccagggagcccaggcctgccagggatgccgggacgcagcgtcagcatcggctacctcctggtgaaacacagccagacagaccaggaacccatgtgtcctgtgggcatgaacaagctctggagtgggtacagcctgctgtacttcgagggccaggagaaagcccacaaccaggacctaggtctggcaggctcctgtctggcacgcttcagcactatgccgtttctgtactgcaatccgggtgacgtctgctactacgccagccgcaatgacaaatcctactggctctccaccactgccccattgcccatgatgcctgtggctgaggaagaaatcaagccctacatcagccgctgctctgtgtgtgaggccccagctgtggccattgctgtccacagccaagatgtctctataccccactgcccagctgggtggcggagcttgtggattggatattccttcctcatgcacaccgcagctggggacgaaggcggcggccagtcgctggtgtcgcccggtagctgtctggaggacttccgtgcaacacccttcatcgaatgtaacggaggccgtggaacctgccactacttcgctaacaagtacagcttttggctgaccacaatccctgagcagagcttccagggcacgccatctgccgacacactcaaggccggcctcatccgcacacatattagccgctgccaagtgtgcatgaagaacctataggccgtccaccctgcccgccagcagccgtgtgggaagacctctttggtgctcattctcttatgtatttgttccatttttgtttgagacagtgtcttacttttcatcccagtctggcctggacctatgtaacccaggctgcacccccccacaccctgtggcaaacctcctgcctcagcttcccaaatgctgggattacaggcatgtgccaccacacccagcttggtgcttactcttaacttattacctcagaggctgaccccaaagttgatcttagtattttcaaactaaacatctgggagcagcccatggaccctcaccgtgtggaacatggacatcgtgccaccaggagtagccaacagtaactgtctgtgtgtccctgtgtttccactgtctccaggcagctcactgtacttcactcttgtcctagaatgaggccgactctgcaggacagcaaagggagctggccaatgacagccgaggctcactgccctctctttccacccaaggatcccttcaatgcactctatctaggcctgtttccttggcggaggggatggcagtatcattttctaccaaatccgtagctgctacctcccaagatcccacacggtgacacctgcctttttaagaccctgacagtggcatgtggttctggctctagccaaacccacagggagggagaggtctcgctagccctcaccagcatctgctggaaggtacacttagcaagtcattcacagtggtgtcccacaacctgtgccaccttaaactgcccccacctcgttccctacagcaagctgttctatgcctttcctgtgtaacaccacaaataaagata

SEQ ID NO: 8 - DNA, 4838 bp, Cricetulus griseus
  modified_base (2914)..(2914): a, c, t, g, unknown or other
aacaggctcttggaatcccagctacaatctcagaagaggagccatgagaatgaggccgaggccctccgtggggagatccagagcctaaaggaagaaacaaccggcaacagcagctgctggctcagaacctgcagctgccccagaggcccgcattgaggccagcctgcagcatgagattacacggctgaccaatgaaaacctgtattttgaggaattatatgcagatgtgatggaacaacttgaaaagcaggataaaactgtccgaaaactgaaaaacaactgaaagtctttgccaaaaaaattggtgaactagaagtgggtcagatggagaacatatctccaggacagatcattgatgagccccatccggccagtcaatattccccggaaagaaaaggatttccaaggaatgctggagtacaaaagggaggatgagcagaagcttgttaagaacctgattctagaattgaagccacgtggagtggctgtcaatctgattccagggttaccagcatatatcttatttatgtgtgtgcgacatgctgactacctgaacgatgatcagaaagtaagatcattgctgacatcaacaattaacagcatcaaaaaagtcttgaagaaaagaggtgatgattttgaaactgtctccttctggctctctaacacatgccggtttttgcactgtttgaagcaatatagtggagaagagggcttcatgaaacacaacacatctcgccagaatgaacactgtctcacaaattttgatcttgctgaatatcggcaagtgctgagcgacttggccattcagatctaccagcaacttgtgagggtgttagagaacatccttcagccaatgatagtctcaggtatgctagagcatgaaacaattcagggtgtatccggggtgaagcccacagggctcagaaagcgaacctccagtatcgcagatgagggcacctacacattggactccatcctgcggcagctcaattccttccattcagtcatgtgtcagcatggcatggacccagagctaatcaagcaggtggtcaagcagatgttctacattgtgggcgccatcaccctaaacaacctactcctgcgcaaggacatgtgctcttggagcaaaggcatgcagatcaggtacaatgtcagtcaattggaagagtggctccgtgacaagaatctaatgaacagtggagccaaagagaccctggaacctctcattcaggctgctcagcttttgcaagtgaaaaagaaaactgatgatgatgccgaagccatctgctccatgtgcaatgccctgaccactgcccagatcgtcaaggtattgaatctgtacacacccgttaatgagtttgaagagagggtctctgtttcattcatccgtactatacagatgcggttacgagacaggaaggactctccacagctgctcatggatgctaaacacatctttcctgtcacctttccctttaacccatcctccctggccctggaaaccatccagatcccagccagcctaggcttgggtttcattgcacgggtctgaagtgctgtccaggcaaacctagagaacacatttcttctctgaataagaacagttgtttccagtgagctactgaaaatacctttttaaagaaacagtactgatcatctctaaaagaagatgtcattaactggaaatccactgaacatatatcatatcagcttaggagccaatcatgttgatattgtcaaactggatacaaaaaaataaactggcaatatgtaaagtaattgcccaagtaacttccttatttgtgtcattatggtacagtgatactaaagatgctggtttgctaggtagcttagttgcccttttgtactgtagcttaccaagcatcttaaattactgctacgagcggtctcctgacctaagtgatagctttttaggcactacacagtaagcttctctttcatcactctgtttacaattcaaccagatcagttttaactggattatatgcaattatccacaggttcatctgcacaagtagcagacactggtgttgatgtcattgatgatcagaatgtattacattgatatgctgattttacctgtgtggatatcatatcatggtatagtgttctgtaaaattacttattttagttcccaaatctgattcttgtcatgcatatattcaaccttaatcagttcttttttaatttattaagtgttagcctcagtcactatctagaaagtactgtcagaatatttatgattcagatcttgaagctttgattatcctataagttattcaaaacagacatataataaatcattataaatcaggggttttaggtgttataacctctataaatgttctcagataccactgagtactttaaaaacatcatattataaatacattaagaagatttatgtaagaaatataagattattaattttataaaggatttggttcagtaagacctagattctataaattttcattatgaaattctaattaacatattctcctattttttcctggaaatcttatataataaatcctttgggttatgcaagagcaaaaattcttagctttcattcctctagttcttaaattacaaatcatcaatttgtatagttacactgtaagatggtctgtaaacagtgacatttaaatatgtgcaatattattgatgagagctaaaactagtactgtgtgtgtcagggagttcttcaggaggcataaccaggggtcctctgggtaaccccagcctcttaggataaagagcaaatgtctgtgtgtgacactgcatggtcctgctgaaagtagaacagaactagtgcccatatgcatgtgcttcatgccagcactctttgttacctcacttcctcacagcgtccacaggagagagctcccanagtcagtgcaaatgataattcgggacaatgatatggtcagtgacttgcctagggtggcactgccctctagcagtgagggcagaggctgccctgtccctccagatgctgtggggtaccctgggctagtaagggtactcttcatctttaatggtatgagggaatagacaaaggatgagcatcaacttacttcttggaggccggtgcacagtgcatacagcaccagctgtgactaggcttgcctttgtcatgaatcaatcagtgctccttgacagggtatggactctcaaaccagaagctgtccgaactaaaagggcaggaagcagccaacctcagatgtgaagagacaaggcaggccactctccacaaccctgaggtttccctgtgagagccgctggctgagctgcgtggcctacagagaactctcccctagtttcattttgctgcagagaggagcccaggccactaagtacctccctccctggggctgtccaccataggtgagtcagtgtaagcttggaagtgccacagcttgctgcaggggagaagctagaagctgtgctgtgggcatgcatgcttgaggccacacaggcactcactcgtgctagtgctttgtaatttgttctcagactgtgctgtgagggccgccttaacccttgccccttcccttttagagctgccttaagtttcccagaacttgtcctcagtgagggatatcttgccatgtttcttaaggttttgtgaggatttggattggatgtggcttcctaccaccaatccctttctccccttcctgcatctcctgccacctctgtactgtcatttccaaacaaagattggaatttgtgaagcagctagtgaaatgttagctttaagaatgtttctgagatagtgcaactccttgtgacagtaagcaaatgagcatgcatggaagcaggacggaagtcagtgtattcatggggtctcgcctttcactaaccctttcttaataaaggcaaaaatacaactctaaaaacttttgtggacatccttttaaaatgtaaaggtggtgccctagtgtaaaaggctgagtaaaaacaggaaagtagctgtgtgagttttaatccatcatagcacctaaattaactgtagatagatcaaaaactgaaagatgccatgtcaaacatctcccaaatgcattttatctatttttttattttataatttggtctagctagttaaaaatgttgacgtaataggtagaattagactcataacatatctaaaacaactgacatttccttggcattgtgatattgatggaatggttgggaaagttctgggtttgttttttgaggtttgaaattgtcatatataatttaatgcttggaaagttaatgcaattccatgcattttccagagtcagaagtttcaaataacttactgttgttatgtgttacaaaatcttagcctaagtcacatgagcccttacttgtcctataaatagtgatttctcctttaaatgtggatatgtgttgtgatttgtagtccctaattatgttcttttgtgggttcctgaagtaatattgattttctcgtgttcttggaaagtttacattgttccaacagtgttgcacagatgagctcatggcatttaacatactgtgtgtttttattttaactgtttataacttattgtgaaatgagcccacaggaaatcttcaggaaggttaacaattcacctcatatcaacaaagccttggaaacatgagtttttcactggatattacctaatgctgaaaggaaagccaaaccaatatcagaatgacattttatgctctaaatttgtagctgtctagtgttgtacttagtgtgtatctgtcattagtgctgtattctcctagctattgtagaaaattgttgaaataaagataaggatataaaaaaa

SEQ ID NO: 9 - DNA, 4809 bp, Cricetulus griseus
catgtgctatgcatggtgttgtatctgattgaattaggtctagagaactctgctgaggatgactctgaggaagaggtatcaatgggtggaccagaacgttgtcatgacagttggttccctggatgtaacttggtatcaaacatgcgacactttataaattatgttagagtgagagtcccagagactgctcctgagttgaaaagggactcacttgctggcaccagctctgatggtttgggctctttacaaaattctggtacagctcaggttttcagcttagtagcagagcgaagaaagaaatttcaggagatcatcaaccggagcaacagcgaagcacatcaggtggctcggcccaaaatgtcaagcaaatggtcagctcctggctcagctccccagctaaccacagccattttggaaattaaggaaagcatattgtctttgctgatcaaacttcaccacaaactctcaggaaaacaaaactcttattatcctccgtggtttgatgacatagaagttttaatacaaccagagattcctaaatacaatcatggggatggtataactgcagtagaaagaattttgctaaaagctgcaatgcaaagcagaatgaacaaacgcatcattgaagagatatgcaggaaagtgacccctcctgtgccaacccaaaaaatcaccgcagcagagaagaaatgattctcctgagaacgatattcctatggaaattaccacagcagaaccacagatttctgaggctgtgtatgactgtgtcatttgtggacagagtggtccttcctctgaagacagacctactgggctggttgtactgttgcaagcatcatcagttttaggtcagtgccgggacaatgctgagccaaaaaagttaccaattactgaagaggaacagatttacccttgggacacatgtgcagcagttcatgatgtgagactttctttattgcagcgttattttaaagatggtttcttctggaagcaatgtggaaaacaacctttggcaacgtcctagtaacaaaagcgcacaaagacctccataaaaggaagtggaggagctgcagggacggccgggagctttcccatcagaaaccaacttaagtaaagaaatggaatctgtaaatgaaagaatattaaaaaataccaactcagaagaaatacagagactatagcaagaccccaggctcaccagacaattgattttctctttatgtactctgttgctagaaccaatttggagctggaattgattcatcgaggaggcaacttatgctcaggcggtgcaagcacagctggtaaaagatcttgtttaaatcagctgttaccaacgtaattagccttgcatatgcggctttataccattgattctgagtataatccctggaaaaaactcacccagttagttgaagatatgaattcacagctggggaatgaagaacagcagcctgaagttccaattctttatcatgatgtgacatcccttctgctcatccagatcttaatgatgccacagcccttacgcaaagaacacttcacctgcattgtgaaggtactcttcaccctactgtacacacaggctctggcagcactttcagttaagggcagtgaagaggatcggtcagcctggaaacaagttggcgctcttagaaagaatatgtgtgatgcagaaaagtcttgtgaagtgctgctgagctttgttataagtgaactgtctaaagggaagttatattgtgaagaaggaacccaggagtgtgcagtggttagtcctattgcttggtctcctgagtccatggaaaaatacatccagaccttctgtttacctttcctcaggatcagcagccttcttcagcaccacctctttggggaagatctaccaagttgccaggaagaagaagaattttcagttcttgccagctgcctgggacttctgccaactttttaccaaacagatcacccgttcatcagtgcctcatgtctggactggccagttgcagcatttgacattgtaactcagtggtgctttgagataagatcatttacggagaggcatgcagaacaaggaaaggctttgcttatccaagagtcaagatggaaattaccacacctgctacagttgcctgagaattacaacaccatttttcagtactaccatagaaaaacctgtagtgtctgcaccaaggttcctaaagacccagcagtttgccttgtttgtggcacttttgtatgcctgaaaggactgtgctgcaagcagcaaagttactgtgaatgtgtgctgcattctcagaattgtggtgccggaaccggaattttccttttaattcaatgcatcagtgattatcatcatccgaggccaccgcttctgcctctggggttccgtctatttggatgctcatggagaagaggaccgggaccttaggcgaggcaaacctctctacatctgtgaggagcgatacaaagttcttgagcagcagtggatttcgcacacttttgaccacatcaataaaagatggggtccacattacaatgggctgtgacacacacctcagcattgcatatattatcattttcattgatattgatttatcaacaataagctttaatttaatttggggggattgatgtctttgctgagggattaaaaagaaaacacacattatgaagcctttccaaaattaggtgcttggtaaccacattaatgatataataatttttctcaagtatctggacaacaagtaagttaaatcattctttagtggtcattttttaagtgcacaattaataaaaagcacaacttgtccacaaaaatcattcgcaaatgattttccctataatgcccttatcagctcttcactgatagagtggatgtgatttgtttgaagtttactgctctgtgttttcatttgcatctgctaaacataatgcatctttttctttgtcatccttatattgatttgagatttttgctgtatgtaattagaaaaaaatgtaaaacatgatttatgtgaaatattgtatagtaaaaattggtctaatagtagaactttaaatttttttcttattgtgaggaatctgttaaaagtttaaggctttgctgaaaacttaattcattctcaggaatttcataaacgctttccctgggtaaataattgaattagctctaaaatagctgctgtccgtatagtgcagtgcactgggggagagactgagcatatgtgtggttggggaggtccttaaaaatgaaaatctgtgggctgagggtatagctcagtgatagactgcttagctaacattctcaaaacctgagtttcatcttcagcaccacacacattcaaaaaccaatttgccatttcaattgaatgaattattagagttgttagtgacaagtagattttacaataaaatcaaaagggttaagaacgaatacatggcagagttttgattctgtgcatgcttaccttttattaccaaccaagcttgtgtttctatgaccagattgaaaatgctcatttgtctcaacagatgaacttgaattctggaacttccctactgactgaagtcactgctacttctgtgtggtttcccaaagggggaaaggctcagagcggctaacccttgtgaatgagtcatgcttctgcctttagaaactgctgtgaagatcaacttatgtattaggggttttagttcagaatgagaatgactgagctaaaatacagtcagtaagagggaaggaagatgacaaaaaagcatgttttattgcttccaagtaattttttttacaggtgattcaataatttgatgattatttcacacatatatagtactatcaagcaattcctggtattttggatttccgtggcttgttatataaaattaaatttttacttgtaacagtaaaaaaaaaaattttggaatgacgtggcattacaggatatgaaagttaacataaaataatggcattgcattaaagtaagggaaacatagtagaacacactcagaggagttcagattgtcagaagattacctggagtgctttatatgtggaagtggcttgctatttttatatacatttccaatattaagataactttctgtaagaatgatttgttcaggtgaatcactgtccttccaacacctgctactttaaaaaaaaatactgtgttgtaagttcagctgttacctttttgcaccggtcattatgaatatcagaccatttgtaagtgtggttgaggagcaaaatgctaattacatctctagtaaatactgttacaggattcatggacttgaataattctacagtttggaactccgatgctatatatatatggtataatgtattcagactttgatcactacatatttaaatggaatgtttatggttgtgcatatggatgtgaagtgaaaatattagccttaactttaaaattttggatatttgatagtgtttattttgatattggtgaattagtcaccagtaaattttaaaaaagcacttggttgaaaattgtacttgaatacatacatgcatgctgctaaattagaacttccatttcccctaacttttataagtccgatttataaacccacttttaaaataacaggtccaagttagagtgatgtgtgtatattattcagaaacatgtactggtgtgatcttgtatgaatgatcatttaaatacagtacattactgtagaagcgaaatcaacctttataattaagcagaaattacaaaactagaaataagtgacgttgtaagatatgttaataaaacctactgtcatttgctttgtgcaagatcctta

SEQ ID NO: 10 - DNA, 4667 bp, Cricetulus griseus
ttcccaggtgccaacggagagaagggcggcagggggacacctggaaagccaggaccgaggggacagagaggcccaacgggtccgaggggtgagagaggcccacggggcatcacagggaagcctggtcctaagggcaactctggaggcgatggcccagctggccctcctggtgagcggggacccaatggaccccaaggacccacaggcttcccctggacccaagggtcccccgggcccaccaggcaaggatggactccctggacatcctggacagagaggcgagaccggcttccaaggcaagactggccctccaggacccccgggagtggttggccctcagggtcccacaggagaaaccggtccaatgggagagcgtggccaccctggccctccaggcccgccaggtccctcgggagcagatggtgagccaggtcctcgtggacagcaaggcctgttcgggcagaaaggagacgaaggctcaagaggtttcccaggaccaccggggccagtgggattacagggtttgccaggacctccaggagagaagggtgagacaggagatgtgggccagatgggacctcctggtcccccaggcccccgaggaccctctggagctccaggtgctgatgggccacagggtcctcccggaggaattggcaaccctggtgcagtgggagaaaagggggagcctggtgaagctggagagcctggtcttccaggagaaggaggtcccctgggacctaaaggagaaagaggggagaagggagaggctggcccctctggtgctgctggaccccccggacccaaaggccctcctggagatgatggacccaaaggcagccctggccctgtgggctttcccggagaccctggtccccctggagagccaggccccgcaggtcaagatggtccacctggagacaaaggggatgatggtgaacctggacagacgggatccccaggccctactggtgaacctggtccatctggacctccaggaaagaggggtcccccaggccctgcaggtcctgaaggcaggcaaggggagaaaggagccaagggagaagccggcttagaaggccctcctgggaagactggccctatcggcccccaaggggcccctgggaagcctggccccgatggtcttcgtgggatccctggccctgtgggtgagcaaggcctcccaggatccccaggccctgatggtccacctggccccatgggtcctccaggactccctggactcaaaggagactctggtcccaaaggtgaaaagggccatccaggcctgattggactcattggacctccaggtgaacagggtgaaaaaggtgaccgaggactcccaggcccccagggctcatctggtcccaaaggagaacagggtatcactggtccttctggcccacttgggcctcctgggccccctggcttgccgggccctccaggtcccaaaggtgctaaaggctcttcgggtcccactggcccgaagggcgaggcaggccacccaggactccctggcccacctggccctccaggtgaggtcatccagcccctgccaatccaggcatccaggactcggcggaacatcgatgccagccagctcctagacgatggggctggggagagttacttggactatgcagatgggatggaggagatctttggctccctcaactccctgaagctggagattgagcagatgaaacggccactgggcacacagcagaaccccgcccgtacctgcaaggacctacagctctgccatcctgatttcccagacggtgaatactgggtcgatcccaaccaaggatgctccagggactccttcaaagtctactgcaatttcacagccggagggtccacatgtgtcttccctgacaagaagtctgagggggccaggatcacttcttggcccaaagaaaacccaggttcctggttcagtgaattcaagcgtgggaaactgctctcatatgtggatgctgaaggcaaccctgtgggcgtggtacaaatgaccttcctgcggctgctgagtgcctctgcccaccagaacatcacctacaactgctaccagtcagtggcctggcaggatgccgccacaggcagctacgacaaggctatccgcttcttgggctccaacgacgaggaaatgtcttacgataacaacccttacatccgcgccctggtggatggctgtgctaccaagaaaggctaccagaaaacagtgctggagatcgacacgcccaaagtggagcaagtccccattgtggatatcatgttcaacgactttggtgaagcctcacagaaatttggatttgaagtggggccggcttgcttcctaggttaggagctgctgagcccaccggtcttcagagcaacttcgtgacctcagcaccccacctgtgggtgtcctgtgcacggcccatcctggacagtgaacatttctcacccctgcctgcctgactcatctgtgcctcggaccctccgtggcattggaccccacaccaatgagaacaaagggaaagagccgtgttcccacggagccgaatcacatgacctagccacaccacagcctcttgccacactgcagctctcctaataggttcatcaaaggtgttcgtgaactgttggccgggagtcagggtggggcagtatttggaaatcactttaaaaaaaccaacttgaaaatatgtattccccttgaccttcaaaagatgttctaaggtggtcttgtaaaggtcgccaaagccttctctttttttttttaaacaaccctcaatacatccactcagaggccaaatgtcattccacgtgtgcctttccgatggattaaaggtgcttatgtttttgtgagagttttaagtaaatatttgtattgtattgttataaatgttaagtgtgcctggctttcaatcttgcatggaaacccagcctcaggcccatggggagagcaagcagctgggacggggcaccagcttgggcttgcaatcaggctctccatagagggcatctcctcactatcaccctgcccccaagaacgtgcaataaattggaaatttgcttagtcagcaagaagctgcattgccactgcaggtgcctgggcccctttccagactttttatttttttctttttgattagctctggataattttttatggggagggaaaaaaggcatttgagatcctgccttttctacatgcactcagattaaaacacaggcttaaattaatcctgattgcttcctttttccgtgttccttcctgcagcggctgatgggacagtgtccagggctggagaaccacgtgttctagagatgataaataactatgaacattggtgctgatttttttacacttgtctcttgtggtgctatgtgtcctagggtgcctgccgtgccttcttcccccaccttcctttatcctggccatttctccacattctgagattttgccaaggacctaaagatcagattggtgccagagacctttcttccctgcaggtgccccgtgctcatgatggtggggagtctctgggctctgcttacttcatttgaaaacatgtgctcaaaacaaagacttgatacatggtacattgtgtatccatgatcgagttcagttgctgaatgtttgtggtgctaatttctgtgtgtgtgccaaggatggtatggaagccactgggtgcctgcactgatagccagactgccttgtgagcagcgggtggattgaaagatgtgcaatggactttgcggctccagggctgctgtttgggttttccaccagaggggtgttctgggtacaggtgtcagttccgggctcagaatggatccctctgcatgctgccctctccatcctcctccccttccaccacaagaaagctgtggtgccccagggagccagccatcataccccagtgttcctgtccccacaccaccccccaaagtgaaggaaaccacaaccaagcacccagaaatgaccaggattgatgaatgccaccaacatgcatccccaaagtttcctgaagaacaagttttactcttgccaaagaaaagtctggcctggagattcttcctgaaagccaggatgccatcatgagccagggactgctgcgcatgcctctgcatgagaaaagccatattggatgatggccatatgatgccctgtggattctgtgtaggtcatgtgattcggtttctgcctctctccccatctgattcatcctctcactctgtcccgttcttctgtcagtcccttccaagttacaatttgtattgaagtccaaaatgtgtcctgttctcctcagtccaccttatcttcaatattttacaataaaattacttcttatatttgcagaaatgctcctggcatcattttatgtttccattttctctggtgtgtgctctctctaattgggcaaatgctggcaaaaaatacacagggaaacgtaaatagaacgctatgataaaaagctataagacctcagaccctttaaaattccaggccaaaggatacactgtatatttcccagaagtccaaggggaagcctcaaattttaatttctccccagaagagtgctctaaaatatgtttaaactgtgtaacaaaggaacgattgtaacagtgtctcaataaaggagttactgtttacaccccagaaagaaaaaaaaaaa

SEQ ID NO: 11 - DNA, 4641 bp, Cricetulus griseus
tggcccaggccgtggctcgcattaagaagatttatgaggaaaatgtagcccaagaacagattgaaggaatggtcaaagacctgattaaccggatggactatgtagagatcaacatcgaccataaattccacagacacctcattgggaagagtggagccaacatcaacagaatcaaagaccagtacaaggtgtctgtgcgcatcccccctgacagtgagaagagtaacctgatccggattgaggggagacccacaaggcgtacagcaggccaagcgggagctgctggagctcgcctctcggatggaaaatgagcgtaccaaggatctaatcattgagcaaagatttcatcgcacaatcattgggcagaaaggtgaacggattcgtgaaattcgtgacaaattcccagaggttatcatcaactttccagacccagcacaaaaaagtgatattgtgcaactcagaggccccaagaatgaggtggagaaatgcactaagtacatgcagaagatggttgcggacctggtggaaaatagctattcaatttctgtgccaatcttcaaacagtttcacaagaatatcattgggaaaggaggcgcaaacattaaaaaagattcgtgaagaaagcaacaccaagattgaccttcctgctgagaacagcaactctgaaaccattgtcatcactggcaagagagccaactgtgaagctgcccgtagccggattctgtctatccagaaagacctggccaacatagctgaggtggaggtctcgatccctgccaagcttcacaactctctcattggcacaaagggccgtctgatccgctccatcatggaggaatgtggtggagtccacattcactttcctgtggagggttctggaagtgacacagttgtcatcaggggtccttcctcagatgtagaaaaggccaagaagcagctcctgcacctggctgaggagaagcaaaccaagagttttactgtggacatccgagccaagccagaataccacaaattcctaattggcaaaggaggaggtaaaatccgaaaggtgcgagacagtaccggagcccgcatcatattcccggctgctgaggacaaggagcaggacctgatcacaatagtggggaaggaggatgctgtccgagaggcccagaaggagctggaagcgctgatccagaacctggacaatgtggttgaagactacatgctggtggatcccaagcaccaccgccattttgtcatccgaagagggcaggtcttgcgagagattgctgaagaatatggcggggtgatggtcagcttcccgcgctctggcacacagagtgacaaagtcaccctcaagggtgccaaggactgtgtggaagcagccaaaaagcgcattcaggaaatcattgaggacctggaagctcaagtgacggtggaatgtgctatcccccagaagttccatcgatctgtcatgggccccaaaggttcaagaatccagcagatcactagggactacaatgttcagattaagttcccagacagagaggagaacccagttcacagtgtagagccttccatccaggagaatggagatgaggctggagagggcagagaggccaaagagactgaccccggctctcccaggaggtgtgacatcataatcatctctggacggagagagaaatgcgaggctgccaaggaagccctggaggcactggttccagtcaccattgaggtagaggtaccctttgatcttcaccgctatgtcattgggcagaaaggaagtggaatccgcaagatgatggatgagtttgaggtgaatatacatgtgccagctcccgaactgcagtcagacatcatcgccatcactggccttgtagcaaatttggacagggctaagacggggctactggatcgagtaaaggagctacaggctgagcaggaagatcgggctttaaggagttttaagctgagcgtcactgtagaccccaaataccatcccaaaattatcgggagaaagggggcagtgatcacccagatccgcttggagcatgatgtgaacatccagtttcctgataaagatgatgggaaccagcctcaggaccaaatcactatcacagggtatgagaagaatactgaagctgcccgtgatgcgatcctgaagattgtgggtgagcttgagcagatggtatctgaggatgtcccactggaccaccgtgtgcatgcccgcatcattggtgcccgaggcaaagccatccgtaaaatcatggatgagtttaaggtggacattcgcttcccacagactggagctccagaccccaattgtgtcactgtgacaggactcccagagaatgtggaggaagctatcgaccacatcctcaacctagaggaggaatatctggctgatgtggtggacagtgaggcgctgcaggtttacatgaagcccccggcacatgaagaatccaaggcaccatccaaaggctttgtggtgcgagatgctccctggacctccaacagcagtgagaaggctcctgatatgagcagctctgaagaatttcccagttttggggctcaggtggctcccaagaccctcccttggggccccaaacgataatgatcaaaaagaaacctttccagcctgctgcccaaacccaaccacacaatggtttgtctcaatctgacccagcagctggaccctcgtaaattgttgatgctctccccctccccgaggtctcgcagcaagcctggtgggctggccttgtgtggctgatcctccaggcctggtcagcgcccagcaggctcagggtctgctcctgatgctgtgctctgggacaggcacgccactgtgtgaaacactaagcaaggtatttgagcatttcgtgatcacagactccagcttctggtccacccagcatgtagtcagcactctgaccttcacaccagagctccacagcggctaggagctgacttcctgtgtcatgacctcaggaaataaatttccttgactttataaaagaccaaaacgtttgccctcttcctttcccacctccctcctgcccgccacctgtcgcccagaccttcctctttgtggaaagcagtcagcttcctttagctgtcaaaatctgcttagcacaggctacaggataggaggaaggcatggttttggacagcaagaggtcagatgtcctggtgatagagtgggcccaggggtagagggtggcctgggtcctcagtcagtagtgatgacacccactttgggttctgaaagcatcaggggcttctactgcagctccagcctcatgagctggtatatatatgtacccttagaggcacggctgtgtgtgtgccacctgggttccctgtggctgtcacagtggacttgagactttgggggcaagggaaggtagagactggcttctctttggtgggggaaggggcttgaccctaagtgacagctcagctttcccacaacctttggcctcttgttcagttgccttctttctacctcagccagtgtggtagtactctcatgcgtgggttagtgccgcccctcgagctcttctcttgatttagacgtttgtggtgattctgggcttgccattgagttgaggagggtgaaagctagtgcttctccacaggccacgtggtccaggggctggtccagagcagggaaggcagagtgaaagcaagggactcagtgcagggagcactgccagctgagggaggccttctctcgggtgcagggaagtaacttggaccactggccccagctagcagggcttcaggccagccctcaccaggaaaagtgatctgagcagaagtgtccctcttgtgttgtggagactgggaacaggtcttttatttccaggtcatctgatcaactagtaacatgtcctgtcccagatacttgggttcctagaaaagccaacctgtgcccatctcatggccttccctgggaactgtcacttctacagtgacaccttcccccaagtcttcactctccagttaataactcaggcttggctccctgtagactctaactcctaagtggatccagaattgcttctcaagtctaacttcagttccctgtagatgaagcagtcccacgtgtacccatttagaggaatggtactgaggtgggagagaacatctactttgctcagtaggctggcagcttgagccaggtctcttctcccgtctgcatgagactggggaccccttgcttcctcctgccctcctcatctttcttcatggtcatcctacaacatccagtctcttccttccccggaaggtaaagtttaaattatcaccacaggatttgcacatccccatttattgctaagtgctgtagctgtaaaccctaccctatactgttgagggcctcactccttttctctgattgttaataaggactatgaaattgactgtgcccaagtcacctccctgcagcctccacactgttgaggggtctaggcagggatggggagtgtcctttcctccttgttgaatgtcttccatgtcctatgtttccatagctacatccatcccttggccttaactttggaatttggagattatatgcaaacatgtgtaaaggctcatgaatatggatgacactggaattttataaattctaaaataaaacccgaaaccaga

SEQ ID NO: 12 - DNA, 4592 bp, Cricetulus griseus
ggcgtccggccgaggacgagggtcggcaggggctgcccccgcagtggtggcccgccatgcgtgggccccgggcagccgaagcagccgctgtggcgctcctccgactgctgctgctgttgctcttgccggagctccagaatccggggctcggcgtggtcggagtcgccgggccgggctgcccgagagcgtcatctgggcagtcaacgcgggcggcgaggcgcatgtggacgtgcacgggatccacttccgcaaggaccctctggaaggccgggtgggccgagcctcagactatggcatgaaactgccaatcctgcgttccaacccggaggaccagatcctgtatcaaacagagcggtacaatgaggagacctttggctacgaagtgcccataaaggaggagggggactacgtgctggtgttgaaatttgctgaggtctactttgcacagtctcagcagaaggtatttgatgtccgattaaatggccatgttgtggtgaaggacttagacatatttgaccgtgttgggcacagtacagcccatgatgagatcatcccaatgagcatcaggaaggggaagctgagtgtccacggggaggtgtcgaccttcacagggaagctctacattgagtttgtcaaggggtactatgacaatcccaaagtctgtgcactctacatcatggctgggacagtggatgatgtaccaaagctgcagcctcatccaggattggagaagaaagaagaggaggaagaagaagaagaatatgatgaggggtctaatcccaaaagacagaccaacaaaaacagggtagcagtcaggccccgcacaccaaacccctatgcctcggacaacagcagcctcatgtttcccatcctggtggcctttggagtgttcattccaaccctcttctgcctctgccggttgtgagaacaaatggtcatccgcagccgggtggagggagggggaaagaaaccaaacgtgttggtttcggtattcttgacagtgttcagcaaaacaaaacaaaacaaacagcgcactcacaaacacacacacacacacacacacacacacacaccacacacacaagtgaaaagagataagaagaagcagaatggtgggggcagcccctacccacccactggtcccagagctgctcagtcctgctctgcttgtggctgtcccccagctctctttttctctggggtatggaggtgagtggacccttcctctccaaggatccatattacagacctagtaggaaggactctgaactcagagcagtgacagtatcttcattgtcatttctcatctctttgacgtgcaccagttagaggactgtctggtatccaagacaactagtgtacgtcaggtcctcaaattgcctacaacttgttggccacaacaaatcaatttgatttcagtgcctgttgaggacttgatttcttcttgatttttctcttaatctggttcatttgaaatctctcctgacccagcagctctcactggcccctccatagggccttgctgccaggtcagggatgctttccagcctgcagcaacagaacacttgaccttaaaagtctcttctggtctttggattagaaaaggcttatgttagcaacctcagagactcgagccctgcaagtgactgaccactgttcagaatgtccagaatttggtgttcatttatccccatgtcctctgtcctacttcagatagtttgggtttattcccagagtcgccccagagaactaactaagactggctgcaccagcccagctgtttccttattgatgaccatgatcagacagccctcttagcccctagcaagtagcagtcaagttcttcttacactgggacagaaagacccctagtcagccatagttctggaggctctgaatgtcgtgtaactttagcatccaagtgtctatttcagattcccagtaaacactctgtaggggatgaagtctccttgttccccaacttttggtcacctccatccctttgtcagttaagacaacagtgagggacaacctggctaagctaaaaggcattttctaggtcagaggcagcagtatttgcttcagcttgagttggagcagtatagaatctcaggccaggcccatatttctagaatgtgtttaaattttgagtttgccttatcagatatttgaactctgtgacaaagtaagtagttctgggctcatgtcctgactttggctcctattgatgactccaggccagcatttagtcatttgagaaaggtcctttattttctctagatttaggctagccctagcatactgagttgccagctggatggctgtgacccgaagttgctggctttggttcctggtccatcactatttacaagcctgtgagccatgtcagtggagtaaacaagatgaaggagaacagctgcctctgtgttgccttgtttgcctgggtctctgaggaagggaagggtcctgcctccttaccccaactcatccctttggtgactcagagcctcagaaggaaactctgactcctggggccatttcctaatggtactgtaagccaagcgcctctgctctgcctctgtttccaagcccacccttcccgtagggatagggacggtgccttcctctctagttgtgtccaacggaggaacatctttctgtagctaacaaaactaaagttgaacttgaaagctttctccctcctccaagatgatgtaggtacatgaggtttaggttaaaagggttgggtggggcacactttatttttatttttgtattgtgtgtgtgtcaagaattactccattgttcatcttgctttttgcactctttgttcccttttctgtgttttgagctagtgcagagtttgcctggaattggaagctgtgaggttctccccctccctgggaactggggaaggacccaccctggtcagcacagtgccttttcctctcctgctctgagtcaggtgggcatccctaaccctctagattgaggcctgggcaggggtcgtacagtccctgccatggggctgttccctatctctccctctccttgctggcctactctgacataattcaagtgtcttcttgccttgaggaaccttaatgtaatcatggccaccacatgtgatacttctctatgactataaggacctaagagagcaggtgagctttctcaaatgagagactaacagatgctcctgctattaaaagacaaagctaggggggttactttgggcctcctgctgtggcccctgaggaaggcaactctcaggtaagactgagaatatacaggagcaaaaccacagacacccaggacctgctcagagatccgcagaagaactcggtctctcttctagggaggatgtaattagggatcaaagtgtgctaagaaaattgcaaagaagctttactgcccacaccagaaagctcagggtggctttctcttccaagtagagctaaaactatgtgtgtttggacttctcctggggtgagggttagctttgttcatgacaatagaagagtagcttagcactggtggtcagttgtccagggaggctgggttactttgtacgtttgtggcttgctgccgatctggtctatccttccccatttgcctcatttgctctgggtgtgagacatcttgataagagcagatttgggggctggctgggttggcaggaaaagagcagagtggatctctagggatgggttcctcccaggaatgtaaaaacaaggggccgtgattgtgctggcagccagggaaacagtagtgcctgctgaagttggcagagagggccttggcacacttgcatccaggcagtcttgtgcgatgggcgcacatagcatcggggaaaagcagaactccatcctcacctctattttgagcttagtgctttatttcagtatgagggaaaacaacaacacactgaagtgtgctttccgtccttgcaaaggacaactttcaggaaaggagagtggaggtgctgggtgggaggggagacttggcaaggagagaaatggatgtcgtggcagagtcaggaaaagagacattcttgcctcttctcttccctggtgtgccatgatccagggaatgaaaagaaatttgaccctggactagtccctttgttggagttaaggaacattacctttccacaaggtccccctgggataggatggctgtcactctaagctcagggcagcctcttcaacttctgtcagcccaacctggattgttaggaaaccaaccccacccctcagcattggacctgactgctttgtgtggaaccaagtattggagaaaaggcatcagatcttagcagctcctgtaactcctgctcttcctatcggccacaccgtgcattcacatcagtgcttggcaaggtatactcaaggggcttggaacctgctggccagggaagcagtaggggtggatagagctgtctttccttctgggctgtctccatcggtctctaccctttccatgccccaccccactcccaccaaaaaagtaaaaaatcaggatgtttttcactgtccattgctttgtgttttaataaacaatttgcagtgaaaaaaaaaaaaaaaaaaaaa

SEQ ID NO: 13 - DNA, 4587 bp, Cricetulus griseus
caacggtgactctataatagattggcttaactcagtcagacagactggaaatacaacaagaagtggtcagagaggaaatcagtcctggagggcagtgagccggactaatccaaacagtggtgatttcagattcagtttagagataaatgttaaccgtaataatggaagccagaccccagagaatgaaaatgaaacatctgctagacgtcttagtgtagaaaacatggaaaccagcagccaaaggcaaatggaaaacccagcatctgagacatcatctgccagaccatctaggtcagaacgaagttcaactgaaacattaacagaagtgccatccaccagaggtcagagaagagcaagaagccggagccccagaacaccgaagaacccgagccagagctgaaagaagcagatcaccctctgcacccaacaaatgaagttccacgaagatctcagacctcggagaaccctgtggtaaatgagactgagggaagttctagaacccgtcaccatgtgaccttgagacagcagataagtggacctgagttgctaggtagaagtctttttgcagcttctgggtcaagaaatgcctctcaagggacaagttcttcagacacagttagccatggtgaatctacagggcctggtcagagacctccaaccatagtccttgaccttcaagtaagaagagttcgtcctggagaataccggcagagagatagtatagctagcagaactcggtcaaggtctcaggcaccaaacaacacagtcacctatgagagtgaacgtggaggttttaggcgcaccttttcacgttctgagcgtgcaggtgtgagaacctacgtcagtactatcaggattcccattcgtagaatcttaaatactggattaagtgaaactacatctgttgcgattcaaaccatgttaaggcagataatgacagggttcggtgagctaagttattttatgtacagtgacaatgacccggagcctagtgcctcagtctccagtcgaaatatagagagaatagagacgcggagtggaagagggaactctggtggtaatagctctagttccggttctagctccagccccagttccagtggtgaaagttcagaaagtagctcagagatgtttgaaggcagtaatgaaggagtcttgcctggcccagtaggtggcaggagagaaggtcgacatagggctccagttgtatttgatgaaagtggctctttgccattccttagtctggctcagtttttcctcttaaatgaggacgacgatgaccaacccagaggactcaccaaagaacagattgataacttggcaatgagaagttttggcgaaaatgatgcattgaaaacatgtagtgtttgcattacagaatatacagaaggcaacaagctccgtaaactaccttgctcccatgagtaccacgtccactgcatcgaccgctggttatcggagaattccacctgtcccatttgtcgcagggcagtcttatcttctgggaacagagaaagtgttgtgtaatgagaacagaactctcagctgtgtagctggaatagtgatgggcaaacagaaatcacttgctttatgtccacttttttgagtggtgcttaaatataaagtcacaacctgaattgagtcattgctttctgagggaatcatgtcttttctctaatttctctttcaggatgcaaagaatatttcagaagcaacgttttaggacttaaatgtttgggttcggtaccagataattgctaacctgttactgataatttacccatgtacgcttgtctatttttccctttgttatcttaaggtctgccctagtagtggctcctttctctatcatgttgacctcttttgaaagtttcccaggccataagagaggcatgaagaaaattcccactcaagactaagttccattatgtgttttgtaagtgattaactaaaactataccattcccagttattgacacaaattcagtcacattctgaatattgtttgttcaccttccagaataggtgacatggacatatcagtgtaaataacactaaacagttaggatcttctaagtgtattaactgtcctaagcccatcactgtggcacacaatagagtgaacttatagtttaattgagatatttatcttgtggaaatattaaaaagcctatgcttgtgtaagtgaaaaaaaatcacattcatttgtttaaaatgtaaagctattttgtagaggctcagtacttttccaatgcactgttgtattaatgcattcaaaattgtaaagtaccatgcttagaaatgagaactgctttttgtgagccagcatagtaaaacaaacacaccaaacaaagtacgaagctgcttttctaagtgtgtagatgtcaagagcagaacatatctctatttaatgtattttgtgaacagctactgtgacatgagaaaaaaaaggaccatgcagaatcaaactgcattaaagaccaatggagatcatgcatttacaagtattgttagtgggatttgcttttttattttacaaagtccatgactatatattactagtgttgcggacgttaaagataaggttgttcgtataggtgtcaggtatacaataaaaaacaaatcttttccctcatcagtgtccaaacacacctatttttgagggaacattttctttcaaaagacttttacatttcattttgtatctttgcactttttctttattatggaaaggttctgtctttaagacctactttgaacttcatgcagtaataatgttgggagattacattgttcaaagcatagggaaaagtactacagtctgattttccttgaatatttcaaaggaggttttaatccgcttaatcagcataaaagtataaagtgtttgcagtgtttttattctacgcagcttacaatgttgagatttattagtgctgaaatattgaacaagttaaaaagtggcaggctatttgcagtaacactgaagagagctgtggtgagaatttggaactttttgtctccttggaaaacttcgtttctgtgccaagtatcctctgcttttgtcaatgtcttctctttatgaaagggtagcatttagcatgttttttatttagccacctgcttctatgactttcagtcagttctccaaatacccatgtgataaaagaggtcaaagttgcaaaatgactgttaaaggccatttagtttgctagaatgcagtggcaccttgtggttgacatttttttaacagatggagacttttaaaattcttttgtgtaaaggaaataatttgtaatatgccttagttgatttttaaatgttcttttttctgactggcttccctgttacacgtcttaccaaaaatatgcagtacatggaagccatgcctgcagagcacttagggtccttgctaatctcatgtgcaggagttactttttcaacgttttaaaatactgtccaacactccaggaagtggcctcatataaagtcaccataatttgtatctaaaagcctacagcttagaatagaattacagtgagatacttgggactttttggttttggtattttgagagggtctcatttttatagcccagcctggctaaaaaattagtgatccttctgatggctgggtttatgggtgtgtgtcaccccacccagtaaggatttgtttattgaagttccacagttgctttgtagtcatttgggtaagcagctgtctagagatgcgcagtgaaagtgaaccctatcatacatgccactgtgccttgcttcaaggtttttctcatttctcatcttgaagattgtttccagttctaatttctagccaagccagctgctcggccttaactctgctcagtgccctgttaactaacattttataacagattggtttttatatgtttaaactgtccagcatttggattttacctcttgatagctccatttgttcctggtgctgctttaaagtgtccagtggagtaggtacgcagttggcctggttgtggacctgtttgtcttctcccaggaaaagctactttggtatagatgtttacttgggttcctgtaaagaactgggcagcaatcctggaaagctctgtgaaacccataagaacctgaaaggatttggaaagggcagcccttaagtctttgaccataaagcacatgtgtgcatgctgtgtaaagactaaagtgattgtcatagcagggcttcctgacctccggggaacatttgcagaaagcaacagaggagcacaaagggaattgaatttgcttggcttgctttgtctggtttctcatttccttccatttaaatctgaacaaaacacccttctccagtatctgatccagcaaactcctggttgggaagccctgtattaaatttcgagaatgtacccaactttttttgtacattgctttacacctgctaaaatttaacttgtttcatgcagaacaagacattgaaaggtcattcattaaatctggtttgactattaatagctatcttttaggaagaagctttttccctatgtacaatgtcatactgcagacttaaaatatagactatcaataaaatgcatgaagt

SEQ ID NO: 14 - DNA, 4559 bp, Cricetulus griseus
  modified_base (1810)..(1810): a, c, t, g, unknown or other
  modified_base (1882)..(1882): a, c, t, g, unknown or other
gctaaaagagacagaaaaaaaagcccagacatctctaaactcccttaatgatctcacaaaggtggaacaggccctgcaagagaaaaaggcccttgatgaaatccttgaaaatcacaaacccacattacataaactttcagaagaaaccaagattttggagaaaaatgtgcttcctgatgtgggaaaagtgtataaacaagaatttgatgatgtccaggggacgtggaataaagtaaaggccaaggtttccagagatttacatttgcttgaggaaatcatcccagactcagagattttgaggctgactcagaagtcattgagaagtggatgggtggtgtgaaagacttcctagtgaaagagcaggctgcccgaaggagatgcagcaggactacagaagcagcttgaccaatgtgctaagcagaaaccaccgtgaatgtgctggcggatgcctctcagcgggagaatgctctgcaggatagtgtcctggccaggcagctcagacagcagatgctggacatccaggctgaaattgatgcccacaatgacatatttaaaagcattgatggaaacaggcagaagatggtgaaagcgctggggaattctgaggaggcaacaatgcttcagcaccgattggatgatatgaaccaaagatggaatgatttgaaagcaaaatctgctagcatcagggcccatttggaggccagtgctgagaaatggaacaggttgctggcatctcttgaagaactgatcaaatggctaaatatgaaagatgaagagcttaagaaacagatgcccattggaggggacgttccccgccttacagcttcagtatgaccactgcaaggtgctgagacgtgagctgaaggagaaagaatattctgtgctgaatgcggtagaccaagctcgagtttttctggctgatcagcccatagaggcccctgaagaaccaagaaaaagcctacaatcaaaaacagagttgactcctgaggagagagcccagaagattgccaaagctatgcgcaaacagtcagctgaagtacaaagagaagtgggagagtactaaatgctgtgagtgtccctacgatgtcatcaactagtctgacacaacatatgatgggcgttgaacaaattgcataaggacctggtcaacgttccactctgcgtcgatatgtgtctcaactggttactcaatgtttatgacacgggtcgaactggaaaaattaagagtgcagagcctgaagattggactgatgtctctctccaaaggcctcttagaagaaaagtacagatgtctctttaaagaggtggcagggccaacagagatgtgtgaccagcggcagcttggcctgctacttcatgatgccatccagatccctaggcagctgggggaagtagcagcctttgggggcagtaacattgagcccagtgttcgtagctgcttgccagagatcagtgtgaaggagtttatagactggatgcatttggaaccacagtccatggtgtggttgccggttctgcatcgtgtggcagctgcagagactgcaaagcatcaggcaaaatgcaacatctgcaaagaatgtccaattgttggattcaggtatagaagcctaaagcattttaattatgacgtctgccagagttgctttttctcaggaagaacagcaaagggccacaagttacattatccaatggtggaatactgtataccgacaacatctggggaagatgtgcgagacttcacgaaggtgctgaagaacaagttcaggtccaagaaatccagagcactatgacccctcacatccccccagcngtttcatgatgacacccactcaagaatagagcaatatgccacacgactggcccagatgaaaggcaaatgganctttcctgaccgatagcagctctaccacaggaagcgtggaggacgagcatgccctcatccagcagtactgccagacactgggcgggagtctcccataagccagccacagagtcctgctcagatcttgaagtccgtggagagggaagagcgtggggaactggagcggatcattgctgacttggaggaagaacaaagaaatctgcaggtggaatatgagcagctgaaggagcagcacttaagaaggggactccccgtgggctcacctccagagtccatcgtgtcaccccatcacacatccgaggactcagaacttatagcggaggccaaactccttcggcagcacaaggggcggctggaggcgaggatgcagatactggaagatcacaataagcagctggagtctcagctgcaccgcctcagacagcttctggagcagcccgagtctgattcccgcataaacggtgtctccccctgggcttcaaccgcagcagttctgcattgagctactcccttgatcctgaccccagcccacagttccagcaggcagcatctgaggacctgctggccccgcctcatgacaccagcacggacctcacagaggtgatggagcagatcaacagcacgtttccctcttgcagcccaaatgtccccagcaggccacaggcaatgtgaagcatccatctagccaaccaacatttcctgaccttcagtattgccctcttctgcaaatgccaattccaagtcccattcgacctgaagctccgtggctccatgacacttgctgttgagcgttgactgcgtgttctactgagggaataaaacactgactatccaaagagaaaggatattttgttttataaaacatatattattgttttcttctcccctttctatgcaactgtaaattagtgaacacagaagtatttggaggtggtaatgcatttgtcactgatttgtataatatatacagccatgggaaagtgggcgggggctttctaatatgaaaccgtctttttaataaccaagagaaaaattgcataagaattagaccactttgcattattacattccttctgctgctcatattaaccttgtacaataatttcattttattatttgactattttaccgttatattttggttatttataattcatcagccacacgaccaaatagattctgtgtatttgcttctatgatttggccaaattcctaagttcatatatttgaatcaaatatgttatgtatgtggagtaagctgcaattctgaatatactatttgacttgagttgacatcatccacttagccctttagtaaccattggatgactatggtaaaaatcctgtggactaattggcaaggctgctcgggtatttttcctcctgctttttattcctttcttgtaagtagatcttgatgtgtttatttatttcatcttgtaatctctaggggaaaaaaaagactctagtgtaatagtctcaaaaatcattttaccaaaggttgccatttaagcatattttcattttgactcgcaaacagaagttggtacagtgcagcctctcctagtaccttcaaccttggttttcatcataagaaacacagcgggcttttcccattgtgagactcgatcacaccatggacttcagtttcctttaaatagacttttattgttgcttgtgtattttcaagtcctttgtaagttttgaaagccctggttgtttcctttatgaaagcagacagatacttagtacctatctcttggaaacttctgggccaattggacagacatcataagacccctcacatgactagcagcacatctggggaggatgtcagtcacaagcctataccactgcttctccagaatgaaagtgatgcttggatgattgtgcccccgcctctgcttctgagtgccggtcaactaaatatttggttctggttctttttcttttctttttatttaacaaattaaattaattacaaacctgtagaaaaaccaaaaataaaagtaaagttaatatgttttgattcaaacatacgtgcttttaaaacatcaggacatgctaactttgggttctctttcgctgggatctggctagaaggaggctgaaagttagaaattgctattcttttaggattggttgggtgggttggggggcaagggtgtctatttgcagcatagatattttgagaagaagaaaactgttttatataagaggagagccatgatcacctttctacctcagagccaccttcctccatcgtgttggacatagctttatatgccgcagtgtgcaaagcctagggctttcatcaggccatttcatccccaagaaagcacctatttaaacaacatcaacaaaaaactccctgaactctgaaccccaggttgtagatttggtgtcttccttgttcttactttgagaagtcatgtattcttttatttttcctgcctgtgtttgtatgcaaaatgaactctatctgctattacagaaaaaactacacaaaacactacattgtaaccttctgaataataaataatattgcagtaaccacaatgaaaaatgagtgtattgttcttttgaaacatgtggtaaagaactaatcacagactgtcatctaatctggttacatattgtatttttcatcctgaataaaagtaattttaacacaaaa

SEQ ID NO: 15 - DNA, 4557 bp, Cricetulus griseus
cttgtgggacattatgtagaattttttgtagcaagaagactggagaagagattctgccagcttatttatccagattttacatgcttttaattcaaggtttgcagataaatgattatgtgtgccatcctgtcttggccagcgttattctaaactcccctcctttgttctgctgtgacttgaaagggattgatgttgtggttccttactttatttcagctcttgaaaccattttgcctgacagagaactctcaaaattcaaaagctatgtaaatccaacagaattgagaagatcctccattaacatcctgctttctttgttgcccctccctcatcattttggcacagtcagatctgaggtggtcctagaaggaagtttagaatgatgacagctcttcctatgtggagattgtagaactgggtatctcaggaagcaagtccaagaacagtgagcaagaggtcaagtacaaaggagacaaggagccaaaccctgcgtccatgagggtaaaggatgctgcagaagccactttaacatgtatcatgcagttgcttggcgcatttccttcacccagtggtcctgcctctccttgtagtctggtgaatgagaccactctgatcaaatactccaggctgccaaccataaacaagcatagtttccggtactttgtcttggataacagtgtcatcctggcaatgctggagcaacctcttggaaatgagcagaatgattttttcccctctgtcactgtgttggtccggggaatgtctggaagacttgcctgggctcagcaactttgccttttacccagaggagcaaaagcaaatcagaagctttttgtgccagaacctcgcccagttcctaaaaatgatgttggatttaaatattctgtgaaacatcgaccatttcctgaagaggtggacaagattccttttgtaaaagcagatttaagcattccagatttacatgaaattgtcactgaagaattagaagacaggcatgaaaaactaaggagtggtatggcccagcagattgcatatgaaatacacctggaacagcagagtgagggagaattgcagaagagaagcttccctgaccctgttacggattgtaagcccccacctcctgcccaggaattccaaacagcccgccttttcctttctcactttggatttttatccttagaggcattgaaggaacctgcaaatagtcgtctacctcctcacctcattgcactcgattctaccatacctgggttttttgatgacattgggtatctggatctcttgccatgtcgtccttttgacacagtttttattttctatatgaaaccaggtcagaaaacaaaccaagagattttaaagaatgtggagtcttccagaaatgttcagccacatttcctagaatttttgctttcccttggctggtcagtagatgtgggcagacaccctggttggacgggacacgtgtccaccagttggtcaattaatagttgtgatgatggtgaagggtctgaacaagatgaagtaaactcctctgaagatgctggggctagcattttcaatggccagaagaaggtgctgtattatgctgacgccctgacggaaatagctttcgtggttccttctcccatggagtccttaactgattctttggaaagtaatatctcagaccaagatagtgactcaaatatggatctcatgcctggaattctgaagcagccacccctgacacttgagctggttccaaatcacacagacagtcttaattcctcacagaggctcagtccaagttccagaatgaagaagctgcctcagggtcgccatgtgcctccccttggacctgagacaagagtatctgtagtctgggtggaacgctatgatgatatagaaaactttcccctctcagatctgatgacagagatcagcactggtgtggaaactactgcaaatagtagcacttctctgagatctacaactcttgaaaaagaagtccctgtaatcttcatccaccctttaaacactggattgttccggataaaaatccaaggagccactggaaaatttaacatggtcatcccccttgttgatgggatgatagtcagccgccgagcacttggctttctggtgcggcaaactgtaataaacatttgtagaagaaagagattggagagtgattcctacagtccaccacatgtccgtcggaaacagaaaatcactgacattgtcaacaaataccggaataagcagttggagccagaattttatactgccctttttcaggaggttggactcaagaattgcagttcttagagcacagtttgtccagggcagtggactgcagaatgggctcagacatcaaagcaagatagtcctgaaaaataaaatcgaatcactcccaagagctcactgttgaatcaccagaagaaacacgatgtgaagccactggttcgaggaccaccagctttctgatgaatggaccttgcacagtcacactcctgctgaaaatgacaagcattttagccataaactttcttttaaagtgacaattttagtaaaatacaagccttttgaggataaaggctttaatgcatcagttaaatacatgcattggtagtgtcaacaggcttgcaagttaggagctgaagatagtttatacctcgctttttaggagggtgtattcagagctaaaatcagtctcagaatcttccagaactttttaaggctcaagttgacactgtgtagaaggaatgaggctgcagctttgtcctctcgttttgatccatttgtcacctgtcacactgacagggtaaaccataaatgggttttgctcagttaagtatgacattaaaatatttcctattttctctccatatttaagcaagttgtccctctcattgccctggagatctgtcacatggcctcagcttcttagcaggcagatggaaatggaggcacagctgtgttctctaatggtgtactagtcatgtttgggttaaaagctgtgagattgtttcgaggtttcttttttttagatgtctctcgacctgtcctctgccaagtcaggcaataatctaatgtttccaggtgatactatggggtgaggaatggtaaaaattagtagtgggttttatcctaaaagtattctagtaactcagcaagaagaggtgaaattgaacaatctttaaaatgctttcagattgacacttcatggggaaaattggttcttgttctgaggtgaacaaagaatctatacatacacatgcaacttgtaacattccagaggctacaaataactgataaagatgtacttccttgctgtgattcttctgaaaaacttttactttggatgttgtttaaatgataccagaaagataacatatggggtgtatgtgttgggtgggcttactggcctttccccttcagttggctctaatttctaactttgtaattctgatgattttggtaagagaacaaccgtggcagatgcagtttgaaatctagggtatgtggtggttccctaagaaagaagggctacacacccctaggcagagaagtcctattgtgcacagccaacagactttggatgcacccctataactggccccctctgctccacacaccatctaccaccaaaggagtgcagtaagagccttgggcctcagagtgtggtttggaatcctgctcactgagttcatcctcctgcctgcgctaagatcactttgaatagaatcttgtcagaggaacatacttagtacctacaataatcctagtagttcacttggtaaatttgccagcacaggttcagaaactttgggtaaacactggaaccagtctggactgtggcttaaactgctcagttgctgtatgtggatgcccaggcaccactctcatggcagcagttgtcccttagcatttaaagcctgttcaagatggacagacctgtgttaacagtgaccattggcatccactggtctgttcccagcactccctgacataccctcttcctgagggatccacctggacagtggggtcactgctcttgctgctggcagagccatgcactgcatagggttttctcagaatagccactcttgttcttcagacaagttttttaatgatgaggaaaatgtgtaatttgggattccacagtgccttgcatacagtaggcgcccaatacctatttgttgaagcaaatcaagttctttgtccccacagtgtccaaggcatcttcttctgaagggcttggcagttgtggctaaaaactaagtatcattatttgctcgaaaccatatttacaatttgtatgaatttcggtatattgccaagatgggatctttttcctattgtattttctgttaaatatttctgccactgatctgtaaagtaaaggagatgtaaatatgaaggtgtgctgtgtccctcgctgcctgtgttgggtctgtgtcagcctgggaagaaggtacagagccgttcttatttatgcctgtcctccacccacaagagacccaaggggtattgaatgtaatatatgtggtcaattaaattttaaggagcttctta

SEQ ID NO: 16 - DNA, 4536 bp, Cricetulus griseus
  modified_base (1414)..(1414): a, c, t, g, unknown or other
aggcttaagacacctgaagaacatgaactggagactggaataaagtcaaaagaagcccggaagtacatttttaactgtttagatgatatggctcaggtaaatatgtctacagatttagagggaacagacatgttggcagagaaggcagaccggagagaatacattgatctcttaaagaaatgacgattgatgcagataagagaatcactcctctgaaaactcttaaccatcagtttgtgacaatgtactcaccttctggattttccacacagtaaccatgttaagtcttgtttccagaacatgggagatctgcaagcggagggttcacatgtatgacacagtgagtcagatcaagagtcccttcactacacatgttgctccaaatacaagcaacaaatctaaccatgagcttcagacaaccagctacaacacagtgcacaatcaggccagtgttctagcatccagttctactgcagcagctgctactctttctctggctaattcagatgtctcactgcagatacagtcaggagtacttactcagggaagctgtacaccactaatggtagcaactctccaccctcaagtagccaccatcacaccgcagtatgcggtgccctttaccctgagctgcgcagcaggccggccggcgctggttgaacagactgctgctgtactgcaagcctggcctggaggaacacaacaaattctcctgccttcaacttggcagcagttgcctggggtagctctacacaactctgtccagcctactacagtgattccagaggctatggggagtagtcagcagctagcagactggaggaatgctcactctcatggcaaccagtatagcactatcatgcagcagccatctttgctgactaaccatgtgacgttggccactgctcagcctctgaatgttggtgttgcccatgttgtcagacaacagcaatctagttccctcccttcaaagaagaataagcaatctgctccagcctcatccaaatcctctctggaagttctgccttcccaagtttattctctggttgggagcagtcctctgcgtaccacatcttataattccctagttcctgtccaagatcagcatcagccaatcatcattccagatacccccagccctcctgtgagcgtcatcactatccgcagtgacactgatgaagaagaggacaacaaatataagcccaatagctcgggcctgaaggcgaggtccaatgtcatcagttatgttactgtcaatgattctccagattctgactcttctctgagcagcccatattccacagacactctgagtgctctccggggcaacagtgggtcacttctggaaggacctggcagaactgccacagatggcactggcactcgaaccatcattgtgcctccattgaaaacncagcttggcgactgcactgtagcaacccaggcctcaggtctccttagcagtaagactaagccagtggcctcagtgagtgggcgagtcatctggatgctgccactcacccccaccacaggtaccgagctcaacagggggaccgagcgcggtgcagccactcaaccttagccagaaccagcagtcatcgtcagctccaacctcgcaggaaagaagcagcaaccctgctccccgcagacagcaggcatttgtggccccgcctctcccaagctccctacgccttccagcatggcagcccactgcactcgacggggcacccacatttggccccagcccctgctcacctgccaagccagcctcacctgtatacgtatgctgctcccacttctgctgctgcactgggttccacaagttccattgctcatcttttctcccccccagggttcctcaaggcatgctgcagcttataccaccaatttacactggatacccgctgagtcctaccaagatcagtcagtattcttatttgtagttgagcaccagggaggcttcatgctgcctgctactggccctgagttcttagtggactctggtgagcacctccattatcttctcttgaaagttcctagccagcagctcgttctgcaggggcccactgaagcagaaggcttttctctagagaaccattctcagtgttgactgcattgttgtagtctcccaagtctgccctatttttaattctttattcttgtgacagcatttttgaacttttggaagagctcagaagcccatcttctgcagttaccaaggaagaaagatcattctgaagctaccctctgatgtacattctgtctctttgacttgatttctaagaaattgctactttaaaaaacaagtgaaagctcttctttaccatacaatagtatgcagaatctctctctaggatgagatactggcactggtgagctttgcctaagatttctatgaatttcattaatatgcctctgtttcctcatctcccccttctgtttcatgtgacttatttgaggggaaagctaaagaaactaaaaaccagataagttgtgtatagcctttctactttaaagtagcttcctttgtatgccaacagcagattgaatgctctcttattaagacttatataataagtgcatgtaggaactgcaaaaaatattttaaaagtttattactgaatttaaaaatattttagaagttttgtaatggtggtgttttaatattttgcataattaaatctgtacatattgtttgttttaaaggcttttaacagatgtgtttataccaaagagcctgttgtattgcttaacatgtccccatactacgaggagggttttatagagcttctggtgacaagaagctcacagaaaagcttctgagtcagtgaggaatattaaaaagaaaccaaagcctcttgaatcaccaaggtttttgaggtttctttgtaacaacatgtacattcttggggcccttcaagctgtgaaattgtcctagtattcaactcctccatggatttgggtcaagttgaaggtactgaggatgaggatattcctgcccatgaaggatttgtggggagaaggttaaccctaagctacagatgtgttccacctgaattgaaaattacatttgagtgataattctaggattggttctgtatagagatggtgtcagggaggtgcaggatggagatgggagatttcatggagcctggtcagcaagctctgaaccaggtgaaacactgaggagctgttgacgaattcagagtttcttcatcatggggagtaagggtttccagggcggggtaagtagtcagtacagcctgtcaggagcatggtctattttctcttttctttaatctattaagctgtgcattcagcagtctgttggttgagacaaccacgaatttgtgtagtttgtcactagtgttaaacagtttaagtcagcgtgtgtgtgatttttgtgtctccttttcctcaagcattctggttttcttgtttaaatatagttctagtttctagtcggaacatttttgtaccttatctttcctctacaagggacaaaatttactggttttgtaggaatgagatgcagggaaaaagcaaaccaacccccccaccctgcccccctcttctaataagcagtttctgaagatgggagtcttaagtccatgggagaagagaatgccgctgacctggatcagcattgcttgaccttggaccagcttaaggctttaaaccctctcttagaacttgcgtttccgccttctccctttccacatgagagtaaatggaaagggttgcatagagcctcgaaggcacaccaggacacacaatcactccagagttcccagttgttcctaggagttgattattagccaggcaagcacggtaaaatcggtgttttattctgcattcttatgcagagatctactagttgagatggtttgttttaggataggaaatgaaattgcctctcagtgacaggaatggccaagcctgctttgtattttgactttttttttaactgatggatggtgcagcatgtcttcatgtctccatggttgtttgttgctaaactttatataatgtgtggtttcaattcagcttgaaaaataatctcactatatgtagcagtacattatatgtacattatatgtaatgttagtatttctgctttgaatccttgatattgcaatggaattcctactttattaaatgtatttgatatgctagttactgtgtgtgatttaaacttttttttccccttttccctttcctagttgtgtgcttccttttacaacaagcttctagaaacagttctgagaattactgagctatgtttgtaatgcaggtgtacttagggagtatgtaaaataatcattttaacaaaagaaatagctatttaaaatttaatactaactatgggaaaggggtccattgtgtaaaacatagtttatctttggattcaatgtttgtctttggttttacaaagtagcttgtattttcagtattttctacataatatggtaaaaagtagaacaattgcaatgcatcaataaaatgggtaaattttcaaaaaaaaaaaaaaaaaaa

SEQ ID NO: 17 - DNA, 4491 bp, Cricetulus griseus
tagcgctcgggcgccatgttaggacgaaggggaaggaggagaagcgcttaaagcggcggggcgcgggtgcgggactgggttggccctggggctgaggcaggcccccgtccctcccgcctcggtggatcatgcccagggcggcggcggtcggcgggggggaagtgactgggcggtgccggcgccggagacgatgccgtttccagttacaacgcagggatcacaacaagcgcagccgccacagaggcactatggcattacctctcctatcagcttagcagcccccaaggagactgactgcctactcacacagaaactcatcgagactctgaagccctttggggtttttgaagaagaagaggaactgcagcgcaggattttaattttgggaaaattaaataacctggtgaaagaatggatacgagaaatcagtgaaagcaagaatcttccacaatctgtaattgaaaatgttggagggaaaatttttacatttggatcttatagactaggagtacatacgaaaggtgctgatattgatgcattgtgtgttgcaccaagacatgttgatcggagtgactttttcacctcattctatgataaattgaaattacaagaagaagtaaaagacttaagagctgttgaagaagcatttgtcccagttattaaactctgttttgatggaatagagattgatattttgtttgcaagattagcactgcagactattccagaagatttggacctacgagatgacagtctacttaaaaacctagatataagatgcataagaagccttaatggttgcagggtaaccgatgagattttacatctagtaccaaacattgacaacttcaggttaactctgagagccatcaaactgtgggccaaacggcacaacatctattccaatatattaggtttcctcggtggtgtttcctgggctatgctagtagcaagaacttgccagctttatccaaatgcaatagcatcaactcttgtacataaatttttcttggtattttctaaatgggaatggccaaatccagtgctattgaaacagcctgaagaatgcaatcttaatttgcctgtgtgggacccaagggtaaaccccagtgataggtaccatcttatgcctataattacaccagcatacccacagcagaactccacgtacaatgtgtccgtttcaacacggatggtcatggttgaggagtttaaacaaggtcttgctatcactgatgaaattttgctgagtaaggcagagtggtccaaactttttgaagctccaaacttctttcagaagtacaagcattatattgtacttctagcaagtgcgcccacggaaaagcagcgtctggaatgggtgggcttggtggaatcaaaaatccgcatcctggttggaagcttggagaagaatgagtttattacactggcgcatgtgaacccccagtcatttccagcccccaaagaaaatcctgacaaggaagaattccgcacaatgtgggtgattggattagtgtttaaaaaaactgaaaactctgaaaatctcagtgtggacctgacctatgacattcagtctttcacggatacagtttataggcaagcaataaacagcaaaatgtttgagttggacatgaagattgctgcaatgcatgtgaaaagaaaacagctccatcaactgctgcccagtcacgtgcttcagaaaaggaaaaagcattcaacagaaggggtcaagttaacagctctgaatgacagcagcctcgacttgtctatggacagtgataacagcatgtctgtgccttcacccactagtgctatgaagaccagtccattgaacagttctggcagctctcagggcagaaacagtcctgctccagctgtgaccgcagcatctgtgaccagcatccaggcttctgaggtttctgtgccacaagcaaattccagtgaaagctcagggggtcaatcgagcgaaagcattcctcaaactgccacacagccagccatttctccaccaccaaagcctacggtctccagagttgtctcctcaacacgtctggtaaacccatcacctagaccttcaggaaatgcagcaacaaaagtacctaatcctatagcaggagtcaagagaacatcctcaccccataaggaagaaagtcctaagaaaaccaaaacagacgaggatgaaacaagtgaagatgctaactgtcttgatttgagtggacatgataaaacagaaacaaaggaacaagttgatatggagacgagtgcgattcaatcagaaactgttccggcatcggcttctctgttggcctctcagaaaacatccagtacagacctttctgatatccctgctctccctgcaaatcctattcctgttatcaagaattcaataaaactgagactgaatcggtaaaaccacctcagggtccataaacagtatctgccaactcaacctgttgtcttcagatgacttaaaaaaaaaaaaaaagaaagaaaaaaaacaaggagaatggagggtacaagactagacatgactgacagtggatttagggtttggtgacctcccttacttgggttcatcagcacttgctcagaggtccaggttagtatgcgaagccaggagtacgattattactgtgttagcaacagttgcattaactatttcagaaaaattactgcctttaagaaggaagaaaaacaaaaccctcaagctgtgtttgtatccataattgacatccggattgggtttatgtgtgatgcattgtttggaaaatttgcaatacaaactggcataagaactccttattctgatgatgcacttttatgtatttttttattagaaagtagaactaattttagattttcagcttaatggattttcatttttttttcccaaagaattttctttacaattagtctttaaattggatgccttgtgctgtggtgtactgctctgcctcagagaggacaagagagcccctagctccgtcctgaagaggcattgtgacccttagggtaaattgtcaatgctaaggtatactttggacactgaaagaaaaattaggagacatttggctttgatggggttatgattaacaaatatatattccttttatttatagaggtgttttatagtgcatacagatcagcagtctgccaacagtctgttccttgagctttctggagctctgttttgccttcagtttcttctcttcaaaacaacgaaagcgcttcctcttccccccctttgccttttttgcctttctttttccccctttgcttgtatacacaaggtaaggcttgttacgcagaaaccagaatgccagtattttcctaagccgtgacgtgaaactggtgaccctttagctacacggcacagaacactacctttggtcccatggctggaacttgagaatgactgaaagccatacctgtgaagcatctcgcaaggattgccatttgatctttaagaggatttttgtacactccacagaactctgtcttagacaaattgatttacaattttaaaagtggacaaaaaggcattttcttccagatttttaaagtaatttttatttttaaccagtttatcaaaatttgtcagtgaattttacatacagaaacattttaaaaatcatttctagcaagcacttgacttttagtcagctctccacttttgaatttttttgttctatcaaaaaattagaaacctcatttaaagacaataatttctcataattaagtagcagaattctcgtcattttttgtgacgtctgagggatgccagatgttgataaacttattctttgttaatctggataaagcaaaccagtagcatcagatctttatgtgagcatgggtttttaaatcctctgtctcgctgcattctatcacacgtttgagcattctcatgttaaactgcaattacttaaactcttccctgtccttctcaattaatttccaaagttggagaatagtctttccccttaagctatgcattaattaaggctttctttttaccacttacattgtttataaacagtatttctactctccacctcttgctctgcagtcaccttgcccttccttcaaccacttgagtaaagaagacggtctgctaacaggtgacgtgtaacggtgtccgtgtgtgtagccagagttagaatgacatcaccaggcacagaattagtcttgtcgttttgtttacacattggggaaaaattcagtttaataaacgttccatgtaactgcatccaagtttcaccaggctggagccgtggatcttttctgtgtagtgactttttaattctagttttcataacctggagatcagactgttgctttcgcatgatgtaagtagtgtctcatgactgaagtttgctttgttttatagtatctgtactccttgtatttttcaagagctattttgtaaacagatgatgtatttctccattgaaaacacaataaaaaaacaaacagcacaaaaaaaaaaaa

SEQ ID NO: 18 - DNA, 4478 bp, Cricetulus griseus
aggaagacactctgtctgatgttgttcctcccagagatatgtccttatatgcctcactcacttccgagaaagctcaaagtctggaaggagagaagctctctccaaaatccgatatttctccactcaccccacgagagtcctcacctttatattcacctggcttttcagattcaacttctgcaaccacagagaatgcagcaggtcgacaaacctcttccccaccaatggatgccgcatctgcagagccctatggcttccgtgcctcgatgttgtttgacacaatgcaacatcatctggccttgaatagagacttgaccacatctagtgtggagaatgaagagtccactgaagattctgagaagcccctcgctgagtccggaggagccctccaccttcaggaggaaagcaacagggccgacaatgtgatgaaactccacccacctctgtcagtgagtcagccccactcccacgactgactctgactgtccccccacgagacggaagagtgcccctccatcacagctgatgccaacatcgactctgaagatgagtcagagaccatccccaccgacaaaactgtcacatacaaacacatggacccacctcccagccccccactgcaagacccgaagcccttctcctcgccaccctgatgtgtccatggtcggacccagaggccttggccattgagcagaacctaggcaaagctttgaagaaagacctgaaagagaagactaagaccaagaaaccaggcacgaagaccaagtcctcttctcctgtgaagaaggctgatgggaagtccaagcccttggcagcgtctcctaaaccaggagccttgaaggaatcctctgacaaggtgtccagagtggcttctccaaagaagaaagaatctgtggaaaaggctacgaagaccaccaccactcccgagatcaaagccacacgtggggatgagaaagacaaggagactaagaatgctgcaaatgcctccgcatccaagtcagcgaaaaccgcaacagcaggaccaggaaccactaagacagccaagtcatccaccgtgcctccaggcctccctgtgtatttggacctgtgctatattcccaaccacagcaatagtaagaatgttgatgtggaatttttcaagagagtgaggtcatcttactatgtggtgagtgggaatgaccctgctgctgaggagcccagccgggctgtcctggatgccttgttggaagggaaggcccagtggggaagcaacatgcaggtgactctgatcccaacacatgactcagaggtgatgagggaatggtaccaggagacccatgagaagcagcaagacctcaacatcatggttttagcaagcagcagtacagtggtcatgcaagacgaatccttccctgcatgcaagatagaactgtagaaaccacagccggccacaccacaggatttgaactttgtttccagaaattcttgaatttgaaactaccttttctaaaacgtccattcatctaattaagtcactgaacaattacctgccaaatgctatactgtgtcatggtgatgcaagtcactgatatttctcaatttttgctgatcgctaagggaagtaaccatattcccacactagaattcaagttactgcaaaattacctaacccctgttcaatctctgctgaacatttggaagccatgcactcgcgcacccaactgacttctgctagactgaagcaaataccaaagcaggtgggagtaaatatgggagacattttgccttaggaagtgacttgaatagtacaaaaagacacttgatgcacttattttttaatgtgagacagcaagtttttaaaacatccatgtaggattgtagatactccaggtagaggagcgtgtggggagggaaggtactggaagctcatgcgattggtccaacagtttagtgctgagtcatgcttgttgaataccaccattactgatgcacctgtggcccctcagccaaacacgttgcgcctcttacagcttctttaactacttcaagatcgaaaatggcttctatgatcagaactgggaaaacagtgaaccttatggtggaagaggttcccagcaagtgtacagtatttgccttcctttgtcttgctttggctattttaattttccactcattttaacacagtgatgggaacacatgcaagtcccaagtggctgattcatgtagcggggttcagaggtggcacccttctcagcaacaactgtgctgtgctctgtcacactacatttcctacagactcttaagatctacagagtagtgaacaatgacctcattttattttctatgttagttatttatttcagaatttacattttagtttattttcgtctgtgaagtatatgtttcgcactgctatttcctctgagggtttaaacaatgcttctctagggtcccctcattgaggacccatgcagtctacttaaagctgtgaatcacattttccaaatgtttaatttttaaagaaaattaatattctatttttgttaggcgtctctaggaatgcagtttttatttattatcctttttctttcaaacccgtaaaagtaacacattaaaggtacaaaaatgtcatatatgatggaaaagtcattgtgatgaaaacagacttcgttgactataaactcatttgcttcacacttcatgagacaagctgaatatagttaattaatgatagctgttcgatttgtccgaataacgaatgagaaaagaagcagtttctagccttcttaccaaatccagaccgctggctgacttttctttcatagaagatggagttactttccagtttcccaaattaaatttatttagcctgtatattattttgttttaaagatacagatatccaacaagagccatagccagccttcagttacaaccactctaccccatacttgttattgttatttctacagaatttaatggggacaatacttttcaaaactgtcatcaattcactggctctgatttcctacacaatctggcagcaccctcctgcacccccgttctcagtgatggccatggagccaaggacaccagggtgaactacctttgctttacaggtgattcctgatgtcccaagtacctctcctacctgcttggctaatctgattttgctagttccatacatacacaattagtttagaagtagccatcacaatggaccatgtatatttgtggtgagagctaaaaaccgacacagacttctagaagatttgtgcatatgattcttaatccaattgtatagattgaatatttgagtggaagggatttccaccctctttaaatgatgggattctattgagctagcactccctttgatcatgacctttttggtagtgtttgtaaacaaaattccacagagactaaatcttagagataatcctccattccaattttaaccaattctgtcctctttccaaaccccaattcccatgcatgctttctcagtcttgtggtgggactggatacagtgaccgacccctcaccccaaacaccatttcccatggaattcaaaagaaaaaaattttttcttatcgttacatatcatagtgaatggtttccccagtgtatatggatgttttaagtgtttccaatagcttatgaaatttaggagctttctaatacttattttataaatttaattatttgctaatgaaaattttaccaccttccaattctgttaccaaactcagctcctgagagcgaaactacaattctggagttgcttttcttgcctcttctgtcacctgtcacaagaggttcctgcttggcaatggtatttgtgagttggaataatgacttttctttcttttttccttttgtacttcatatttaggagaaaagattctgtttccatgtgaaaggaactgtaagcttttatcatttaaccagctgaacaacacatcaaaagcagcctagggatgagcaacgctttgatagcaattaggttttcttcacctggtgttaaaactattcactatttcaaaacaaaacaaaaactgtgactttatgaattcatttcaaaggcagcatcaaaaactgaaaaggaaggaaaacagcaacagctaagaatcggcttctccgcagtgtggagctccccaaaacaggagccctggagaagtggctctgctcagctgccctcaccccagcgatggttccgagtcttgttttcctgcactgcaggcagcgtacagtcccgggccggctgtggagaagcagctcactcctctctcttgttctgaatggtgtttgtgtcggtctgcagctgtgtatggtattatgtcttataatcctgcatcacttccatcctatccagtcatatctaatgtagaaaaattagtttccagtgaaagtaatatgtagtgcttttatgatatttgtgtgcaatatcccctcttccattgaggatatttgatgtaaaggaaaaaaaaaaaaaaaaa

SEQ ID NO: 19 - DNA, 4458 bp, Cricetulus griseus
gaacgagcagcgacctgagggtccagggagcgaggaggagccggaggggagtgctcgggcgcgagcgagaggacgcgcgagcgccgggctagggctcgagccccggaacggctgaggagcccgcccgcggccctccctcccccctcctcctccctccctacctccctcccactatatcaaataagcttgacattacagccaaaatggtgctgtcccagagacaacgagatgaactaaatcgagctatagcagattatcttcgttcaaatggctatgaagaggcatattccgtttttaaaaaggaagctgaattagatatgaatgaagaattagataaaaagtatgctggtcttttggaaaaaaatggacatctgttattagattacaaaaaaaggttatggaattagaatcaaaactaaatgaagcaaaagaagaatttacgtcgggtggtccccttggtcagaaagagaccctaaagaatggattccccgtccaccagagaaatacgcattgagtggtcataggagtccagtcactcgagttattttccatcctgtgttcagtgttatggtctctgcttcagaagatgctacaattaaggtgtgggactatgagactggagattttgagcgaactctcaaggggcacacagactctgtacaggacatttcctttgaccacagtggcaagcttttggcttcctgttctgcagacatgacgattaaactatgggattttcagggctttgaatgcatcagaaccatgcatggccatgaccataatgtctcttcagtagccatcatgcctaatggagatcatatagtgtctgcctcaagggataaaactataaaaatgtgggaagtgcaaactggctactgtgtgaagacattcacaggacacagagaatgggtacgtatggtgcggccaaatcaggatggcactctgatagccagctgttccaatgaccagactgtgcgtgtatgggttgtagcaacaaaggaatgcaaggctgagctccgagaacacgaacatgtggtagaatgcatttcctgggctccagaaagttcatattcttccatctctgaagcaacaggatctgagactaagaaaagtggcaagcctggacccttcttgctatccggttccagagacaaaaccattaagatgtgggacgtcagtactggcatgtgccttatgactcttgtgggtcatgataattgggtacgtggagttctgttccattctggggggaagtttattttgagttgtgctgatgacaagactctccgtgtatgggattacaagaacaaacgatgcatgaagaccctcaatgcgcatgaacactttgttacctccttggacttccacaagacggcgccctacgtggtcactggcagtgtagatcagacagtaaaggtgtgggagtgccgttgattgagtctcacttggttctccctcctttcctctggatgcactctgatgataccatggttaccccatttgagctctgtttaaataaatattgtcctttcatgtaaattattctggatgtagattgagcttattaaatgttacacacaaagtattcatgcatggtgaatccaaattgtatactgtaaatttacatatgttgtctagaagtaccatagggtttaaaaacctgggctggcattggtcacaccaggcctacgagggcagaagttgaataaattgaactagggcactaaactgaatagttgacagtgtcattttatgttggtttattaattattgtttttcttcctgctatctgttggtgcctgacttgatggcctcattttgggaaaagtggtggttattagggctttttctgaaatgtgtatctatgtaacatcacttaagtgtgcttaataaatctttaagggtgttagataaataagactacaattcagaatcttttgctccatctgtgtaattaatggggattacacattgaaggttttgtcatgacccctttgccaaatcaataggatatgtttgtttggcagcctgtcaagcaaaggctagtggtatatttatgtaaagaaaatgatcgtaactcaagaaaaatctcagcagctaatagtgaatccttttttatttgggtcttaactgctttagtaaactaggtcaggaaaacactgtcctactctaagcttctccccacactagacatacttggagttgtattctccatactgttggactgtgtagtgatgtgactccccagtagaatttgatcttcccattgagtgtcatggtacaaatcgctatgtgtttatgatgtttttagggatgtgcaatgtacatttcagaatgacaaatgctgacaaagttgcgtgcccatttttaaggagcaggagaaacagcagtttccaacatgaacctgataacaatttgaactgcttcacttaaagttataaaaagtgacagggtttaatgaagcgtgcatagaaatatacttgtttatatgtaaatgtttataagtatatggacctatctataagtggatatgtctatatatgtatatcacacatataacctccatgttgttgggtcttgaatttttgaagaagtgctaaatcatacaagtagaataagctttgctgtggagtaccactcacagccatgctttaggataaaccaattctgatgctctggcttttctaaaactaaaagaaaagccgccttctttattctccactctaatgtggccattcaacattttacacatccttgatatgttgtatattttgatccaaagttactactacgtagggttaagaggtatttttaattaacttttttttctttttaagaaaaccaactagacatcatttatagaaacaagaatggtaccaatgtagaggagcaaagctgctgttctgggtttcctcctctgctgcagcgactcactgacaacataggagggagtgctctgtaacaaagctgtccttacttgggagattgtcacagcctgctgcttagctgaattatcagacatcctctacttaagcagcagcaaacattgaaatctcagggatggtccacagctggatccaaatgtaacgagccctgtttgagtaatgtggggggggggcgaacatccacatttggcgtccaatttgacaaaagtttcttgcactgttgtttgacactgccctgttgatgcccttactcttatgttactgttttctctgtctgctgtctaaccctgtgccttgcctgggataacaacaatgataaagttactggtttcggttataagtagaggtttttataaattggttagcgtttcactgctgctttgttactttctggagtcagattggccacttattaagaaataaaaagctggtataattgtgtcctaggatgattgttgactgtgtgtgtaaacagacattccagtgccacctatagcacagcgtgcccaagaaatcctaaccgcatggaaagtgcaagctgcaggaaggtttgtgtagacatggcctggagaatagttgtttttggtttggcatcttgcactttaggagaaagaccgtcctgtctgcatgtggtgtgaccaatgaatgatgtgtgcttagagcactatccacaattgctagtgttagcaaccgtcctgggccatggcacactgtaggcctttggaagctttggctctaggctcaccaagcccagtcttctgtttgcctctttgtttccatgtgaacttccagataataccactcactaaaagtttatttttttgtttttagttttttaaattaaaagtaaaaacttatttaaaaataagactattttgttgacagtggtggcttgataatccttaagcaactgaagttgaaatggaaggaaaaggcacttaaaatggttactcctactgtccagctgtatataaactcaatgtgttggttaatctagatggtgcaaagaagaatgtcctggtagacaagcaacatgggcaaaattggaaggttttgggtttctccagtgggctgggtagggtgggctggggaagctggactcacaagtcacgactggaactggcctttttatccttccactgttatcatgtaagtagctgctttctcgcctgcctatccttcaggctccccaaagctcactctgaagatgttagaaataaatacaaactctacaagttagaagtcgattctgacactgacatgaaggcaagcattgatttcatatgactgttgcggaggtggtaattggagaaaacagttccccagattgtaagagttcactgaagatatcgacacaattttaaaaatcagtaaaggaatgtatataatattgctcttgtgttttacagtaagatttgttgctctcagactgtgtaaaacaaaatttattcatgttttctgcatattaaaatcttattgtaccaattggtaaactattaaatgcctaataaaa

SEQ ID NO: 20 - DNA, 4409 bp, Cricetulus griseus
  modified_base (2418)..(2418): a, c, t, g, unknown or other
gccgagcagatcctgcagcacatggtggaatgtatccgggaggtcaacgaggtcatccagaatccagcaactataacgagaatactccttagtcacttcaattgggataaagagaagctaatggaaaggtactttgatggaaacctggagaagctctttgctgagtgtcatgtaattaatccaagtaaaaagtctcgaacacgccagatgaatacaaggtcatcagcacaggatatgccttgtcagatctgctacttgaactaccctaactcgtactttactggccttgaatgtggacataagttttgtatgcagtgctggagtgaatatttaactaccaaaataatggaggaaggcatgggacagactatttcgtgtcctgctcatggttgtgatatcttagtggatgacaacacagttatgcgcctgatcacagattcaaaagttaaattaaaatatcagcatttaataacaaatagctttgtagagtgcaaccgactgttaaaatggtgtcctgccccagattgccaccatgttgttaaagtccaatatcctgacgcaaaacctgttcgatgcaaatgtgggcgccaattttgctttaactgtggtgaaaattggcatgatcctgttaaatgtaagtggttgaagaagtggattaaaaagtgtgatgatgacagtgaaacttctaattggattgcagctaacacaaaggaatgtcccaaatgccatgtcacaattgagaaggatggcggttgtaatcacatggtttgtcgtaaccagaactgtaaagcagagttttgctgggtgtgtcttggcccttgggaaccacatggatctgcctggtacaactgtaaccgctataatgaggatgatgcaaaggctgcaagagatgcccaagagcgatctagggcagccctgcagaggtacctgttctactgtaatcgctatatgaaccacatgcagagtctacgctttgagcataagctgtatgctcaggtgaagcagaagatggaggagatgcagcagcacaacatgtcctggatcgaggtgcagttcctgaagaaagcagtcgatgtcctctgccagtgtcgtgccacactcatgtatacttatgtcttcgctttctacctcaaaaagaataaccagtccattatctttgagaataatcaagcagatctagaaaatgccactgaggtactttcaggctaccttgaacgagatatttcccaagattctctgcaggatataaagcagaaagtccaagataagtacagatactgtgagagtcgacgaagggttttgttacagcatgtgcatgaaggctatgaaaaagatctgtgggagtacattgaggactgagaatggccctgcataaaatgaactctgaaaactttaccatctagagtgctcatgcaattaaaacaaacacaaacaaggaggcactaagcctattctgacactgctggtctgtagtaccagaatcctgttttgttaacggaaagtttaagtaaattatattgtaataaaaaaggtagataaaccattgtacaacagtattctaggccgccaacaaagtgtgacagacacacaaaaagccctccaactttaacttgtaacgtagcttcattctcaaagctgacttcctttttctttttcgtgagtgtagtacagttaaaatttcaaatagctccttgacactgcttttcatgtccaaaccagccattttgttgtactttggtaaaggacctcttcccctccctcccctgcacatacacgccccacacacagttggactcactttctctcataccctaaggtcatgagtgaataatgattattagctacttgtaaaggaaattcttgggaggggaaccgggtaggcagcaagaggaataaaaaaaaaaaacacaaaaactttgtatatgacttttaaaacaagaggacaacacagtatttttcaaaattgtatatagcgcatatgcatggataaagcaagcgtggcacgtgtttgcataatgtttaattacaaaaatatttattctttaaaaagcttcaagattatgtctatttgctgtgcattttctttcagttggcttatctttccagggttggggttgggataaaggtatgtttgttaagcacctctgcaagacctatgttattgagttccccttcctgaggtcattttgccctttctggtttggttctgtcttttgctggccacaggcctcatgccttgaattcccagcttctagttgaggaacaaggaagtcaagtcctgagcaaaagctgtggcctgttaaagcatctggaggaagcatttcaaagttttcctgttttattttcttgaattgctgctttgagtccttttaaaattttgttatggctcgtctctcatcccttctttatgttagggtnttgaatacaatgttttcactttaagtataaataaatagcaattcactttagtctgatattgtgaactttaaatggtggatattgaaattgcttgtgtgtgttgcggtgggttcagtttgaaggcaaacaccactagaacattgataactcccatccagtgaatttaagtaggaatcactgagtttgcttcttttctattgtcagcatataggagaattaataatgcattttagctgtgatgtccatttttatgaaatttctactaaaagctatgttaaaagtaaaggatggtggtggttttattaactataaacctgtttaggccattctgcctgtggtatttttcaacaggtcagcatccctaagactgtcagttttatattagagtgcagagtgaactaggcaactagatcaagaggtataactattaaatgccagttttggctaaggacctcttcgtcttcctttaactgtcttgtgcctagggagtgtttaccatttgtgaggcagctgtgtctgttcttgcattgtacatcttattactccattgggaagtaggttcactttcctctggctttttgcctaagttaggctttgctgaatcaccctacttttccttttagaaaggttgttacatgagatgtacttgcaactgttcttttcccatcaaaaaatcagtgaatgtttgctgagtatatatattatgctgcttccttaaacttacttgttgctttaggattcaattttatattcttttttttcttccctttttgactttatttaaattaaattgcatcagtctttaaaaaattaaatcaaaccaaggagatttcaaagaaagactcaaagtttcttttccttggtgactttggaaagcaaccagaattgtcatatagatatatatggtcccttaaaatgcttttgtgtatgtggtgtttaaaaacagttaacttcacagtatctaggtctgagtgtcataagtcctcttcacaccctgtccttgcaacaagtttccaaaagagtgtatgcaccttatagtctcagtccacacccatggagagatagtgcagttggtgacactttctagtcccagagctcacatgggacctgagggtattaatgtggatcagggtgaattggcctttctgctacatccaagcttttaacaactgcctccacatgtcacagagattacagaatttaactgcttttgttagtagcttcaatgccccagctgggataggcaagccatattgttagacagcttccctatttgacctacttaagtctctcagagggctctacttaaaataagcaccagggtctccttgtgttttggggtcagttacattgtaggtgcatgcttcatttgagcaattcattgagcagcaggtgaactttcaatgatacacaataaaattttgatccaaagctcaggagatacaacattgttgtaaatggagtagcatataacatcaccagactctaaattctttgtaatttgctgcaacccagattgtatatgttttatgtgtgtttaaataaatatattaaagacacacgtgtatacatacataccaatagatccaagactgactgacttggtttgaaatggttgaatctgcagtgtaatgtgtggttcacctgtgattaggagttgaaacttagaacaagagagtaaaaggacttaatgtaacaaattattttagccacgtatcccgatatagagcacttggggaatgggatggggtgggttggtgagacaatcagatcgataaattgattaaatgctcctaaccctgtaattttgtgcatagagcaccttgtgctgtggaaataactgttcttagatttttcattgtaactggactgttcaggttgcccagagggaaagaacattcctaattctaataaaataaacggttaatttagttatatgtggccaaggatggccttgaactcctgatcttctgtctctacctcctgagtgc

SEQ ID NO: 21 - DNA, 4379 bp, Cricetulus griseus
gaaagctgtaaagctgatgttgttgaactgttgctctctcatgctgattgtgaccgcagaagtcggattgaagccttggagcttttgggtgcctcctttgcaaatgaccgtgagaactatgacatcatgaagacataccactatttatatttagccatgttggagaggtttcaagatggtgacaacattcttgaaaaagaggttctcccacccatccacgcttatgggaacagaactgagtgtaggaacccccaggaactggagtccattcggcaagacagagatgctcttcacatggagggcctgatagtgagggagcggattttaggtgctgacaacattgacgtttcccaccctatcatttacagaggggctgtctatgctgacaacatggagttcgagcagtgcatcaagttgtggcttcacgctctacacctcaggcagaaaggtaataggaacacccacaaggatctgcttcgatttgctcaagtcttctcacagatgatacacctcaatgaagctgtgaaggcccagacatagaatgtgttctgagatgctagtgtttaggaatagagcagagcatgaacagaagttaaaaatatcaacctgattcacctggaccccagaacacgggaaggtttcaccttgctacacctggctgtcaactcaaacacaccagttgatgatttccacaccaatgacgtctgcagctttcccaacgcactggtcacgaagctccttctggactgtggtgctgaggtgaatgccgtggacaatgaagggaacagtgccctccacatcatcgtccagtacaacaggcccatcagtgactttctgaccttgcactccatcatcatcagccttgtggaggccggcgctcacactgacatgacaaacaagcagaataagactccactagacaaaagtacgactggggtgtctgaaatactacttaaaactcagatgaagatgagcctcaagtgcctggctgcccgagcagttcgggctaatgacattaactaccaagaccagatcccccggactctggaagagtttgttggatttcattaagtgactggatgtgtaaaatcgtttaatgtggtgctaaaaagtaaaaggactttaatcacagacaactttttttttatttttttaaaagaatgacaaaagtatttctgttaagctggtgtcagcatgtcatctgtgcagcagttttgaggatttcatgaagaaaatgaactaaaaaggaacactgagagcaatgggagatgctcgtgctctgcgtggatggttctcactctcactgtgcgtgcagagtgatacagcacattttataccaggaggacttgaaacacgtagctactgattaataatctggaaattatgtgcagttattgttggaaagttgaattcatgaaaatattgtttttacttagtccattgtgagatgtaggaaaaccaggagttagggtataaggaaatgaagtattcgatgaggaaaatgattctcaatgccacatggaaggtatgtctcagagcttttttctcttaagcatcacagaaattcaagttaaggaacacttgcttctactgatgctgggaatgataatgaaagtaaaactagttgttcctgtaatttttctctagtgccaaatgaatgcccgagctacccctagtgcatggtaccataagtggagacccgcagcttcttgtttcctttagtgaaaagcattgccatgatgcaacatcagatataaactttaaacaacctgtaagatttcacaaacattttacctgtggatattgcttttaaaatatatgaggaaggttgcagttggagcagtataaaactacaagccaaaatcagcactgatggtttaaagggaggtgttggaatgaccccaatttgggaacttctgaccttaaccctcctgacatgactcaatcactcatgtctcaccttgctctggcagctctcagtggcctagaagagatgacccactgcacaggtgagtcagtcctgcctctgcccaggttcaggtcaggttttttttcccttttggactctaaggcccaatatggacagtgaggaatagctgtgacacttagtattcagttggttccgttttttaatatgtgtggtttttaagcacctaaacttaaaatatcagataatgttgcatgttttaaaaacatttttccccttcgttacccaggaccaacactgttctagacattatttatatatgaggataatgataatatgtgcatattcagagatagaatttgaggacagctttaggaaggggggaagacagtgctgatgaaggttgagcaaactgaactatgctggtagtaaactggctagatttatttaaattgtagttgcacattgtgcactctagctgagagtctaattctgtgtctaacgtcactccagatttgcattggggaacacctgtataaagccattattggaagaagtgatcttcatgcctggtttttccattattttgtttttggtagaattctttaaaaataagctcagccaaatgttccataaacctctgtttttaaagaaaaatgaataggtgtggaaggtggtagctttatagctagctcactgggctgtctcctgcagccatgtctgtcatttgatgtttgttattggtagaattatgctttgaattgtaactcttccttggcagtgttagtgatttcccagaacactttgtcgtgtaagttgtcacataaatttggttgagccaggagtgcagaagggtgctttccactttttatgtagttaggaattgaacacttggtgtcagtgactaactccagtctgggcagcaaacccatccccttacttgctgaagaaggggcaactgactctgacaccatggctttttacagttcatcctgattccaaaggttctccactgtgggaactttaaacatgcaaacccaaaagcggccagcccatctgccaagctttggttttgctagtttctgagaagggttttgatctcattatactaatagttgataaatggtgattgtgaggacttaagcatggcagcattgtttgactgacataaactataatttgggagcaatgcctccctaaaggcaacactgtattagacaattgtttctgaaaattcaagttccagagagcagtttgagaagtggccagtggctggactctgagtaggtggatgaaaacgtctgtgcttgattatgacagttacaaaaatccgaagtgttctttatcagctatctggatgccagtgctctcagtagtgcacccttctcactgacaagacttcctgcaacagtaatagggaggagtaaaaccttcaactctgccttttgctctctgatttcagtccagattctaagctgtgcccactcccactttgaaagtacacagctcctttctggatatcatctgacagcccctcactatgtacatacacataggggcttccttagacgtttccggtagacctgcccaaactttgagatgggacaggacatacaacatccctttctcaaccctgggatctggaacaaatcctccagtgactgtgctgatacattgacttttacagatgtaaagtaaatgtggtctctagtcctaggcctgtggagtgtacctttgtgttagtgtattgggaaggagcagtgacttgatggttctggggactatatctttgatgtgtgcaggggtgactactgttaaattactgtcagctttcctttagaggtgaatcatgggatgaatggcctcatcagaaaaatgaaggcatgaggatataagcctgcaaggtgaggaaacagacaggttttgtatccctttcttattgggtgttgtaaaatgtgtgcatggctttttgttgttgttgctcagtaattggtagaggagaaaagatgaagggaccctccctgtcagcttttctaaccagtcttttcagaggtacatagctggggagtaaaatctggccttaacctattggcaagaccctgtcctttgtaatgttcaccgctgtcctcggtgccaggagctaggtagttgtagtctagtagtaattcaccatggtttattacaagccagtgatgtcattctatcgtgcactcttgtcaagccatttatgtgactttaataagcatagtaaccttgctgactgcacccgaggtctatcagtgatttatatattgcatgatgtcttctgtttgagtttgacatgtagaatcacttttgatttcatggcaattgacagtcctaatggctcagctaatttgaaactaacaactttgctgtgtaaaaggaaaaatggtgttgtgttcagtaaatgtttgaaaaaaaaaaaaaaaaa

SEQ ID NO: 22 - DNA, 4379 bp, Cricetulus griseus
ctggagcggcgcagcaggagcggggccgtgaggagaaataaaaagcagccccgttgatgactgaaaatgacaaaagcatccacctaacagacgaggaatcagctttgaagtgggagcccagttggaagctcgggaccgtttaaagaactggtatccggctcacattgaagacattgactacgaagaagggcttacactgtgaaattttatgatggagtagttcaaactgtcaaacatattcatgtcaaagcttattccaaagatcagaatattgtgggtaatgctaggcctaaagaaacagatcacaaaagtctttcatcatcttctgagaaacgagagaagtttaaagagcagagaaaagccacggtcaatgtgaagaaagacaaagcagaaaaagccttaaagacggaaaagcggcccaaacagcctgacaaggaaggaaagctgacctgctcagagaagggcaaaagtgcctgagaaaagccttcccaagaacgagaaggaagataaggagaacatttcagagaatgacagggagtactctggggatgtccaggtggaaaagaagcctgaaaatgaccttgtgaagagtccacaagagaacctgaaggagccaaaaagaaacgaggcagaccccttccatagctcctactgctgtgtgccaaggaatctaccgaaggtcagttgaactctccattggaagctggccaggtctcatctgtattaacttgccactcctctggggatggactgggagctgcaggcttggagttgaactgcaagtcaatgggagaaaacactatgaaaactgaaccggtgtctcctcttgctgaggcgcaggaggtttcgactgttgaagttccaaatactttgaagaaacagatgactttgtgacattgaatgtgccagctgtggatctagaccacaagtttcgatgcaaggttgtggactgtttgaaatttttccgaaaagctaaactgctgcactatcatatgaagtattttcatggaatggagaagtcaccagagccagaggagagcccagggaagaggcatgtgcagactcggggctctgtagtgcctgacaaggctggccaggagagcctgaccaggaagcgggtctctgccagctccccaactgcaaaagagaaggaaaagaataaagaaaagaaattcaaagagcttgtgagagtgaagccaaagaagaagaagaaaaagaaaaagaaaaccaagcctgaatgtccctgcagtgaagacatcagtgacacctcccaggaaccttctccacccaaagcatttgctgtcaccaggtgtgggtcctcacacaagcctggagtccatatgagcccgcagctccatgtttcagataatggaaaccataaagggaagctgaaagcatgtgaggaggataatttgagcgagtcctcttccgagagctttctttggagtgatgacgaatttggtccagatgtggatgtgaccaccaacccagatgaggaccttgatgctgacgaccgctatgactttgaggtggtccgttgcatctgtgaagtccaagaggaaaatgacttcatgattcagtgtgaagaatgccagtgctggcagcacgggatctgcatgggattactggaagaaaatgtgcccgaaaaatatacctgttatgtctgccaagaccctccaggtcagaggcctggcttcaagtactggtatgacaaggagtggttgagccggggacatatgcatggcctggcatttctggaagagaactactcccatcagaatgccaagaagattgtggccacccaccagctcctcggggatgtgcagagggtgatcgaggtgcttcacggcttgcagctcaagatgagcatcttgcaaagcagggagcaccctgatctgcaactgtggtgccagccctggaaacagcagtctgcagaggggagagtgcatcccagacacatccacatcacagacaccaggagcaaagaggagtccccaagctatagaactttgaatggggcagtggagaagcccttgccgctgccccggtctgtggaggagtcctatatcaccagtgagcactgttaccagaagccccgcacctactacccagctgtggagcagaagctggtagtagagaccagaggatctgccctcgatgatacagtcaaccccctctgtgagaatggtgatgaccccctctcccctcgcctaggctggcctctcgaccaagacaggagcagaggggacagtgataccaaacctagctccccaaaggtgaaggaatacgtttcgaagaaggtcctgccggaagaagcccctgctcggaagctgctggacagaggcggagaagggctggtgagttctcagcaccagtggcagtttaacctgctgacgcatgtggagtctcttcaggatgaagtgacgcatcggatggactccattgagaaggagctggatgtactggagagctggctggactacactggggaactggagcccccagagccactggccaggcttccacagctcaagcattgcatcaagcagctgctgactgacctaggcaaggtgcagcagattgccctctgctgctcgacatgagattgggcgcccaggacaattggagcacagtcctggcatgaccgccagggggagcttcgaatatttaaataaataaacttagcatgctgaatgcacgtgacactgactgacttcagggatttggccaggagtgtgatggacactgggacaaagagaccattttggctgctggaggacggggcactcttgatctggaagccaactacgaaggcagcgcatagtcttagaaccctcttctgtgcacatcgttgaacgaagcgagtctttgcacatcttcacttggaatcgtgccactggtgataaatggaatgagagaccaaaaaaaaaaaaaaaggttctggttccatgtgtaattgctatattgttttgttttaccttactaggcaaagtttaaaaggttccatgctttgaggacttgatttaaccagtttttgcatcactaaaggcaaatatcaaagtacctttatccatcaacacccccaggttcatcatgagttttggaatctgtaatgctttaggcagcaaatatttactatgtaaacatcaagaagccaatgtcagtagctagaatagcagcatctccagctgcctcaggaactgttcagcttcaggcgtaacaggtcattgtggctgtgaattgagacttgtgtacagagaagtttcagggaatgaatgccctgtccaatgatatgttcaccatctgctataaattgagctgcaggcagggcaagcatgaattgacctggcatagcttggggagtgtgtgacgcataatgaagccaacacagtcccttattaaaggctgcttcccactgttaacatgtttctgttgtgggaagaaatgctccaggagtctgtgtgacatcggtgttttggataatttattaatagttgcatcttgagaactggatgatgattgtctgaaaggggaagaaccaagagaattatctatagctacaactgtgtgaggtatgatgattgttatattagatattgggggccagagagatggctcagttggtaaaggtgcttgccaccaagcctgctacccgagttcaatccccaggacccacatagtagagaattgaaaccttaaagttatcctctgacacacatacacacaaaatgtaataaaggtttttaaattaaggtttgttcttttatgtaactacccttgagtatctggggaagctgtaacttggaaggcagtctgttttgtgtcttcttcaaagttgaaagcagaaactgaatgatcctaattttgccatatggtcattgctgggtttatcatttaggttttgtgaaggaagtaatctggttccattgtgacttctgttcatagggaagcaaagcagactcatgttctgataacctcagttcttccctaacttaaagccatgttgaggggctccacttccagttcctgtgtcacagtgaattaacccctaagttggagcactggaatctgtcatttgcaaacaatgctgataccatttagaaagacgtgcactacctgagttctgttaggaaaaactatccaccaatggaaggtcaccttgacacagcagttctggtgtgatcagtcattgaagtatgcaaggtggatcctggctgaaccagcattgcactgtggctacgtatctgtgtttacgtgctattagacagaaggcactgtacataggtgttgctctcaagcaatatttgcaaaacatgcaaacttctgtatctggaaaaaaaaaaacaggttcttgttgctaaaaaaaaaaaaaaaaaaaa

SEQ ID NO: 23 - DNA, 4373 bp, Cricetulus griseus
ccaattactacttcgatgtttcccatgaacacttagaaggagccctggacaggtttgcccagtttttcctgtgtcccttgtttgatgcaagttgtaaagacagagaggtgaatgcagtggattcagaacacgagaagaatgtgatgaacgacgcctggagactcttccagttagaaaaagctactgggaatcccaatcaccccttcagcaaatttgggacaggaaacaaatacactctagagactcgacctaaccaagaaggcatcgatgtaagacaagaactcctgaaatttcattctacatattattcgtccaatctgatggctatttgtgttttaggtcgagaatctttagatgatctgactaatctggtggtgaagttattttctgaggtagagaataaaaatgtccctttgcctgaatttcctgagcaccctttccaagaagaacatcttaaacaactttataaaatagtaccattaaggatattaggaatctttatgtaacgtttcccataccagaccttcagcagtactacaaatctaaccctggtcattatcttggtcatctaattgggcatgaaggtcctggaagcctgttgtcagaactcaagtcaaagggctgggttaatactctggttggtggacagaaggaaggagcccggggttttatgtttttcatcattaatgtggacttaactgaagaagggttattacatgttgaagatataattttgcacatgtttcaatacattcagaagctacgtgcagaaggacctcaagaatgggttttccaagagtgcaaggacttgaatgctgttgcttttaggtttaaagataaagagagaccacgaggctatacatccaagattgcaggaaaattgcattattatcccctaaatggagtgcttacagctgagtatttgctggaagaatttagacccgacttgatagacatggttcttgataagctcagaccagaaaatgtccgggtggcaatagtttccaaatcatttgaagggaaaactgaccgcacagagcaatggtatggaacccagtacaagcaagaagctataccagaggaagtcattcagaaatggcaaaatgctgaactgaatgggaaattcaaacttccaacaaagaatgaatttattcctacgaattttgagattttgtctttaagaaaaagatgcaacgtcataccctgctctcattaaggatacagccatgagtaaactgtggttcaagcaagatgataaatttttcttgccgaaagcttgtctcaactttgagtttttcagcccatttgcttatgtggaccccttgcactgtaacatggcctatttgtaccttgagcttctcaaagactcactcaacgagtatgcatatgcagcagagctagcgggcctgagctatgacctccaaaataccatctatgggatgtatctctcagtgaagggttacaatgacaaacagccaattttgctgaagaagattactgaaaaaatggctacttttgagattgataaaaagagatttgaaattatcaaagaggcgtatatgcgatctcttaataatttccgggctgagcaacctcaccagcatgccatgtattacctccgcctgctgatgactgaagtggcctggactaaagatgagttaaaagaagccctggacgatgttaccctcccccgacttaaggccttcatacctcagctactgtcacggctgcacattgaagcccttctccatggaaacataacaaagcaggctgcattaggaattatgcagatggtagaggacacccttgttgagcatgctcacaccaagcctctccttccaagtcagctagttcgctacagagaagttcagctccctgacagaggatggtttgtttaccagcagaggaatgaagttcacaataactgtggcattgagatctactaccagacagacatgcagagcacctcggagaacatgttcctggagcttttctgtcagattatctctgagccttgcttcaacaccctgcgcaccaaggagcagctgggctatattgtcttcagtggacctcgccgagccaatggcatccagggcttgcgattcatcatccagtcagaaaaaccacctcactacctggaaagcagagtggaagccttcttacttaccatggagaaggccatagaggacatgacagaggaggccttccagaaacacattcaagcactagccattcgtcgactcgacaaaccaaagaaactctctgcagagtgtgctaaatactggggggagatcatctcacagcagtacaattatgacagagataacatagaagttgcatatttaaagacacttaccaaggatgatatcatcaaattctacaaggaaatgttggccgtggatgcaccaaggagacataaagtatccgtccatgttcttgccagggaaatggattcttgtcctgttgttggagagttcccccctcagaatgatataaacttgtcagaagcgccagccttgccacagcctgaagtggttcataacatgacagagttcaagcgtggcctgccactgtttccccttgtgaagccacatattaatttcatggctgcaaagctctgaagagagtggatacgttcctgtatctttcagggctgggggagcagtcttaaccacttgagtagtttctggcttgctattagagagacaaacagaaaagagttatcagacgttattatgtagaaatgttaaaaacccaaagtaataaaattataaaatcttatagatgtagaatatttttaaaatacatgcctcttaaatatcctaattttttcctttttagtcctaagagaaattcccttatatcaactgtttaatctgcagaagggtatcctaatagaatcttttttccttattctgtaaaatagtcacttgtctgaagaaaataagagcttttttctaaaaggcttcaaaacatttagaaaggattacctttacctttttaagaactgatcctcaaatctgctttgtatttgatagtttcctgtaaaccgacagaaaaacattacatttggcagataatgcacaaagcaatgtcattttcgtttattagtgaaattgctgattagacatgctgtgctaacgtcacctgttgtgacccccagaactcctagggtgaattttcgatcagtctgtgaactaaatcatttgcccctttaagggacttaaaaggcagcaaatacaaagccacctctttggagatataaaacggttacattcttacatagcagtctccgaaagactctaaattcccttgctgcttccagtctcatcttgccttaagtgttatttttttgaatatatgaatataaacatacagatgatgactggggtggacttttaaagaatatttttctcacaagaatactattttaggtgaaaatgttactgtagatttaacagctgttttaaaatatttgctattattaaaacttgcttcaagaacaagcgtggctatgtttctacacacaggcaatagtaatagaaagtgctcctgtttgtccaccaactcaggcaaagtgcagaatggcgtttccaagtgacatttgactgccccgtatgacttgatttgccaggattttctgctaaagagtcttggctattcacagcttaagttttcatatttgccattttccaaacaacgtgaacttgggcggctgtggaggccgctctccccgtggtgctgcgatgtcttctatccacgtgttttagagtctcccggtgagaaacctgttcttgtctgtcccatcagaaggtgtgagtcatcatttccttctcgtctaagcaattggccaagcagccaaggctgactttgaactcctgatcctcctgcctccacttctcaagtgccgggattaggcgtgcgtcaccccgcccagcgtgactatgcagcttttcatcgaactgcaaaatatatacaagacaaatctaaaattagttctgagtatttgaatccatcagtgtaaaagcagatagcagtctgctaccttttctgtaaatgattacatgccgttgagtaacttagctcatttttaaaagatgggtacagttaaaagcatgtcttttgtatgagaagaggcacttgaagagactggaaaacaattccatgttgcttctgtgaacctgcccatggtgttcagtgtgctctagagctcctgtgtgtcacctgacatcctgaccggttcatctcagcgggtccaggttgtggtccatgaacaagaacagactacccagagactgccgtgtactcaagcttagcaagcgagatttgcgaaaaagtcacgagttaccagagaacttaaaaagtacttttta

SEQ ID NO: 24 - DNA, 4357 bp, Cricetulus griseus
ctgtagataggaaggtgtctcagcctattgaaggacatgcagctagctttgcacagtttaagatggaaggaaacgcagaagaatcaacattattttgttttgctgtacggggtcaggcaggagggaagttgcatatcattgaagttggtacaccacccacagggaaccagcccttcccaaagaaggcagtagatgttttctttcctccagaagcacaaaatgactttcctgttgcaatgcagataagtgaaaagcatgatgtggtgttcttgattaccaagtatggttatatccacctctatgatcttgagactggcacatgcatctacatgaacagaatcagtggagaaacgatcttcgttactgcacctcatgaagccacagctggaataataggagtcaacagaaagggacaagttctgtcagtttgtgtggaagaagaaaacataattccttacatcaccaatgtccctcagaggctgcaaaggtggctgctaatgcaccaaagggaatccttcgtactccagacaccatccgtcgattccagagtgtcccagctcagccaggtcaaacttcacctctccttcagtactttggaatccttttggaccagggccagctgaacaaatatgaatccttagagttgtgtagacctgtacttcagcaagggcgaaaacagcttttggagaaatggttgaaagaagataagctggaatgttctgaagaactgggtgatcttgtaaaatctgtggacccaacattggcacttagcgtgtacctcagggccaatgtcccgaataaagtcatccagtgctttgcagagacaggtcaagtccagaagattgttttatatgctaaaaaagttggatacactccagactggatctttctcctgagaaatgttatgcgcatcagtccagaattttctcaaggtaggcaaaactaacagatcagttgccacttatcatcgtctgtgatcgatttgactttgtccatgacctggtgctgtatttatatagaaacaaccttcagaagtatatagagatatatgtccagaaggtaaatccaagtcgactcccccgtggttattggagggttgcttgatgttgactgctcagaagatgttattaaaaatttgattctcgttgtgagaggtcaattctctactgatgagcttgtggctgaagttgaaaaaagaacagattgaagctagcttctaccttggcttgaggccagattcatgagggctggtgaggaacctgcctactcacaatgacattacgaccaaaatatacatcgacagtaagaccaggttgtacagacagccttgtctgaaactcaggacccagaagaggtgtcagtaactgtgaaggcttttatgacagcagatcttcctaatgaactcattgaactgctggagaaaattgtccttgataactctgtattcagtgaacacaggaatctgcaaaacctcctcatcctcactgcaattaaggctgaccgaacacgtgttatggagtatattaaccgcctggataattatgatgctccagatattgccaatattgccatcagcaatgagctgtttgaagaagcatttgctattttccggaagtttgatgtcaatacttcagctgttcaggtcttaattgaacatattggaaacttggatcgtgcatatgagtttgctgaacgctgcaatgaacctgctgtttggagtcaacttgcaaaagctcagttgcagaaaggaatggtgaaggaagccattgattcatacatcaaagcagatgatccttcatcctacatggaagttgttcaggctgccaatactagtggaaactgggaagaactggtgaagtatttgcaaatggcccgaaagaaggctcgagaatcctatgttgaaacagaattgatatttgcgctggctaaaacaaatcgccttgcagaattagaagagttcatcaatgggccaaataatgctcatattcagcaagttggtgaccgttgttatgatgaaaaaatgtatgatgctgctaagctgttgtacaataatgtttctaactttggacgcttggcatctacccttgttcaccttggtgaatatcaggcagcagttgatggtgctagaaaagctaatagtactcgaacatggaaggaggtctgctttgcctgtgtagatgggaaagaattccgtcttgctcagatgtgtggacttcatattgtagtacatgcagatgaattagaggaacttatcaactactatcaggatcgtggatattttgaagaactcattaccatgttggaggcagccttgggactagaacgagctcacatgggaatgtttaccgaactagctattttgtattctaaattcaagccacagaaaatgagggaacacctggagttgttctggtcgagagtgaatattcctaaggtgctgagagctgcagaacaagcccacctttgggcagagctggtgttcctgtatgacaagtatgaagagtatgataatgccataatcaccatgatgaaccatcccactgatgcatggaaggaagggcagttcaaagacatcatcaccaaggtggccaatgtggagctgtactacagagcaatccagttctacttagaattcaagcctctgttgttaaatgacttgcttatggtgctgtctccacggttggatcacactcgtgctgtcaattatttcagcaaggttaaacagctaccactggtgaaaccatatttacgctcagttcagaaccacaacaacaaatctgtgaatgagtcactgaacaacctctttattacagaagaagattaccaggctctacgaacatcaatagatgcttatgacaactttgacaatatctcacttgctcagcgtttggaaaaacatgaactcattgaattcagaagaattgctgcttatctcttcaaaggcaacaatcgctggaaacagagcgtagagctgtgcaagaaagacagcctttacaaggacgcgatgcagtatgcctctgaatctaaagatacagaattggctgaagaactcctacagtggtttttgcaggaagaaaaaagagagtgcttcggggcttgtctctttacctgttatgatcttttaaggccagatgtcgtcctggaaacggcatggaggcacaatatcatggattttgccatgccctatttcatccaggtcatgaaggaatatttgaccaaggtggataaattagatgcttcagagtcgttgagaaaagaagaagaacaagctacagagactcagcccatcgtttatggtcagccccagctgatgctaacagcaggacccagtgtggcagtccctccccaggcaccttttggttatggttacactgcaccaccatatgggcagccacagcctggctttgggtacagcatgtgaaatggaagctgatgctgtcgtctctgttttcatactgaagcatcgtctacccacctctcagtttataaacggggaaaccggccatgtgttcttgtaacctttatttcatgaaggactacttttttgtttctaactatagacttggatcgtctatattaaaaccttattttcacattccgcatcattagaacttcttttcaaaggggaatagtattcatgtgggcttttttcttccccctcattctttgaagaactgcttactattcaatctattgtgaagaacctgatttgcactctgtagtgtttaaagaaacaaagaaactctaatattgaatctcttaaatttagtgtatgtaaacagctttcagtatgtattgtctaaatgcatttaaatctcttttattcaaagaaaagctaaagtgaaaatactggtatgtgaccatgcaagactgtcaatgccaacaaagacaacactaatcagcatattctacattggatcacagcgctctccaaattatttgaaaaatgcatacagacaacttgcctgattattttttttttaaatgagcataaaaggccctttaacctatgcaggtttccccattgcgcatatagaaaatgctagtgtgttttgctcacttcatgtgtaacagatgccctcatgttgtgctgtatcctgtgctttttctgtgggaccattccattcaggaacaaagagcaccatgattccacacgtatgtatttactaacccttccctgaggtttatgttggatattgtggtgttttagatcactgagtgtacagaagagagaattcaaacaaaatattgttgttcttcagttttgtttgtggaatttgaaattactccaatttaaaataaattactggactgtggaaataaaaaaaaaaaaaaaaaaaaaaaaaaaaaaaaaaaa

SEQ ID NO: 25 - DNA, 4353 bp, Cricetulus griseus
cttaaacaagcaagcatatgacttggcaaaggctttgctgaagaggactgctcaagctattgaaccatatattacaaatttttaaccaggttctgatgcttgggaaaacatctatcagtgatttgtctgagcatgtctttgatttgattttggaactctacaacatcgacagtcacttgctgctctctgttctaccccagcttgagtttaaattaaagagcaatgataatgaagaacgtctccaggttgttaaactactggcaaaaatgtttggggcaaaggattcagagctggcttcgcaaaataaaccactctggcagtgctacttgggcaggtttaatgatatccatgtaccaatacgcctggagtgtgtgaaatttgctagccattgtctcatgaaccatcctgatttagcaaaggatttaacagagtatacttaaagtgaagatcccatgaccctgaggaagcaattagacatgatgttattgtgttctatagtaacagctgctaaaaaggaatattcttcttgttcaatgatcacttacttaattttgtgagagagcgaacactggacaaacggtggagagtacgcaaagaagccatgatgggacttgcccagattttataagaagtatgctttacagtcagcagctggcaaaagatgctgcaaaacagatatcctggggtcaaggacaagctgctacatatatactagaaggagagaagagctcatgctagacagtgcctggtgaagaatatcactgtgaggcgggagtacctaaaacaacatgcagctgttagtgaaaattattgtctcttctaccagagtatgttgttccatatacaattcaccttttggcacatgaccctgattatgtcaaagtacaggacattgaacaacttaaagatgtgaaagagtgtctttggtttgttctggagatattgatggctaaaaatgaaaacaacagccatgcatttatcagaaagatggtagaaaatattaaacagacaaaagatgctcaaggaccagatgatacgaaaatgaatgaaaaactgtacactgtgtgtgatgttgccatgaacatcatcatgtcgaagagcaccacatacagtttggagtctcctaaagacccagtgttaccagctcggtttttcacccagcctgacaagaatttcagtaacaccaaaaattacctgcctccagaaatgaaatcgtttttactcctggaaaacctaaaacagccaatgttctaggagcagttaataagccactttcatcagcaggcaaacaatctcagagcaaatcatcaagaatggaaactgtgagcaatgcaagcagtagctcaaatcccagctctcctggaagaataaaagggaggcttgatagctctgaaatggatcacagtgaaaatgaagattacacaatgtcttcacctttgccaggcaaaaaaaagtgacaagagagacgactctgatctttctgagttggagaagcctagaagtcggaaaaaagcacctgtagcagacccagaagagaaattaggtatggatgacctgactaagttggtacaggaacagaaacctaaaggcagtcagcgtggtcggaaaagaggccgtatagcttcagaatcagatgagcagcagtggcctgaggaaaaaggcacaaagaggagctccttgaaaatgaggatgaacagaacagcccacccaaaaagggcaaaagaggcaggccgccaaaaccgcttggtggagggacatcgaaggaagagccaacaatgaaaacatccaaaaaaggaagcaagaaaaaacctgtaccttctgtagtagatgatgatgatgaagaagaaagacaaattggaaacacagaacaaaagtcaaaaagcaaacagcaccggtcatcaaagagagcacaacagagagcagaatctcctgaaagtagtgcagttgaatccacacagtccacaccacagaaaggacgaggaagaccatcaaaaacgccatcaccatcacaataccaaaaaaatgtccgtgtaggacgctccaaacagacagctactaaagaaaatgattcgagtgaagaaatggatgtgcttcaggccagctctcctatcagtgatgacactgcacaggaaggagcagaagaggaggacatttctgcaggaaatgtacgacggagaagttccaaacgagagagacggtgaacatgccagaaacttgcaatgtgaaagctttgggggaaaaaaacattttttgtccttgggcaagtatgaggctaaataaagcctttgatgcacaaaacaggactgccaaagtgtggacagttggacctttgaccatgaatttgtggtcacatacgtcagccattcacatagtgataacattgactaaaaaagagttttgtgaaagtgtcatgtgtgatggctgtgtagacataaactaaagaagaaccctgtaaatacgccctccccatttctgacttctaaagtgcttgtatagcttttctctgcggctttaaactgacagtgcccagctgcttactggatctcttgatctgagaagcatttgttaggatggatctcaagcagtagtctgtcagggtttgtatttgtattctctgcaattttactgtgaacattggttttttcaacaattggtgtcattttcttgatgtcactgtttgttggagttaagtagtctcttcctctctttgtatctcgcctgtgtttacccagggcacccttcatcccgagaggtgctagagcgtctgccattacactagagcagcgcaactgtcaggaggacaccacacagattgtgaaatagtcctcaagttatttgatgactttacacctcagtattggtcccagaattttctggcctttcatggcaatgaaaattttaagaaagagatttaaaatattttaattttaaagagtgtgttataaaataatgtactaaattctttattccattctatcatcttttttcagtttatattaatctactgtatcaataaaattatgtaatttgaatgggcttttaatagtctagaatgttattgtgtatagatattacttcttgaacattatgatcagaaaatgcaaattattacactataatataaaatctgatatatacacattagaaaaagttctcgttctccataaccatgtaaaagttaatcaacaaaacaaaaattttattgatgcagtgtatctttataaatctgttcttgaaagccaagtgttttgtattttatagtgagttgcatgttcatgaaaaaaaattgctaatcatgagatgtgctttttctgttaaattcatacttagccatagtatatgatagatgaccccttaacatagtttttcatcaagagtttataattgtactttattttggagccaaaaaaattgttttgggggggtgggagggtggcagtgatatatctagtttgggctgacactgtaggtgtcgcactctcataaacagtgagtcccactgcatccagagcaggagaaatggacatttgcctggggtctatcttagagatctgtatgtttccaaaattggctataatagattggggatgcaataaagaagcgactattttagaaaatgacgttttgctattttccagtatgaatattttccaaatgatgtgattattttttttaaatatttcctcatgtttatgaaacactttatttttaaaaaggtgtttgaattgtgtcttaatccttcagtgttgaccttctcttcccaacagtgctgacaacaccaatggcgaagggaggctgctgtctatcagggcagccaacattgggttacaatactttggattttaaatgtttcattagctcggctcgccaaacaatgttgtttcaatttcaacagtacaaaagcatgtttttaaatctatggcataaataataaaggatagctttgtattttttgtcatcaaagtgcattgaaaatatctatggaaatatatcttttaaagccattttataaaacatacaaaaattattaatgaggattttatttgcatgatcatcgttcatcaaatttcattgcacattaatgttgtgcatcagttcatgacaaatcatggtcattgtagatttcgtttgttattattatgtttaaacttaacatttcatgcactaatatttggagagctacatatttaaaataaagctaggtgtatatgcaacattaattgctgacattgttagcacactgcggtgatcatactcatcttgagaatgtgtactgtctgacattaaggaactgtgtctcattgtaacaggcagactgtgggatctgttgacccccaggtgagctttgcttgc

SEQ ID NO: 26 - DNA, 4344 bp, Cricetulus griseus
  modified_base (79)..(79): a, c, t, g, unknown or other
  modified_base (514)..(514): a, c, t, g, unknown or other
gataactatgattatatcgtaaaaacggggaagaagtaggatggatcgttatgagatcgatccctgataggcaaaggcncctttggacaggttgtgaaagcctatgatcgagtggaacaagaatgggttgccattaaaataataaaagaacaagaaaagcgtttctgaatcaagccccagatagaagtgcggcttcttgagctcatgaacaaacatgacactgaaatgaaatattacatagtgcatttgaaacgacactttatgtttcgaaaccatctttgtttagtctttgcaacttccgaggggtctctttgaatctcacgcgaaagtttgcacagcagatgtgcacagcactgcttttccttgcgactccagagcttagtatcattcactgtgacctcaagcctgagaacattctcctctgcaaccccaaacggagtgccatcaagatcgttgacttcgggagttcttgttggggcagaggatataccaatatattcagagtcgcttttancggtctccagaggtgctactgggaatgccttatgaccttgctatcgacatgtggtcccttggatgtatcctggttgaaatgcatactggagagcctctgttcagtggggccaatgaggtagaccagatgaataaaatagtggaagtttggcatcccacctgctcatactcttgttggagtagagacaggagggcccggcggacggcgagctggggaatcgggtcatactgtagccgactacttgaagttcaaagacctcattttaaggatgcttgattatgaccccaaaactcggattcaaccttattatgccctgcagcacagttttttcaagaagacagctgatgaaggtacaaacacgagtaacagcgtgtctaccagccccgcgatggagcagtcttcaggcaccacctccagcacgtcatccagctcaggtggatcctcgggcacgagcaacagtgggagagcccggtcagacccaacgcaccagcaccggcacagtggtggacacttcacggctgctgtccaggctatggactgtgagacacacagtccccaggtgcgccagccattcccggctcctctgggctggtcaggcactgaagctcctacacaagtcactgttgaaactcatcctgttcaagaaacaacctttcatgtaggccctccgcaaaacgcattgcatcatcaccatggaaacagctcccatcatcaccaccaccaccaccaccaccaccaccaccatggacagcaagccttgggtaaccggaccaggccaagggtctacaattctccaacaaatagctcttctacccaggattctatggaggttggccatagccaccactccatgacatccctgtcttcctcaacgacttcttcctccacatcttcctcctctactggtaatcaaggcaaccaggcctatcagaaccgcccagtggctgctaacgccttggactttggacagaatggagctatggacgttaacttaaccgtctactccaatccccgccaagagactggcatagctggacatccaacataccaattttccgctaacacaggccctgcacattacatgactgaaggacacctgacgatgaggcagggggctgatagagaagagtctcccatgacaggagtttgtgtgcagcagagtcctgtagctagctcgtgactacattgaaacttgagtttgtttcttgtgtgtttttatagaagtggtgtttttcccaaaaacaaagtgcaaagctgcttgaatcagaaggagattaacacactgaaccgctacaagagggcaaagctgacttttttaacttgaaaagattgcaaagggacagagaagtttttcagagccatgtccacctgtcttcatggagagctcccaggtgccctctttttgtccccccttttaacctgccatctcccggtcatagtgggtttgtctttctatccaaacaaaaagtaaaatgttcagatgttggtcttggtcatttgccaaactaaattttaaaaataaaaaaggcactgcacataatttgatgtcctctatacacttgggcacggaaatgcagtactgtaaggaagagggacctccagctcacacaaacaccatcttcagctatgtgaaagggacgattgtgttggagtttgtaaggcacattaagcatgctaagtggcggggaccaggactctcctatctgaacccaccgaggagcgaagcagcaatcccatgggatcctgtgggtctccttcctgttggagaggccccgggaagatgggaatggaacaggactggtctcctcagcaaggtgcactgagaagcaacaccgcgcgggtcagttgtggccagtcctggggaggtctgagtggtggtctttgggatgacctttggccttatggatttggactcgaagttagaagagcctaccatttcagatacaatcacttgtggacatgcgtttgcagacagtccttaaccctgaaaacacagagaatgggtaattcaagaggcctttcttttaaaatagacttttgtgacccactaattgtaaggtattgcaaggtcactttgcgtgtgtcataaagctgaccccttattggttgaaggccacagatgtagtggtttgctttgatggaaatagctacagctgtgcccttcctgctttttaccttttctttggcttttttctcggcacgtggtgtcttcaccatttcttctgcacaaagacgtcttctgttcatcctgaacattttaaaatgcagaattttatgtgactgcttttttgcctcacaattatgctgtgaattttacaaaaatttattttcttttttgataatttattgtaccaaagctgttttttatagcacatagatgtctgtaaccaataatgtagcagttctgcactttgacacaaggtgtaactagaccatttttaaatgtcagtggaaattatggtctgtactattgtcttaaacaaaactggaactgttgttgaatccatagcaacacatttacagcaatctgtgtgctggacagaatagattgacatctaattcaaggttacagctcctgtcacattctaaatgtgttcaggcctctgaagggacgggacactggatccagaagctatggagccagcagtcgatgcccgtattcctgattcacttactgtgaacttgagtgtgagacctcgattgaacccggcaggtccacagtaggagcaggaggaaggcagagctctgagcatgacctgaggtgagcaggctggcattagcagggacctcgttggagagtacactgccttcacgtaacacagtctggcagtgcctaagtttgtgttcccatttaagttgagcagtttgaggttgttagactctgaagcggttgaattgggagagtggagatacagtaatttccctgtccaggatcacaagaagcctaggagagacgcagtgacctacctctgcctgccgacagccctgccgaagcaatcagcagaacaccacgttactttttattggtcaactccatgtggctgactaggtcaatttttttttttttttttttctgagcaaaagcaggtttttatatgtaaacaatgacaaaagaaaggcctaaaactctgtgaatgtgaatggaagcttggagagccccgtttttataaacgcaaatactttggttgttaatcaggaaatccatatttattttgaaattaaatgtcaagcctgtggattgttttgaagttggtagttgatgagcgtttgtgtgaataaaggcgtcaccttgagcgcagcactgtcagggggagacgcagcgcctgctgctacagaagcccagacagacaccacaccaggtgcctcaggtcatctttcccctctgtgctggttgccacatgttagcaagcaccaaaaaagaaagcaatttttaaaccgctatttccataacgaaaccacacaatccagtgcttctgcatactgtgttatgttacagtccagttttgtgtgctttactacacagtttggttacaggacttctgtgcattgtaaacataaacagcatggaaaaggttaaatacctgtgttcagattgtaagatctagtccggacttgctgtgtatattgtaacgttaaatgaaaaaagacccccctttgtattatagtcatgcggtcttatgtatgataaacagttgaataatttgtcctcagactctttactatgcttttttaaaaattaatttaaggaaaaaatgtaaacatagtaaaaacaatcttcctatgcaatgactaataaagtagtacaccctacaaaaaaaaaaaaaaaaaaa

SEQ ID NO: 27 - DNA, 4331 bp, Cricetulus griseus
  modified_base (732)..(732): a, c, t, g, unknown or other
  modified_base (1241)..(1241): a, c, t, g, unknown or other
  modified_base (3858)..(3858): a, c, t, g, unknown or other
gctctttgtccagtgtcactcctcctgatgtttggtacaaaacatccatctctgaagagacgattgataatggctggctctcagctttgcagcttgaggcagttacctacgcagcccagcaacatgaaacattcctcccgaatggagaccgtgctggcttcttaataggtgatggtgctggtgtgggcaaaggccggacgatagcagggatcatatatgaaaactatttgttgagtagaaaaagagcattgtggtttagtgtatcaaatgacttaaaatacgatgctgaaagagatttaaaggatattggagcaaaaaaacattttaggtccattcattaaataagaccgtcttggaatatggggtgagggaactccattcagagaattcagtgattttattcaagcagtggaacgaagaggtgttggtgccatggaaatagttgctatggatatgaagcttagaggaatgtacattgcacgacagctgagctttactggagtgaccttcaaaattgaggaagttcttctttctcagagctatgttaaaatgtataacaaagcagtcaagctgtgggtcatcgctagagagcgatttcagcaagctgcagatttgattgatgctgagcaaagaatgaagaaatctatgtggggtcaattctggtctgctcatcagtaggtttttaagacctgtgcatagcatccaaagtaattggtctgcagtctacagganaagctagaactttggaggccttgggaagagggtggaggagaactaaatgattttgtttcgactgccaaaggggtattgcagtcactcattgaaaaacacttccctgctccagacaggaagaaacttttatagtttgctaggaatcgatttgacagctccgagtaacaacagttcaccaagagatagcccttgtaaagaaaacaaaataaagaagcggaaaggtgaaagaaataactcgagaaagcaaaaaagcacgaaaagttgggggccttactggtagcagctctgatgacagtggaagtgagtctgatgtctctgacaatgaagaaagcgactatgagagctctaaaaacatgagctctggtgatgatgacgatttcaatcccttcagagatgagtccagtgaagacaatgaagacgatccttggctaattagaaaagagcacaagaaaagcaaagaataaaaaaaagaaagaccttgcttgataaactagacaaattggctgaanacctccctcctaacaccttggatgaacttattgatgaccttggtggtcctgaaaatgtggctgagatgactggacgcaagggacgtgtggtgagcaatgatgatggaagcatatcttacgagtcaaggactgagattgatgtgcctgtggaaattctaaacatcacggagaagcaaaggtttatggatggaaagaagaatatttgctattatctcagaagctgctagctcaggtatttcattacaagcggatcggagagctcagaatcaaaggcgaagagttcatatgactttggagttaccctggagtgctgatcgggccattcagcaatttggaagaacacacaggtcaaaccaagtaactgctccagagtatgtctttttgatatcggaactagctggagagcagagatttgcatctattgttgctaagagactcgagagtttgggggcacttacacatggtgacagaagagcaacagaatctagagatctgagcaggttcaactttgacaataagtatggaagaaatgctttggaaattgtcatgaaatccattgtaaacttggattctcctatggtatcaccacctccagcatggaggtgcaccagcagaatgcgttgtttcagtatttttgcagacactcttactgcagttgttcagaatgccaagaagaatggaagatatgacatgggaatcctagatctggggttctggagatgagaaggtgaggaagagtgatgtgaagaagtttctgactccaggatattcaacctctggccacgtagagctatacacaattagcgtggagaggggaatgtcctgggaggaagcaaccaagatttgggcagagctgacaggaccagatgatggcttttacttatcattgcaaataagaaacaacaaaaagactgcaatcttggttaaagaagtcaaccctaagaagaaactatttttaatttaccgaccaaacactgggaaacaacttaaactagaaatttatgctgatctgaaaaagaaatataagaaggtcgtctctgatgacgctttggtacactggctggatcaatataattcctctgcagatacctgtactcatgcatactggcgtggcaattgcaaaaaagcaagcttaggattggtatgtgagataggtctccgttgccgcacatactacgtgttatgcggctcagtgctgagtgtctggacaaaagtggaaggtgttctggcctctgtcagtggcacaaatgtgaaaatgcagatagtgcgactaagaactgaagatggacagcggattgtaggtttgatcatcccggcaaattgcgtgtctcctcttgtaaatctcctgtcaacttcagatcagtctcagcagctcgcagtccaacaaaaacagctgtggcagcagcatcacccacagagcatcaccaacttgagcaactcgtaaacagcagcagcttccacgtggtgttgaatgctgtgagagcataccacttgcataaaaatcagggacagtttccaaagaattatttttttttttccagttgtgctctctagttaatttggggggttaaggacaaacctggaataggcagcaacgctgacagcaaatggagtggaggggacacgtgtctttcctcttgcttccttgggctgcctgtgctcttttactttgggtgaacagagcggatgtgtgtgtgcgcgcgtgtatgtttcagtctgtgagtttgttaaatgctacaagaccacagttggttgaaaatgcttggaacttcccatactggctttacttttcctttctacagtgctcagggttaacacagtacatccttgtcgttactgtgggagttccccggatgcatgtgttccaagtctctaaatacagaatatatatatattggtttcttttccaacttaaacaatgtttcctacagcatgaagtgaagggttgcgtgccatgcattcaggttcttttgtagcttttgttggcagtgcatgtctttgaaagcatgtgtaatcaagattaccacagaagtcacgtgtggagagaagcattggagatgtacagcattgggtattgcatttctagtgttgatacctgagtgttgcttctaaccctcagccctgcccactcttccctgtcccaagtttcttgtcaaagtagtaagtacatactattttttgttaatagtattcctaatttgtgctacaaaaatggctgtgacccttttcaatagttacattttccttaacttaaacatagttttaggaagaattgtaattggcttccatcttgcacacaatcttttttacttcattatctgaatctgcttggtcattcaaaccggaaaccgtacctgagttgtaaactagacagtgagaaaacacttggcttctgctgtatgttgttgttgttgttgttgttacccagtaacttgaatattgtttaatgtgctataagacattgtagagattatctccagctgttaaaaatggtaatgtacaaatgtgaatagacacttatctataacatgggtaagttttgtttcgcctataatagatgtttaataaaaaaaaacagtgagggacaattggtctttttgtttttactttttttttnttttttttaatttaggaaactttttactgaatttgcaaactattactgcttttcaataaccactttatcatcagccatgagaggtgggagaggtgtactgtgtctctgcaataaaacttgtgccaggttctacctccttgcgcaaagggtattttgtatgtaggcactggtcttcctcatctgacacggtgcatctgggaacatctgaaggagtccaaagacctgaaacagagtctcatgtgaactctcggtggcttctggtttcctcagtcctgtttgtattgctgctctgcacaggagtgtccatctgaaggaatgctacatgctgttcccacgatgccacattgctgccttcagcctctcctgggaacctgctcccaagtgtccagacccagtgctgccgtcattttgatgtgtaaactttcaattcagtctcatgcaatacaaagtgtgtcggcttcactgagcagggt

SEQ ID NO: 28 - DNA, 4327 bp, Cricetulus griseus
ctgggggtggggtggggaggtgctgactggaagacctctcgccaagggccccaatgagtggcacacagtcaactatcacggacaggtttcccctcaaaaaacctataaggcacggaagtattttgaaccgagagtcaccaacagataagaaacagaaagttgaacgcagtacatcacatgattttgaccccacagtccaggagaccaagaagcacatcccgcagctgcaagagcagctgtccaaagccacaggctctgctcaggatggcactgtaattgcaccctccaggccattaggtgacaccctaacagtcagcgaggcagaaacagatcctggagatagcctgtgcaggacggacggaagcgttggagaggcttctcggcccagtagtgacaatgcagatagtcccaagagtagtctgaaagaaagaatttatctagaggaaaccccagacaaaagtgaagggatccaggacactgacacacaatcgcttgcagtcccttcacccgtggagcaccccatattattggagcagaggatgatgattttggtactgaacatgagcaggtaatggcacacagacactggatacctgcctgccgagtaccatatcctctgccacttcaggggctgctctttcccaagaaggagggaaagagaatgatacaggatcaaaacaagttggagaagtatcggtgcctgcagactgcttggatggcacacctcgtgtctctaatactattttcgacttcccgcctcctttgttagatcaagtgcaggaggaggagtgtgaagtagagagggtgacagaacatggaaccccaaaaccctttcgaaagtttgacagcattgcctttggagaaagtcagagtgaggatgagcagttccaaattaaaagtggagcaccatggtctttcagtcactggtctacacagtccagacagagttttgggattagaatcgccattaatttcgtcaaaaccacagtctcattcactgaatacccctggcaaatcagaggcagagcatctctttgtgactgcgacacagtttgcaaaggagcagtgtgcaaatgggacactgaaggaagatgatggcagttacccagtcccagtcccacatccacacttgcctgtgtcagaggagcggtgggcactggatgcactgagaaatctgggcttgttgaagcagctgctagtccagcagttgggtctgcctgagaagagcacccaggaagactggcagtccttctcaagatacgggctagtttctgaagaggggcgggcagagtgtggcatccaggactcaagtgttaaggtctgtcctgccgaggaaggacagatgccttttaaaactggaactggtgacgttgcaacttgtgacagtccacggacttcatctgagtcttgtgttgcacaggattcagtgatactggcatcccaagacagccaggcaagtaacattttagtaatggaccacatgatcctgaccccagagatgcctactacagagccagaagggggtctggatgacagtggagagcacttttttgatgcccgtgaagcacatagtgatgataatccatcagaaggtgatggagcagttaaaaaggaagagaaggatgttaatttacacatctcaggaaactgtttgatccttgatggctatgatgcagtgcaggagagctccacagatgaggaggtggcctcctcattcgccttgcagcctgtaacaggcatcccttctgtggactccacccaccagcaacaatattcccctcagaatgctcattctgatggggcagtttcaccattcaccccagaattcctggttcagcgacgctggagagctatggaggatgcttgttttgagatccagagtccttcttcttgtacagattcacaaagccaaatcctggagtacattcataaaatagaggctgacctcgaacacttaaagaaagtggaggaaagttatgctcttctttgccaaaggctggctggctcagccctccctgacaagctctcagataaaagttagagcctgtgtcctggaggtgactgcaggttgttggattttgagtgtcggccctatatcaaccacatcccggctccagtgtggacacagagagagaatgtgacagaggatctgcctggaaccacctgggctcatcagccatgccccagggtgccccaagtgggactagttcttcagtctggcagctgcacaagtctgtcagtgagggaatgttagttctctcactctcctcattaccagaaatgcattttgattcagaataaaaaaccaaatgtaatagagcttcgggtgtaggatatgaaattgtacgtaggtaagacaaagagaaaatcagatgtatttatttgatttcattccgtatttgaaagcacactttaatttttactttgccttgtttttgttttaattgagtagtgggggagtttagccccttgtatttagcacacccaaggatcaattgttcctgaagccagggtcaggtggggaaggagaggttagcagagaggcagtgcagaggaagagagaggaatccctgaccttcactaacctgtaactacagccactctgtccagagggtcacctcagagggttacctcagaggtgctgtgtgcagatgcagaagacatgaggtatgtgctgcacagctggtcagagcaggtggacctcttccccaccccaagggaagcatctcttctgtgtaactgagctccaccccaattaacaggaatcctcaatacactaagtggcaggcacttgaaaatgggtgtatttcctttgttgtcttttctgttaatagttgggtagtttgggagtaggaagtaaaactaaatttttaattttactttgtacctcatctctaaattggaattgtattttgagtcataggtcaaacataactcagaatgggctttgaaattttaatgtagaacataatatatacgtgaagtttgggatttggaactccctgtatctcttaggagaagcaagtagaaaccaaatggttccattgtcttctaggcagcctcttacactacactatctggttagctcatcagagagcagtgctctcctggcttccgacactacaggtcctttcatggttctctagcacaactcaacccaaactccgttctccttgttgcttgctttccttttcctgaatcttagcctctcttagggttacagcagggctaactggaaaggtacttcggcatttcgtcagtacttccaaataaatgcgtatcattacatcttcagatgaaacctcaaaatcaagtgaattctgagaagaaaaacaaacaaacccactttttgaaagttcctttttatcttaccagccttacttcttgcctgtaccttccctttctggcctcccgtgccttccatttcattttggccattataatcacatccatttgactttgacattacatctcccttccatggtggtaacagtgagtattcctcctgttctggaatgaggtgggcattgtcatagtaagccatgtgtgccatgggcacgatccatgacactactctcttgtgagcttagtggctcttctgtcactaagtggcagattatctgtggagtgtctccttttcagagaaaagacctaatcaagtcaaaccagcaacccttcgaagtactgtaatttaaaaggatggctttggccatgtattttgtatagtttcaaagcagctaactggactgttggagttctgctgctttcacaacccaaattctaactatttattgtatcacatgggaggttatttcatgagtgtttttgcctttgtctttcccgaacaacttcttctgagggtttgggtaataaatgatcaggaaaaaaggggactagaaaccaatccctcccaccatttccaggtgccacctgccaagcagacatactacaagcatggtgactgtagcgtgcacactgttggctgtttttaatgagcctcttcccactagaacgtctcactgtcctcattcaccatacaatcatgtactctttaacagaaattgcttttaagagaaatctggaactatctttaaaaaaaaaaaccttattaataatcatgtatttttactgatcacattttgaaatgcctaaaagactttattgctctaattatccagatgtacctttgtaaaaagctcttttatgaattagctgataaggctgtatgtttctggaacaaaatattgggtcatctaaaactttctgttttctggggtctgggaaaatagaaaataagagttcaaatattaaataagacttaaaagaa

SEQ ID NO: 29 - DNA, 4318 bp, Cricetulus griseus
  modified_base (120)..(120): a, c, t, g, unknown or other
  modified_base (163)..(163): a, c, t, g, unknown or other
  modified_base (4312)..(4312): a, c, t, g, unknown or other
catgttacagtaactggctttatacctcttttagaatacgcttacacagccactctgtcaattaacacagaaaatattattgatgttctagccgcagccagctacatgcaaatgtttagngttgctagtacctgctcagagttcatgaaatcaagtattttgnggaatacacctaatagccagccagaaaggtttgatgctggacaagaaatgaattcttcagcttcctatgcagaaaatagaaatcagccagttgactcttctttagcttttccatggactttcccttttggaattgatcgaaggattcagcctgagaaatcgaaacaggcagaaaatacccggactttagaattgcctggcccatctgaggcaggcagaagaatggctgactatgtgacttgtgagagcacaaaaactaccttgcctctaggtacagaagaagatgtgcaggtcaaagtagaaagattaagtgatgaggaggtccatgaggaagtttcccagcctgtcagtgcatctcagagctcactgagtgatcagcagacagtgcccggaagtgaaccagttcaagaggacctcctgattagtccacagtcttcctctataggctcagtagatgaaggagttacagaggggttgcctacacttcaaagcacttctagcaccaatgctcatgcagacgatgatgacagattggaaaatgttcagtatccctaccaactctacattgctccttctaccagcagtacagaacgaccaagtccaaatggtccagacagaccttttcaatgtccaacctgtggggttcgattcacccgtgttcagaacctaaaacagcacatgcttatccactcaggaattaaaccatttcagtgtgaccgctgtggaaaaaagttcaccagggcgtactcgctaaagatgcatcgcctaaagcatgaagtgatttcttagtgccggactacttaaaccaggagcaagaagagactcttgttcagtatgatcttggagaacacacttttgaaagcaactcttctgttcaaatgcctgtgatctcacaggtctcctcaacccagaattgtgaaagctctttccccttggggtctcttggtgggcttgcagagaaggaggaggaagtgcaagagcagccaaagaccagtgttcatgccgaggctacccaagatgacccccctaagtcagagctgtcttctataactatcgagtaattttgtgatttggcctcagttttggtttttggaaagtgcctgtgcttggtcttaacgtttaaatttaattttttaaacaaagaagggttccctttgtaagccctgtaattggagggttgctttgttttgttttttcatagctgagaaattgcttctgtatgtatacaataaggtaacattgaagcagaacatagactccagaattaaggaaaagcaactgatttcaaatggtggttcttcctcccattgttaaaagtggtcagtagcagatacagaagaaactaggttattgaccttcctgagatgagagggctcatgggaagttactaaacagaatttgacaatgcctaagtaaatgtttactcctaggtgcagggtgttataaaccctgtagttttggaagtatttatggtttttttccaaatgaaggcaaataacttttgaaatccagcatattctttttttaagccattgtggattttcatggtgaaaaattggtattggcaggcttttcctgtacctttatagtaccactccagaggctaagcagtgtgattgagaggagtcaggctgtgcatggaatggccagggtgcagaatgaggtatgtataccccagctttcctggcctttggatactgatacctggctaactaggacattgcccagataagtgtcctcttgtcccatcaacagtacttttcacttgcatatactattgtgctgccatataaaagaaaatattgaagatattctatattttatatataggtttatgtattgttggggatgtttatgctgtgctgttttggacaaaataaaagaattctgttttaaggctatttcacaggatgtaagcaataatgtggaagataagaagttgtaaaatgatcatctgtgactcagaaattgaggggggttgttaagactaaaaactaaaactttcactaggctacttgtgatgaaatttatatgatactctagattgggatatacattttttctggtgccattaaagcctctttgatctgaaatattcatgagttcatgaataatgaacttttgagtaatttttctatatagaaaatcaccccgaggttcatcattatgatagctcctgatagggttagaaaatagaaacttttgtttttcttttctttttatttatttttgtttatttgtttgttttacctaaaacagagtttctctctgtaacagttctggctgtcctggaactcactttgtagaccaggctggactcgaactcacagagtcctcctgcctctgtctccagtgcgctttctctggtttgtcatttaggtagcagtttcaagttgacagatgtcgtagaaagtctcatactgagagtgcattgcagttttgaaagttggcactgcttttctactccccggagtgactagcatcgggtatttaaaaagtgagatcataaacttcgttgttttgcttatacaaaatgatatcttctaatgcttatagttgaaggtattgtttaaagaaacagcagtccctgatggggtaaatttggttttgaccccagttctaatgatgtatttagtttgctgatgctggtgtctcctgctgcatcagctagatattgcctgcctctttgttaggcacccttggggcaccttatgttcaccttgaaggatggtatgtggcttcctagtgcctctactgtcttttcaaaagccattttataaaaatcttaggtagcctattttaatatttaaatatatatatttgtgaaagatacttttagaacagactttttttttaacattaaaattcctgtattcccatttataagagtaaactaaagtttttccaggcttaggaagtatcttttttcagaactgtaataagaaagtcagattgaggtaataaactggagagttcaatggtagggaaaaagatgtttgttgaggggagacaattttaaaggtgaaaacaattgctttgatgtaacaaatttttaaaataaaattgtggtttatttctgtaattttgtatttgctgctatagtagctcactattttacagggctaatacataaatctgaccccatttaaaaactggggtcctgtctaatacaggcggcctagaaagagactgcaccagtctgccagacggtggccgagtgttctgtgaggctgatgcatgctttagtatttgcctgtagctggcagcacggaggtcagggaaacttcctaccctgccagctggagcagtgggactcttggggagctggcaactgtgaaacaggccaaagagggcacttgtgaggaaaagctgaattcagttacatgaataggcatttccatgtcctctacccctctcctagaacagtactactctcccctgtgccagtccccagttcaccagctttgtaccagttgtcgtcatctcattcaagtatagctttacttggtgacagtggccatagctaaattacttggcatgtttgacttcctacaataacaaaatggtcttaaactttgttttgtttgatttccttaaaaaatgtatacggtgtcataacttcacattttatatattagtatctggctattagtattttacagaaaccatggttcttggtgactacatatatatatatatatatatatatatatttttgtgacttttgtaaactaagtgccgtttcaatgttacaatcatttttagagttattgtaatcaatgtgaatatcatgttttttcaaatctgttctgagcctagtgtttgctttgtgaaaataatgtgtattgtatatattctgtatagttaatactgtactgaaatattagcttgtttgatatgagaaaagtatgtattgagtacctttttgctagcctgattgcttaatcttttttaaaaaagatttaaacttttgtttttttaatctttaactgacctttattacatggtcacaaataagttacagttagaagggatggacagggaaaaattagtcttgagtgtctttggatagaaacatgagactaagatttgttttgttttgtttttccctcatttaaaatatcttactggtgtttttatgaaaaaaaanaaaaaa

SEQ ID NO: 30 - DNA, 4309 bp, Cricetulus griseus
gggccgggaggcgacggcgctggagccgcctaggccaagtgcctgattgggcccagaaaatgggatgccaagcctccacgaggagcgcctctctgagctgctactgtgacagcaagtgaacaagctgccagaggatgtccactactacagcggctgcccccacggggatcccggcagccccgggccctgtgaaccctccccacccgaagtctccaaccccagcaagcctggccgaaagactaaccaactgcagtacatgcagaacgtggtggtgaagacactctggaaacatcaattcgcttggccgttctaccagcctgtggatgcaatcaagctgaacctgcctgattatcaagaagagattagaaaataattattattggagtgccagtgagtgtatgcaggacttcaacaccatgtttacaaactgttatatttataacaagcccacagatgacatagtgctaatggcccaggccctagagaaaatctttctgcagaaagtggcccagatgccccaggaggaagttgaactattgccccctgctccaaagggcaaaggccggaagccagctgcaggagcccagaatgcaggtacacaacaagtggcagccgtatcctcggtctccccagccaacccccttccagaacataccccccactgtatcccagacacccgtcattgctgccacccctgtaccaaccatcactgcaaacgtcacatcggttcccgtccccccagctgccgcaccgcctcctcctgcgacacccattgtccctgtggtccctcccaccaccgccctgtagtcaagaaaaaaggcgtgaagcggaaagcagacacgaccacacctacgacatcggccatcactgccagccggagcgagtctcccccgccactttcagaacccaagcaggccaaggtagtagcccgacgggagagtgggggccgccccatcaaacctcccaagaaggacctggaagatggtgaggtcccacagcatgccggtaaaaagggaagctgtcagagcacctgcggcactgtgacagcatcctccgggagatgctgtccaagaagcatgcagcctatgcatggcccttctacaagccagtggatgctgaggcactggagctgcatgactaccatgacatcatcaagcaccccatggacctcagcacagtcaaaaggaaaatggacagccgtgagtacccagatgcacagggcttcgcagctgatatccggttaatgttctcgaattgttataagtacaaccctccagaccatgaagtggtggccatggccagaaagctacaggatgtgtttgagatgaggtttgccaagatgcctgatgagcctatggaggcacctgcactgcctgctcccacggcccctatagtgagcaaaggtgctgagagcagtcgtagtagtgaagagagctcttcagactctggcagctcagactcagaggaggagcgagctactcggctggcagagctgcaagagcagctgaaggccgtgcatgaacagctggccgccttgtctcaggccccagtgaacaaaccaaagaagaagaaggagaagaaggaaaaggagaagaagaagaaagacaaggacaaggacaaagagaaggagaagcacaaggccaagtctgaggaggagaagaaggccaaggcccccccaccagtcaagcaggcccagcagaagaaagctcccaccaagaaggccaatagcacaaccacagccagcagacagctaaagaagggtggcaagcagacatctgcatcctatgactcagaggaagaggaggaaggcctgcccatgagctatgatgaaaaacgtcaactcagcctggacatcaaccggctgcctggcgagaagctaggccgtgtggtgcacatcatccagtcccgggagccctcgctcagggactcaaatccagatgagattgaaattgactttgagactctgaagccaaccacactacgggaactggagagatatgtcaagtcttgtttacagaaaaagcagaggaaaccattgtcaacaagcgggaagaagcaagcagccaaatcgaaagaggagctagctcaggagaagaaaaaggagctggagaagcggctacaggatgtcagcggacaactgaacagcaagaaacccactaagaaagagaagtccagctcagcaccctcgggaggcccatcaaggctcagcagtagcagctcctctgagtccgcaagcagcagctccagtgggtccagctccgacagcagtgactcagagtgaaattggactgtaacagctggacaaatggacgtggcacacgccgactgcagtgtcccctcctatggttaatatactttcgttccatggtgtgcaggttttcttttacttcagtgttatgatctcttccagctgtgctccggtagggcagagagcctggcttgtgcaccagacccaagagagggccgagctctgcaggaaatgcctttgcagctcagtttagttgtttggagactgcggcctgggatgctaacctgataaccatagacacagtgggaggcgtggctggttctgcccaatacctcttcaggcccagcctcgcccttagtaacgtgaaggaagcttttcagttgctctggaatgggttctgtgtttgagagctgttagaacactaaccagcaggttacttctctctgcgggggctgaggacagatgtgtcagcccacggaaaccaggctgggccccagcagagggtcctcatagctgcaggccagagcctcccacctctgggttgggtgtggaggaagaggggtgctgagttctctgaccctatggctgtgtgtgcagcgtgcaggtttcggggcaccgaaacttttacctcaacttaagggaataaaaacaaaaaaaaaaaaaaagttaaccgggagaaaagttgatgtattatcagtccaaggtcttgacatttaattttctattgtaaaagtaataatatacagagtttaacagaaagttctcatcagttttgttgtttttgaggctgccaaatggttttggaattcagggtcagcctggattagctctgagcattgtggcctcagccaggaggacacgggccagtctcccaggcctgagagcgccaagtgcagagccttgtgttgagtggttttcttgtggtggggggggaccctgtgatttcttccattgcatctggcagagccaaggactcatcctcaacatccctacaagggagacgtttaaaatttctaaagtcgatcctagcagcccttgtgggtgtggctaggcagtggggtatcaagctcgggaagtggctggctggctgccatgtctagacgcctggtgaattatcagccagtttgttaaacttgtaagccagttttgtttataataaaaatataagtggattttaaggttccatttttttaaagttacccttgtttttcaaaggtattttttaaactagatctttaatagaatatttaagctgtgactgtaagaaataaacaggaggaaactgacaggccttcacatggggtctcagtggtggcctaccatgacagcctagccatcatgcctaggcaaggcacagtgcctgggcatgcatagagtgcctctgtgagctattaggcaagcagagtccagtcctggagtggcatcccagcagcggggcagaggtatagagctggttgcacgggatggagtctggcatttccatgactgtggtccctactgagcagcttctgtcattggtgctttttaactttttttttttttctttttgtccagacttaaggggttcagacctcctcaggctgtgtaacttagctcgcttacagattggagacattttcttctgtggttttcttgatttgtccttttgcagctgtcataccttttacagtcatttgggaaatgcaagcccactgttaaagctttgtcatcttgtttatcactgtccctgctactggcataacacttccagaagcttttcttttttatatatatattatatatatatatttaaaatgtttcttttctgtatgatgtgcatgcaagtttaccgtaacttttcttaaacttttcagtgccgtttctagtatatccctgtaaatgtcagtttactgaagatgagtccattgtaagtagttttagcttgttttttgcaatgccggcctcaacaccacagagttaaaacggtaggaagtactctggtgtctctggtaatcatgaacctttctcctggggtgtttgttttgttttcataaaaaaaaggggaagaaaaagaaaaaaaaa

SEQ ID NO: 31 - DNA, 4290 bp, Cricetulus griseus
  modified_base (1045)..(1045): a, c, t, g, unknown or other
  modified_base (1097)..(1097): a, c, t, g, unknown or other
tggaggtcagacctgttgatagatgagaaacttgctttctcctttggcaggagatgatgatccattccttttggaaggagatgcaaatgaggactgtaagccttttgttttaccggacactaaacctaaaattaaggatactggagatccgatcttaccaagccccagcagtgtgacgctgccccaggtgaaaacagaaaaagatgatttcattgaactttgcacccctggggtaattaagcaagagaaactgggcccagtttattgtcagtcaggcttttctgggacaaatataatggctaataaaatatctgccatttctgttcatggcgtgagtacctctggaggacagatgtaccactatgacatgaactcagcatccctttctgaggagcaggatcagaagcctgtttttaatgtcattccaccaattcctgttggttctgaaaactggaataggtgccaaggatctggagaggataacctggcttccctggggacaatgaacttcccaggccgatcggtgttttctaatggctattccagccctggaatgagaccagatgtaagctctcctccgtctagctcctcaacagcaacaggaccacctcccaaactctgcctggtgtgctctgatgaagcttcaggatccaagtgattgcagccgtgaaatgggcaaaggcaataccaggattcagaaacttacacctggatgaccaaatgaccctcctgcagtactcatggatgtttctcatggcatttgccctgggttgggagatacatacaaacaatcaagtgcaaacctgctgtgttttgctcctgatctgattattaatgagcagagaatgactctaccctgcatgtatgaccaatgtaaacacatgatgtatgtctcctccgagttaaaaagattgcaggtatcctatgaagagtatctctgtatgaaaaccttactgcttctctcctcagttcctaaggaaggtctgaagagccaaagtagttatttgatgagattcgaatgacctatatcaaagaactaggaaanccattgtacgaaaagggaggaaactccagtcagaactggacagtcggtttancaactgacaaatattcaagttattgtacagctgtttaagatgggcagctagttcatagctttcctaaactctaaacattaatcttctgtgtgaaaatgggttggtgcttctaccctgatggcacttagctatcagaagaccacaaaaattgactcagatctccagtgttcctgtcaaaagctctttgtatatatctgcttccatggataattagataggttgtgcagattaccatcctaactggtgtagagcacctacctagtacagtgagccactgggtaaactggtgggtgatggtcaaaaaaaaaaagctagttaaagacagtaactactaaaaggcccagtttgtacctaattccccttctctacaatggtgagatgacaacagagtttgtaaatgaactctttcaggaccttctggaatggtttgtgtaacatcttagcacttatgattccaagattgtgtgacaaagctgtaacttttctttaaattagaccaagtaacttctctccttaaactttacccccaaactaatctctaataaggcaagaatggctagacacccattttcacatccccgcctgtcaccaattggtctagctttcctggtggtacaggaaaatcagctactgatttttgttatgtagaactgaatgtcagaaaccgcgtgtgtcaaccacaccacacatcccaacatgtgccatagcgtttaacaggtcttgtgaacttcttcttcacactgagagttatcattgtaaacagaacagaagctgtggtagccctttctgtgtgcaccttaccaactttctgtaaactcaaagcttaacacacttactaagccacaaaaaaaaatttgatttctacttaaggtggccaaattatttctgtaatagaaaactgaaagtctaatattaaaaatatggaacttctaatatatttttatatttagttatagtttcagatatatatcatattggtattcactaatctgggaagggaagggctactgcagctttacatgcaatttattaaaatgattgtaaaatagctgtatagtgtaaaataagaatgatttttagatgagattgttttatcatgacatgttatatattttttgtaggggtcaaagtaatgttgatggatatcctatatgatttatagtatgtgagagcatccatacaggcctcagtggtcttgggagttaaaacttgtttgctctaagataggaagagggagatggagactggccctgtgtgcagtggaggttgctgaggctttgacccagtcagattacaggggaactaattcccaacctcccattttgaccatccttatccaaccttgatcctgtcagtgcaaggttagtttattaaatccaggacagaaaggtggtgctgatgtagttataggcaccatctagtaacagggttgtttcacatgtggcctccccacaggttaacaggaacagaggctttagaagtttggcaataatatgaatagaggtaccagcaatatgtaaatactacagaatcccataggtcaccaataatacactaatcctttccatcctaaaatagtttatttccaactaaaatgaggacatgtttatgttttctttgaatgctttttgaatgttgttattttcagtattttgcagaaattatttaataaaaaaagtgtaatcctttgctttttgaattctctctaaaagggaatgttcactttgtaatggtttaaattggtctcaaagtactttaagataattgtaacccagctggatgtgaaatttaaaggtgcctaagaaataccacttgaatattatcaatgacagtgttaagtttcaaaatgagcttctcaaaaatagattattgtacatttatggaatgttatatggttaaaaccagaaagcacatcacacataaatctgctttcagtcccaaccagcttggctttcaaaaaaatcaactccaaaatttgttattaccagaaggcaacagacacacaaatttattataggaagctttccattaaatggctaagagctgtgctccttcagtatgtgggaaaggagagctatcctcattctgatagagtgtaggtgagaaagctatggtactgtttgagagtggcttcaatttctgtgtgtgatttcataccattccaaactatttagatctataataacttcaatgagagttggagaaatgcctacatgattcacaacagatcttgaaaactatctttaattactggtaggacaaaaagggacattctgggtattttaggcattgacttgggatactgtataagcagaagtgagaaggcaggaagcctagggaagggaaggggacgagcaattccagatggacattggtcttggtttttgctccctcttatgtactgtgagaccatatcaccataggataaaccatggtattatgcttgatctgtcagcattcaaggatcatggtagccttcagtgagcttttagatcttggttggtcaccccaacaataagctatagttgaatgtgtttcttatgtgcctggtttcagtgttagagggtaaaataaaagtgtgcagaagacactgaaagccacttcagatataagttttctcattttgcaggctttcagtcagcctggtccatcagacttgatgactgggttttcaggaaagggttggcttctgtctagagtatgcctgaaaggattttattttctgataaatggctgtatgaaaatacccttctaaataacctgcttaactacatatagatttcagtgtgtcaatattctattttgtatattaaacaaatgctatataatggggacaaatctatattatactgtgtatggcattattaagaagctttttcattattttttatcacagtaatttttaaatgtgtaaaaattaaaaaccagtgactcctgtttaaaaataaaagttgtagttttttattcatgctgaataacctgtagtttcgaactgtctttttatctccacagtgaaatgtcagactgtaaaattttgtgtggaaatgtttaacttttatttttcatttaaatttgctgttctggtattaccaaaccacacatttgtactgaattggcagtaaatgttagtcagccatttacagcaatgccaaatatggataaacatcataataaaatatctgctttttcatta

SEQ ID NO: 32 - DNA, 4288 bp, Cricetulus griseus
ggatctgcgagctgctccctgaagccgccatcaatgatgtctacttggcacccctgctgcaatgtctgattgaaggcctcagtgctgaacccagagtggcttcaaatgtgtgctgggctttttccagtctggctgaagctgcgtatgaagctgcagatgtcgctgatgatcaagaggagccggccacctattgtctgtcttcttccttttgtagctgatagttcagaagctgctggagaccacagacagacctgatggtcaccagaacaacctgagaagttctgcatatgagtctctaatggaaattgtaaaaaatagtgccaaggattgttacccgcagtgcagaagaccaccctggtcattatggaaaggctgcagcaggtgcttcagatggagtcccatatccagagcacatcagatagaatccagttcaatgaccttcagtctctactctgcgctactcttcagaatgtactccggaaagtccagcatcaagatgctctgcagatctctgatgtggtcatggcctccctgttgcggatgttccaaagcacagctgggtctgggggagtgcaggaagatgccctgatggcagttagcacgctggtggaagtattgggtggtgaattcctcaagtacatggaggcctttaaaccattcctgggcattggattgaaaaattatgctgagtaccaggtgtgtttggcagctgttggcttagttggagacttgtgccgagccctgcagtctaacattttacctttctgtgatgaagtcatgcagctgctcctggagaacttggggaatgagaatgtccacaggtctgtgaagccacagattctgtctgtgtttggtgatattgctcttgccattggtggagagtttaaaaaatacctagaggtcgtattgaatactctgcagcaggcctcccaagcccaggtggacaagtcagactttgacatggtggattatctgaacgagttaagagaaagctgcttggaagcttatacaggaatcgtccaaggattgaagggagatcaggaaaacgtacacccggatgtaatgctggtacaacccagagtagaatttattttgtcttttattgatcacattgctggagacgaggatcatacagatggagttgtagcgtgtgctgctggactgataggggacttgtgtacagcatttgggaaggatgtactgaaattagtagaagctaggccaatgatccatgaactattaaccgaaggacggagatcgaagactaacaaagcaaagacccttgctacgtgggcaacaaaggaactgaggaaactgaagaaccaagcttgatctggtaccattgggatgatgacctgagacccccactggaaatctccaatcttttgaaaaaacccggaagtgaggagtgtgcacggatgctgaatgtttgggaatgagaggatgagtgagtgaggcttgaaaacaccacattgaaaatcctgccacagccgacaacagcagtgctgttagtgagctaagtaagcactgactttgtagaaaaacataacatcagccatcttggaacagagaaacaatggatttacttacttattaaaaacaaagttgtctcttcccaggggaggctagaactagctttcctgtcttggccggtgccgaatgggatgacaggtttgggagaggtggacctgggttcagctgtggggctgtattgtaaaaggcagcctggccattgctactgaggagaaagatggagcccgggtcttgagcccaccttcactgtaccgttgcacttggtactgtacatgtgcccgttagaaggcgcgtgggggatttcacagtctgagaatgagtgtgtgtgagtgaggcggtatccacattctcaacttcaagtcattgcagtttctttttcccagaaaacaaaggggtttgatgttgcatttcataaactaactgaagttctggctactgatgcagcacaagagacacgttttaaaaagaatgaggaaagatgctctttaggtttggtttggtttcatttttaattattctagggaaaacactgacgaatggtcagagctcctgtcctgatcttttcatcaaggcgccttttctgatactatggttcagctgtgaatgtagctgtggggggaggggggagaaaagaaaactctggagttagaggatatagaaaataaaagtacagttgttacaaataaaatgcagacttcaaagacagaaaaagccacaacccaaaccaaatttaaatgcttgaaaattggcatcagaaacaagctctctcctgacttatattgtggcagtttgaatgccccagaaaactgtgccaaagagtttagaatacaattgtacaataaaagtaaatacaagctcaaaactgaaaacttcaggtaactattttgaattgcaaatgacaaaaatttaatgttgaacgatctgataaaataaccatttggaaactgcttggccttctgttcttttctttgattgactgcaatgcggtattggtctcttgctgcacttcaaaaccaactaaccaataaaacaaatttgtgtgtgtgtgtatatacgtatacacatacactaactacaactgttgtgatgaaaatggcactaggaaaaggttctatttttccactgaagttgaagatgaataaaatggtgtcaaacattgccctgctcacacgctttagtaattttttaaagtgtgatgtgctgtgattaccataaatcagaattatcttcccttttgaaagggaacaaggccccctgaattttagtttttcagcaataagaaaggatttctgtgaactggccctcttggcttgtgcagaccttaggagatttgctggcgtttggatatgctgctttgaggaaatgataatagaaaccaagggagtttgtagtacttcctggtagttggaagatttaaaacacaaaaccctcaattcccacttcatttccattgtagtagagggtattggtgtaggttttctccacaactcctttcatcccccttccctgtctaagcccgttcctcagggggactgggtctgtttgcctgtccatacgcagcatctgtagtagctctttacagggtatcagatattgtgccttttggtgccaggttcagagtcaaagtgccgatctgatctgtgacccggtgtataaaaaagtatttgaaggagagaggctccattgtgagccaagcagtaactaggactcgagccctagtgggaagagaggcccaggcctctgaatgccttgcttccacccttgctgttttttcagatttactaaccattcctgatactagatagggttggggcagggcttagggagggcagaaatattggtggaaaggaaaaaacaatctgatcattcctcagtgctacccatttctgtcctgtgtgggctgcttagcgagacagcaggggaataaagtacaccgagaaccatgatgaaaacaaaaccttgcgtgtgttttgtcatgttttgttccagggaagcagttgacaagtgctgttactaaagctttctctcagatgcattcagtgctggagaggaggaaatgggctggttggattgtggtcttggtgccttgctattctgcactgcttatgcgttttatctttttagttaccttcagctactgttttctaccatctgggtgggtgtctttaatcagtttaaggcaactgaactcaaaatgctctttgtccactccctgtctgggccttccccacccggagtcttggcacattccttcaagaatgtagttaccgtctgcttggaaagatgtcagtgcaaatgtgaagaaaatgggcatcaaagtagacttgggtttgccacgagtggcagctgcctgcaccaattacattggttaattttgcttttcctttttctcagttcccccagccctctctccctctgtgttgaaatgttgaagttttagctgtcagaggcaactgtaatcctgccctagggtctgtggagacgtggagagacttgctcagtatggtgttcagaaccaagcagtctccttactctttactattttaagatgtgtgtagtctgactttagaagaagtccaaattccatcagctttgatagcatcaatctgtaattggcattcagaatgccgttggcatgccagtctgtgatggcattaaagacctgttaaaacacttgagcccaactttattaaccaaaactgataccaccacctttatcttctgaataaagtccgctttatttttattttcaaca

SEQ ID NO: 33 - DNA, 4278 bp, Cricetulus griseus
aggagaagcaccagctcaagctgcagttcgaggagctcgaggtggactatgaggccatccgcagcgagatggagcagctcaaagaggcatttggacaagcacacacaaaccacaaaaaggtggctgctgatggtgagagccgggaggagagcctgatccaggagtcagcctccaaagagcagtactatgtgaggaaggtgctggagctgcagacagagctgaagcagcttcgcaatgtcctcaccaacactcagtctgagaacgagcgcctcacatccgtggcccaagagctaaaagagatcaaccagaatgtggagatccagcgtggccgcctgcgcgatgacatcaaggagtacaagttccgggaagcccgtctacttcaggactactcggagctggaggaggagaacatcagcctgcagaaacaagtgtcctgctcagacagaaccggatgagaccgagtacctcaacagccagctggaagatgccatccggcttaaggagatctctgaacggcagttggaggaggcgctagagacactgaagacagagcgggagcagaagaacaacctccgcaaggagctgtcccactacatggccatcaacgactccttctacaccagccacctgcaggtctccttagacggcctcaagttcagtgatgatgccgtcactgctgagcccaacaatgacgctgaagccctggccaacggtctttgagcatagtggcttgctcaaatcctcactggacaacaagacgtccacacccaggaaggatggcctggctccaccctccccgagccttgtttccgacctgctcagtgagctccacatatctgagatccagaagctgaagcagcagctggtgcaggatggagcggggagaagatggggcctacgggccacactgcaggacacacagaagcagctggagcaggctcgggggtccctttctgagcaacaggagaaggtgagccgcctcacagacaaccttagcgctctgcgtcgctgcaggctggcgagaaggaccgtgatagccacgaagatggtgactactatgaggtagacatcaatgggcctgagatcatggcctgcaagtaccacgtggctgtggctgaggctggtgaactccgggagcagctcaaggcattgcgcagcacacacgaagcttgtgaggcccagcacgcagaagagaaaggccgctatgaggctgagggccaggcccttacagagaaggtctctctgctagagtaaggctagccaccaggaccgagagctgttggcccagctggagaaggagctgaagaaagtgagcgatgtggccggtgagacccagggcagcctgatgtagctcaggatgagctggtgaccttcaggtgaggagctggccaacctcctaccaccatgtgtgtatgtgcaacatgagaccgcccaaccgtgtcatgctggattattaccgtgagggccagggcaaggctggccgcaccagccctgagggccgagggcgccgttcacctgtccttttgtccaaggggctgttggccacagaggtagggcgagcagatggtgggactggggacagcagcccctctcccagctcttcactgccatcaccattgagtgacccccgcagggaaccaatgaacatctacaacctgatcgccatcatccgagaccagatcaagcacctccaggccgccgtagaccgcacgactgagctgtcgcggcagcggatggcctcacaggagctgggccctgctgtggacaaggataaggaggcgctcatggaggagatcctcaagctgaagtcactgctgagcaccaagcgggagcagatcaccactcttcgcacggtgctcaaggccaacaagcagacagctgaggtggccctcgccaacctgaagagcaagtatgagaacgagaaggccatggtgaccgagaccatgatgaagctacggaatgagctcaaggccctcaaggaagatgcagccaccttctcctctttgcgcgccatgtttgccaccagatgtgacgagtacatcacacagctggatgagatgcagcggcagctggccgctgcagaggatgagaagaagactctgaactccctcttgcgcatggccatccagcagaagctggcgctcacccagcggctggagctgctagagctagaccatgagcagacccgcaggggccgcaccaaggccacccccaaggccaagccagccacgccgagcagctgctgggaggacgtggccaccggccctgtcacactgcagcccctcccctctcccctcccgtggcctatgcagaggaaggaagggcagcctaaagtccactttagagatgtttggatatgccactgtaattattttcaaaatagcattccccaagttttaatgggagaaacaaaaaaaaaaagctgcgagctgctgcttggaaaggctgtgtacggccgaagaacctgcttccacaaccactgccaggctctctggggcctgctggaccgcctgccatgagggggtcctccttattacacatgctccttttttatccgatcaacctgtgcacttttgatattttgatattatatttgcttccttaattcctcgcgtagagacggtctccgatgccgtggtctgtgctcgtggtcctgtagctgtccgtcctagctccggcgtgttgatctggcgtcggcacaaggagagctgtgctccatagtgtgtagatagactgcaggtgaggcttcgacccggcaaggagctggctagtatatccacgctgtggttcaacagcctttagaggacacggcattgtggttcatgtttgaaattacagattttaaatgccatgttcattaagaaatccagggtattccaattctggggtttttcatattgtattattattattcttaggaatagttcaacgtaacaagaagaaaacttgacctttgctctggttaaaacagtaataggcacttgaaagcataaattattgaatgagtagtattacctacaaattccagaattttctgggttttaggacattgtgaagcatgactgactaacagaattttatacaactgcaccagtgaaattccaaattggaattgttttgttattctggttgttgtgccaaattgtggtacacttagaaaattctacagttgtcgatttttagggtgttctatttcaacacctttttgttagtaaccattgccagtagtgccttcatcagttaagggaggtgtcccagccaaggaagctctctacaataggcagcagagagctagttgggaatgctgaaggccagtgtggaccacaggtaggagcgggtacctggctcacttcgtacctgggcatcttcattgagggagagagaaccgtgattgtgcaaaattctgttagtcagtgattcttcacatgcaaattcaggggcttagaaacaaaacaaacacaaaacacctggagtgtgctttgggaaccaaatggacttcatgggacacgctaagcaagctgtacaaacgtcacgtttgtgaagagccgaggacgtcaggagagccggcagcgcagtcggcctgtgagtagggaagagggttagccatagtattctttgcaaatgtgaaaacaagacattatctcttctcttgcttggtgtaactaatcactgttaatttcaggaaacagaagtcaataaactccttagcaaactgtttgctaagtgaggtcagggtgtggtcaaattggtactagtggaggaagagaaattgttctctggcctccaaaaaaagagacaaattataataatataaattgttaggaattgaagaattctgtttcctggaatgagcatttcttattcctagttgttgggactctttgccttctgttacagtgttgattcatacaaatattgttacatttaagataacatcatctgtatggggtatttatttgcaatgatgtctaagtactgtattttttctgtgtgttactttagtgtcagaatgttggtctttattttaaagtcatatgcatgttctcctgccaaggaacctttacacagacccaaaacaaataataataagcagatgccttcagtttctgagaaaatgaggccaagtgaagaaaaggcataggagggagaaattagccgagacgtaagatgcagttgtgtggcgggaatgcctccacagccagcgcacataggaaaaggggcctgggtaaagagtcacgttggtaggaccaataaagaataaataaaaaaatagaagca

SEQ ID NO: 34 - DNA, 4269 bp, Cricetulus griseus
ctatctttggacctacaaaaaacttgaaataggatttaatggaaatcgaattgttgatgttaatctaaccagtgaaggaaaggtcaaattggttccaaatactaaaatacagatgtcatattcagtaaaatggaaaaaatcagatgtaaaatttgaagatcgattcgacaaatatcttgatccatccttttttcaacataggattcactggttttcaattttcaattccttcatgatggtgatcttcttagtgggtttagtttcaatgattttaatgagaactttaagaaaagattatgcccgatacagtaaagaagaagaaatggatgacatggacagagacctaggagatgaatatggatggaagcaagtgcatggagatgtctttagaccatcaagtcaccctctgatattttcttctctcattggttctggatgtcagatatttgctgtgtctctcattgttattattgttgccatgatagaggatttatatacagagaggggatcaatgctcagtaccgccatatttgtctatgctgctacatctccagtgaatgggtattttggaggaagtctgtatgccagacaaggaggaaggagatggataaagcagatgtttattggggcattccttattccagctatggtctgtggcactgccttcttcatcaactttatagccatttattatcatgcctctagagccattccttttggaacaatggtggccgtttgttgcatctgttttttgttattcttcctctaaatcttgttggtacaatacttggccgaaatctgtcaggtcagcccaacttcccctgtcgtgtcaatgctgtgcctcgtcctatcccggagaaaaaatggtttatggagcctgcagttattgtttgcctgggaggaattttaccatttggctcaatctttattgaaatgtacttcatcttcacatctttctgggcatacaagatctactatgtctatggcttcatgatgctggtgctggtcatcctgtgcattgtgaccgtctgtgtgaccatcgtctgcacatacttcctgctaaatgcagaggactataggtggcaatggacaagttttctctctgctgcatcaactgcaatctatgtttacatgtattccttttactactattttttcaagacaaagatgtacggcttatttcaaacatcattttactttggatatatggcggtatttagcacagccttggggataatgtgtggagcaattggttacatgggaacaagtgcctttgttcgaaaaatctatactaatgtgaagattgattagacacctgagacaacctggaacttgggatcagtttctctttcatgccggtggagcttgcacagaaaagaagaataagcggaagaagagatttgggcttaacactgggtactcgtgtgtctctctcatgggtggcttaaagtgacatctatctccattgatcctaggttcttactgactgctttctccaactgttcacagcaaatgcttggattttatgcagtaggctttactacagtacatggctaatcttccccaaactagctcattaaagatgaaatagaccagctctcttcagtgaagaggaccaatagtttatttaaagcatttgtttcaataaaagaactatagggaaacttggatgctaaaattccatgagtagaaatcttcctggcacttagtgtttctatgttattgaaaaatgatgttccagaaagattactttttctcttatttttactgccattgttgatctattgtgggacatttttatatattgaacctgggttctttttgacctgtttttggtcgtccctccattcaactgcattctttttttttttttaaacaaaattaaaaactattaaattctgcatggaatatatctgctgtcatcttaatcttagttggatcaacctcatttatttatcttaaaattaaccagttctatctcaattccatccaaagaaaatacagtatgaaaatagaggtgaactctataatgcattttactgtacagttagaaagcaaagtgttaaatggagaagatccttgtttttattaaacatttggagatttagataaattacattttacctgaatgtctaaagtgattatatttccctccccctccccctgttagtcttacatctttttttgggtttcaatgaaggctttacacaagaaattattaaaaataaggggggcaataagtgtatataacattaataatgtcgtgtagctgtaggtccctggatgcatttggatgtacagattgactggaggactctttgggatgatgattggtgtagaaacgtgtgggtttggtggctttcacatctcgcctaccattgcatgaaacattggggtttcttcaagatgtgtgtgtcatacttcttttgggagggggttattttcttcttttatgaaactcctactggagctaaatttgtaatttagaaacatttaattttgttaatcctgtctgggacatttaagtaacatctaaagcattattgctttagaatgttcaaataaaatttcctgaaccaaattgttttgtgacaatagatgtgtttataatttgaaggtacttgttcaaaaggcaaatatagaatgcaggtagaggcatgaggatgtcagaagtgcaaagctaccctccagctacatagtgagttcagcactccctatgctatatgacaccctatttccaaaaatgagacttaacaacactttttctgtccagtggagtatatgtaaactagatagcaaatttttgtcttaaaatgtttgtttctcataatcttgcaggtaaggtgtagggttttcagagaacatggctgtttcaggtataccattttttctgctaagttgagctctggagttctttgaagtctacaatgaaaaataaatttcaaatatattaagaacattaaaatgaatataaattattttgaaagatcctttataaaaatacttgtattggttggtttatgactcacagaggggcaacataaatgtatatcttgaaaaagatacaggtcacaggtagcctagttcttcctagttctcagtagaatcgttcaaacagtatctaagttaattggaaggtagggcttttgtactccattaatgctgttatttaatttactaacatctgcttagtttgtcagctgatgctttgaatattatcagaaactaagaatatatttttatctttaagctttaagtttcctgaaaattaactgctttagaaattgacttcttatactggtctccaagtacaagagtagggttgctgcaaattccagttcttccaaagccactctatttaagggttaatccacagattgtgctcattttgatatagcatttgtttcctaaatgtttactaatcactttatgccaaatgtcttgcagatgttatttttaaacttcctgaatttttacaaatgtaaaaagaaaaaagtgtattagtgtcatttgttcaggaatagctacataccgaagggcttctatacatgaattgtaggggcaaacaaagccttatgtagaaacgtgtacactgcagttccatctggattttaagttcagatttcagcacttcttagggcttcattctattgacttggaacatgcaataggagtagtgatttacagaagcacagatgttcatgttttctatcatgtaaaattctgcaggtaagctgtattttagcagttgagcatgtctgaaggtgtcctgatttaatgttccactggagccatgtgtgtgtagtgcgcaaaggtaaaaagttacttgacagttgttggtaaaagaaagactgataatgaagttctggtggactaggcaaggcacagtttgtaacttaccctcacacctcatcagtttagaccattttggaggtaataaatgctgtaagtaacagctaaatggaaggaggaaaagggttgtctgggacatcagagtttcctataaaagcatcattgggtttctcgtctgtgttcatcttgaaccttcaagtccccacggagcatggcagtcaacaggtgggaagacacagtgattgcccatatcacttccattttgtatacactctgggtttgtgtaggccatattccaactggctttttagtagtagaaatccagtatataatgtatcagattcaattgaggctctaatctagtctgttaatttacctgaagttggtattttttaaaaagtaataaaaatttaaata

SEQ ID NO: 35 - DNA, 4257 bp, Cricetulus griseus
gagaggacttggcttctctcagaaaggaggagagctgcctgttgcagagagtcccaggtgtgcttacaagtgggctggaagatgcctcccaacctcctattgctcccactggagaccagccatgccaggctttgccccactgtcctcccaaactccagtgactgagaagttagctgagcagcctaagttgcttccagatggtagaactgagtttgagtcttatgaaagagcttgtaaatgtgacccctgcttttatatctgaatcgccattggctaagtacctacaggataaacctgctgatgatggattaggacttggtgacattggccctctcataagggaaggtgatagacaagaatctttgaaaacagaggcttttgcatctggtagtgttgccccctgggtacccgttctgtccaattatgaggtagtgaaaaagtcagagccagaatctagagagaatgcaccatttctggagccccaggacggagaagagtgggagagagctgaggagttggcagccacagaaggtgtgccccatgctgagaagtgcacttccctctggacagcacctcctccaggaaccatgggcagcactggccgtgacgatgagcaggtagctcttgaaaggctggaggtgaatggcatctctgaaacaccgagtcctcatggtgagtccacagacacagcctctgactctgagggccacctcactgaggacagcggtgagattgatgcaagtggagccacggtggcaaaggggttgttggtgcacaggagtgaaaagcaggactgggacccatccgcctcactgtccaaggtgagcagtaacctaagtgtgcttacaaggacagaagggatagcggcttctcagagctgggtgtctagagtatgtgcagtcccacacaagatgtcagaatccctgctgctctccagtactgattgccagcccaggtctgtgtgcccacccaagcctggttcttcagcagaggttaccaaccctcttgtaatgcacctgctgcacggtaacctgcctctggagaaggttcttcctccaggtcacagaagcagcaagccagagtctccacagctgccacttagagagcagagccaggatagagttcctgtgcaaggtactggggatgacaatcacctagttgccagaagcagccctggttctgcactagctttgaaggagtctcttctggcccagagctatgcagcaggcactggtcttggcagggcaaaggcctcccaggctcctggaatttcccagaagattgccaagatggttccaagtttagactcccagcatccagtaacagaactgacaccctcctctggcaacctggaagaaatagattccaaagagcatttctcttccttcctttgtgaagagcagaaagaagcccattcccagtcccagggcagtgatccaggtactgccccaagccagtgtccaggagatcacactacctccgaagtgccatgtttctcctctgcaaatgtgagcctctcctttggtcctgagcagacagataggaccctgggtgatcagaacaatgctggtggccaagagaagaaactgtttgatcctaggaatacagttcccacccttcagtgccccaggtctgaagagcagacaccactacctactgaggtccctccagtttttcccagtaggaagacagaaccaagcaaaaactccatatctgatggcgtgcagactccaagggaagactggacaccaaagccaccacctggctctgctggtggcctcaagacagagcagccattctcaaggggtccctttaaggcagatgcagagaatagaaaagctgcagggtatagtcctctggatctagtgggtcacttgcaagggatgccttttgttgtggacctacctttctggaaattacccagagagccagggaaagggctaagtcagcccctggagccttcttccatcccctcccaactcaacatcaaacaagctttatatgggaagttttccaaactccagctgaatcccaccagctttaattactcctccagctctgccacctttcccaaaggccttgctggcagtgtggtgcagctgagccacaaagccagctttggtgcaggccacactgcatcactctccctgcaaatgttcactgacagcagtgcggtagaaagcatctctctccagtgttcatgcagcctcaaagctatgatcatgtgccaaggctgcggagcgttctgccatgatgactgcattggaccctcaaagctctgtgtattgtgccttgtggtgagataataaattatggccattggaaacattgtatatttagtgtgtgtattttaataatggttgatcttaaatctgtatacagaatatcattgatataatgaaatctctaggtgagataaatcttgcctccccctaaaatttatagtgctgaagccctctgtcacttgacacccttctggtcttgctggaaggttttggggaggtgggatggacctgtggttgcccacaaccagccagcctaaaccctcttttggagtcaggcagtatagtgtgacagggcaacctgtctgacacccaaatggacttgaaatgaagcaggaaggttgggttctccgtggatgaactcacctgcctgagctgagcagcaatgtcagtcttccactgcccttccctgtcatcttctgctactttgcttggggaattgatagttgcggaagccacacagggttgaaacaacttccatcattgcccaccaggggatcaaacacctgctgaccttgatgtcatatttctgtcatttgccagttgatggagccaagttgacctttggttctggtgcttcacccagtttggaccttttatctgtctgtaacccatggatccatagattcttttggaagcttgaatagcccttcttggacagtgggggtctggaaatagggctgtctgctatggaaatgctatctgtagaccttgagagtcaactgtacagatgtttgcagctgactcctgcttgcaacccaccccatcacatttgactctgtgggagtgggcacccatgcaccacctgtgtatgtgaaagtcattttacatttccaagcagtccgtttcttatttttatatttttaactctattcttggatgtataaagtgaactttttggcttctgtaagtatgctctatgcacctctgatgttttatcctgtatttatatgttgtacacagtactggccaattctgtaaatggatgaattgtacagagaacatgaatgtctcttccttattttacgtcttcagcacccttgattaaaatggtgtttacttctgtgcaccaattgtcagagccactgagtgctgtgctgcctgatgtgagaaggaagttactgacgtgtgacctatgaggttggccctgtgccttgtcacctgtcaccagggaatctaccacagcctacagcgccacagacagctgctcacacaccactgggcaaacatgtcttgttccttgtattctcttccagccttgagtggctgctctgctgccatatatgacaaattgccatcaccagtgttaagtgcttctggattcatgggtgagttccttgggctgcccccagacaggccttctggatctggctccagggtcgtcacctgtcaaagcaatattggggatcgctaggctccttttgacttacttttgacagtaggtttcaggggaacaaagccatgcctgctgcctgcctctctcctaacacgtttccatcaaatagacacccttagtatgtgtctgacctcgtcccagttcctaccctgtttcttgtatctttacttgaaagttgggagtccttgtttgatttcgctgtctccttgtgcggttgcttctgtatgaagtataaaaatttgtgtgccttgagcgaatctcattttctctgtaagctgcctctcccccgtttcatctgaggtggcttgtttttttgggggggggggttagggggtccatcaagtgtgagtgaggagttggtagtggtgtgatttaaattcagtattggccaagttcattttgtgtgctcaaaagtctctaccaaagaccaggagcaggagccaagcatgtctagtcttcttctaagacctttggggtctcagaggtgaaacttgacagtggtctggtccatggagctactcagaaaagcgctgctcttgtatgtctcattggtattggaaaataaacctgtacaacctg

SEQ ID NO: 36 - DNA, 4252 bp, Cricetulus griseus
  modified_base (217)..(217): a, c, t, g, unknown or other
gatgggcatgaggtcaggggcccacacaggtatgggacccccgcctagtcccatggaccagcattcccaaggctacccttcacctctgggtggctctgaacatgcctccagtcctgtcccagccagtggcccatcttcaggcccccagatgtcctctgggccaggaggggccccattagatggttctgacccccaggccttggggcagcaaaaccgnggcccaacccatttaaccagaatcagctgcatcaactcagagctcagataatggcctacaagatgttggcccgggcagccattgcctgaccacctgcagatggccgtgcaaggcaagcgaccaatgcctggaatgcagcagcagatgccaacactacctccaccctcagtgtctgccacaggacctgggcctggctctggccctggccctggcccaggtccaggaccagctcctccaaattacaataggccccatggtatgggagggcccaacatgcctcccccaggaccctcaggtgtgccccctgggatgcctggtcagcctcctggagggccccccaaaccatggcctgaaggacccatggccaatgctgctgcccccacaagcaccccacagaagctgattccccccaaccaacaggccgcccttcacctgcacctcctgctgtcccacctgctgcctctcctgtgatgccgccacaaacacagtccccagggcagcccgcccagcctgctccattggtgcctctgcaccagaagcagagccgcaacgcccccataccagaagagtacaggctgcaggctcgaattgcacatcgaattcaggaacttgaaaatcttcctgggtctctggctggggacctgcgaaccaaagcaaccattgaactcaaggcccttaggttgctgaacttccagaggcagctgcgtcaggaggtggtggtatgcatgcgcagagacacagccctagagacagccctcaatgccaaggcctacaagcgcagcaagcggcagtcactgcgggaggcccgcatcactgaaaagctagagaagcagcagaagattgagcaggaacgcaagcgccgccagaagcaccaggagtacctcaacagcatcctgcagcatgccaaggacttcagggagtatcacagatcagtcacaggcaaactccagaaactcaccaaggctgtggctacctaccatgcaaatactgagcgggagcagaagaaagaaatgagcgcattgagaaggagcgaatgcggaggcttatggctgaagatgaggagggctaccgaaagctcattgaccagaagaaggacaaacgtttggcctacctcctgcagcagacggacgagtatgtggccaacctcacagagttggtacggcagcacaaagctgctcaggttgccaaggagaagaaaaaaaaaaacctctctcgacgctgtcaaactgggcatatgaattgacaagtgggcccccccagtggtgaaggttcctacaagggatctccagcggcaagacgagcctttgtgccccagcttcgcagtgggaagttcaatgtcttgttgaccacctatgagtatatcatcaaagacaaacatatcctggccaagatacgctggaagtacatgattgtggatgaaggccaccgcatgaagaaccaccactgtaagctgacacaggtcctcaacacacactacgtggctccaaggcgcctgcttctgacaggcacaccattgcagaacaagctacctgagctctgggcactgcttaacttcctgctgcccaccatcttcaagagctgcagcaccttcgaacagtggttcaatgcaccctttgccatgacaggagagaaggtggacctgaatgaagaagagaccatcctcattatccgtcgcctacacaaggtgctgcggcccttcctgctgcggcggctcaagaaagaagttgaagcccagctacctgagaaggtggaatatgtcatcaaatgtgacatgtcagccctgcagcgcgtgctctaccgtcacatgcaggccaaaggtgtgctactgactgatggctctgagaaggacaagaagggcaaaggtggcaccaagacactgatgaacactatcatgcagctgcgcaagatctgcaaccacccctacatgttccagcacatcgaggagtccttttctgagcacttggggttcaccggcggcatcgtgcaaggattggacctgtaccgtgcctcagggaaatttgaacttcttgatagaattctacccaaactccgtgcaaccaaccataaagtgctgctcttctgccaaatgacctcccttatgaccatcatggaagactactttgcataccgtggcttcaaatacctcaggctcgatggaaccacaaaagcagaggaccggggcatgctgctaaaaacctttaatgagcctggctctgaatacttcatttttctgctcagtacccgtgctggggggctgggcctcaacctgcagtcagctgacactgtgatcatctttgacagtgactggaatccccatcaggacctgcaagcacaggatcgtgcccatcgaattgggcagcagaatgaggtgcgggtgctccgcctgtgcaccgttaacagtgtggaggagaagatcctggccgccgctaaatacaaactcaatgtggaccagaaagttatccaggctggcatgtttgaccagaagtcatccagccatgagcggcgagcctttctgcaggccatcctggagcatgaggagcaggatgaggaggaagatgaggtccccgatgatgagactgtcaaccagatgattgcccggcatgaagaagagtttgacctctttatgcgcatggacttggaccgccggcgtgaagaggcccgcaaccccaagcggaagccacgcttgatggaagaggatgagctcccatcctggatcatcaaggatgatgctgaggtagaacggctgacatgtgaggaagaagaggagaagatgtttggccgcggttctcgccaccgcaaggaggtggactacagtgactcactgacagagaagcagtggctcaaggctatcgaggagggcacgctggaggagatcgaagaggaggtccggcagaagaaatcctcacgcaaacgcaagcgggacagcgaggccggctcctccaccccgaccaccagcacccgcagccgtgacaaagatgatgacagcaagaagcagaagaagcgtggacggccacctgctgagaaactgtccccaaacccacctaaccttaccaagaaaatgaagaagattgtggatgccgtgatcaagtacaaggacagcagtagtggacgtcagctcagcgaggtgttcatccaactcccctctcgcaaggagctgcctgagtactatgagctcatccgaaaacctgtggacttcaagaagatcaaggaaagaatccgaaaccacaagtaccgcagcctcaatgacctggagaaggacgtgatgctgctttgtcagaatgctcagacgttcaatcttgagggttctttgatctacgaggattccatcgtcctgcagtctgtcttcaccagtgtgcggcagaaaattgagaaggaggatgacagtgaaggcgaggagagtgaggaggaagaggagggcgaggaggaaggctccgagtctgagtcccgctctgtcaaggtcaagatcaagctgggccgaaaggagaaggcccaggaccgactgaaggggggccggcggcggccaagccgggggtcccgggccaagccagttgtgagtgacgacgacagtgaggaggaacaggaagaggaccgctcaggaagtggcagcgaggaggactgaagcagacattccagagtcctgaccccgaggcgcacgtcccagccgagatggagtagcccttagcagtgatgggtagcacagatgtagtttcggacatggagaactgtacacatgcaatcttccacatttataggcagagaagaataggcctgtctgtcgaccctggcctggccttgagtctctaccagcattaactgtctagagagggacctcttggaggtaccatccacctccccaggcctcagtcactgtagctcagcgtggatgcatgctcgtgccgtccactccttgtactgtatcttactggacagagccgactctcctggaggctcacaggccccgcgggtatgtcagtgtcactggagtcagacagtaataaattaagccaatgacaaaccaaaaaaaaaaaaaaaaaa

SEQ ID NO: 37 - DNA, 4238 bp, Cricetulus griseus
  modified_base (3146)..(3146): a, c, t, g, unknown or other
cggggaaaggcggcgcgggggccgggtggcagcgatccgcgaggccgagggaaggggcgggggagaggagcagggaaaggcggcggggggaatctcgcgagggttggagttttggcgagagtttgtggaagatggcgcctgttgtgacagggaagtttggtgagcggcctccacctaaacgactcactagggaagctatgcgaaattatttaaaagaacgaggggatcaaacagtactcattcttcatgcaaaagttgcacagaagtcgtatggaaatgaaaaacgatttttttgccctcctccttgtgtatatcttatgggcagtggttggaagaaaaaaaagaacaaatggagagagatggttgttcggaacaagagtctcaaccctgtgcatttattggaataggaaatagtgatcaagaaatgcagcagctgaacttggaagggaagaactactgcacagccaaaacattgtacatatctgattcagacaagagaaaacacttcatgttgtctgtaaagatgttctatggcaacagtgatgacattggcgtgttcctcagcaagcggataaaagtcatctccaaaccttccaaaaagaagcagtcattgaaaaatgctgacttgtgcattgcctcaggaacaaaggtggctttgtttaatcgacttcgatcccagacagttagtaccagatacctgcatgtagaaggaggaaatttccatgcgagttcacaacaatggggagcattttatattcatctcttggatgacgatgaatcagaaggagaggaattcacagttcgagatggttacatccactatggacagactgtcaaacttgtgtgctcagttactggcatggcactcccaagattgataattaggaaagttgataagcagacagcattactggatgcagacgaccctgtatcacaactccacaaatgtgcattttaccttaaggatacagaaagaatgtacttgtgcctttctcaagaaagaataatccaatttcaggccactccatgtccgaaagaaccaaataaagaaatgataaatgatggagcttcctggacaatcattagcacagataaggcagagtatacattctatgagggaatgggccctgtccttgctccagtcactcctgtgcctgtcgtagaaagtcttcagttgaatggcggcggggatgtagcgatgcttgaacttacaggacagaattttactccaaatttacgagtgtggtttggggatgtagaagccgaaacaatgtacagatgtggagagagcatgctctgtgtggtcccagacatttctgcattccgagaaggttggagatgggtccggcagccagtccaggttccagtaactttggtccgtaatgacggaatcatttattccaccagccttacctttacctacacaccagaaccagggccgaggccacactgcagcgcagcaggagcaatcctcagagccaactcaagccaagtgcccaccaacgaatcaaacacaaacagcgagggaagttacacaaatgccagcacaaattcaaccagtgtcacatcgtccacagcaaccgtggtgtcctaactaccgtctttttgctaggacttaaactgacttgaatgcagcaaaaagttgacaaaaaaaggcaaggataaaatgaacaatctttgtggttcttgggaaaactttcataccaggtgatcaattcacacacacccctttttggttggttttgtttggtattgattaaatggtcaagaagtagatatgtggctggagtacaggttaagctagaagacacaaactaacatagtttgtatggaccaagggacttgcataagctttagtaaaaggtacattttcaccatgccttttttgtatcacagtatgtagtacaccttgttaccagtaggttgcactctccacccctctgagctttggctctaaagtacattcaggttcaagcctgaccatgtttgttcaatctgagtaccaaacacttccaggttcttttggtctaaggctggaactttttttaagctgaagtcttatgactttttcataagttggaattattttgatttcagcaagtcaaattttgtaaaggcctgcatattttttttaagattatatgaagtctgtgcaaaagctttaaaaaatgcctctgccttgcctgcaatacatgcaatgtatgttaatttagtctattctcagatactgttagtagttatttcttgttttcttttttaaaatgtatttatagtggtaatccaagagattctaacagttcagtgtggccatttagtcatttctgagttaatggcacagaacatcaccatttgaaggtttgcgcctctttgcctgttcgtcagtttgtctgtgttccagggtttgttcaggtttccttcctcccccaaatcttgtacataacttgtattatgtgtaagttaaacattttatctttaacttggaatgttcccagtgattacatttaacagggtgtttcccaccttgttggcaaatgaacaaaaaattttttagcctaggccagaacatcattataattctaaatataagatcacaagatggctttttttttttagatgataactaagtaaaatagccagaagacagtacattagaaacagatagttgtaagtttataaaaatacaaatgtaacttatattttcatcatttccccttttgccctttgtctgtttttccccagtagaaatgttctgtccaattttttttttcttttctcttaaactttggttgcactcgggcttgtgtgtcagccttgtgtgctaatattgccagttgtattttgtttccattcctgcactttggtaatgccttgttcagtttcttgggaattgcagcagactcattgggctacatttaaagtacaggaagtacatgtgtgatgttaaaggacacagtctagtgatggcatcctcctttaaccgagaacagatgagatgcttttgaagaacaaactattccttaccccagcttttgtagcttaaaagtaactgttcaagttcatggctttattaaaatgaactttgactttttttaatgtttattatcttatttcggtttcttttgtttattttaattaagaattgtttntttctttttttttctttttttacaaagtccaagaatgtaacaataaaggcatctttcctatggttctatgccagagtcctaccacagaatagaatgaactgatatgtctgtttaccatgttattgatagttcttttgtcagctgcttttattaaaagtcctttttgtggatttgtaaatcattttcaatacatgatgtaatgtataggagtcttgtcccccatttactcggaatgtttcctcccagatgatgctgttttgtttgttttttttccatgagaaaaggatctcacccatgtagccctcagaccattcttgagctttcctgccttagcctccaggtgctgggatgccaggttatggcggaatgccacactgcttttgcctttagagaaactggtctatctgtccaaccacagagaaattccaatgtgatttttattaacacaactagttatttaatcagaaaatctgttggggggggcattcctatttgaaagaaaatgctatttgattattaaccaagttaatggacattgttttccaaagcagctgtgtttctggtgagtactgaacaaacgtgtgattttctgtgtcacttgatttatttttcaagcactgtaacttgggatggatggttagaaacaataatttattagggtttctacttaacccgttcaggactgagctgtatcacctattaatttctccctgtgtcgtgataaatgtttgccagcattcagtactgtgtcagtcccaatgtaggtttatgtaaaagctcagttagtttatttcttgtaccttacagcatgctctacacttcagtcctcaaggggttactttacaaactgtgcgcctgtaagggttattagcaataagatagaaaattgagcaagtttataccataattttgtagaaaaaagaatctgctcaattccatatttcatccatgaaaaaatctgcaatacgggcagtttctaggaataaataaaaaggaaatgtaaaccattgtaaatgtcttctgtgggatgtgcctgatgcatgtatcatcgtctttgatttcagaactcttcataaagataaaattaaattc

SEQ ID NO: 38 - DNA, 4237 bp, Cricetulus griseus
aagtgggagacaattggaggttaagatttagtaattttaaagaaaatttttaaaaggaattcttggattacaatcatgagattttaggacagcagatttaatgatttttacccttcctgatgtgaaccttattggggagcatgctgatgcagcagagctcggaaggatgctccaactcattctaggctgtgccgtgaactgtgaacagaagcaagagtacattcaagccattatgatgatggaggaatctgttcagcatgttgtcatgacagccattcaagagctaatgagtaaagagtctcctgtctctgctggaaatgatgcctatgttgatctggatcgccagttgaagaaaactacagaagaactaaacgaagctttgtcagcaaaggaagaaattgctcaaagatgccatgaattggatatgcaggttgcagcactacaagaggagaaaagtagtttactggcagaaaatcagatattaatggaaagactcaatcagtctgattctatagaagatcccaatagtccagcaggaagaagacatttgcaacttcagactcagttagagcaacttcaagaggaaacattcagactagaagcagcgaaagatgattatcgaatacgctgtgaggagttagaaaaggaaatttctgagcttcgacagcagaatgatgaactaaccactttggcagatgaagctcaatctctcaaggatgaaatagacgttctcagacactcatctgataaagtatctaaactagaaggtcaagtcgaatcttataaaaagaagctggaagaccttggggatttgaggcgacaggttaaactcttagaagaaaagaatactatgtacatgcagaacactgtcagtctggaggaagaattaagaaaggctaatgcagcccgaggtcagcttgagacgtacaagagacaggttgtagaactgcaaaatagattatctgatgaatcaaagaaagcagataagttagattttgaatataagcggctaaaagaaaaggttgatggtcttcagaaagaaaaagataggttaagaacagaaagggattctctgaaggaaaccattgaagagcttcgctgtgtccaggctcaggaggggcagctcaccactcaagggttaatgcctttgggaagccaggagtcctcagacagcctcgcagcagagattattacacctgaaatcagggagaaacttattcgtcttcagcatgaaaataagatgttaaaaatcaatcaagagggttcagacaacgagaaaattgccttattgcagagccttctagatgatgcaaacctacgcaagaatgaactggagacagagaacaggctggtgaatcaaagacttctagaagtacagtcacaagtagaagaactgcagaaatctttgcaggatcaaggctcaaaagcagaagattcagttcttctaaaaaagaagcttgaagaacatctagagaagctgcatgaagccaacaacgaattacagaaaaagagagccattattgaagatcttgagccaagatttaacaacagctctttaaggattgaagaattacaagaagctttacggaagaaagaagaagaaatgaagcaaatggaagaacgctataaaaaatacttagagaaagccaaaagtgttattcgtacattagaccctaaacagaatcaaggagctgcaccagaaatacaagctcttaaaaaccaactgcaggaacgggatcgactgttccactcattagagaaagaatatgagaaaacgaagagtcaaagagacatggaggagaaatacattgttagtgcctggtacaatatgggaatgactctacataaaaaggcggctgaagatagactagctagcacaggttcagggcagtcctttctagcaaggcaaagacaagcaaccagcacaagaagatcctatccaggccatgtccaaccagccacagcaaggtagagaggtctcacccattagggatttttaaaaacatacttctgttacatataacaacatttcaggaaattcagccagcttattttatttctctcctatgttaatacttagtgtttctcacatgaggatttctctctcttgtatctttcagtttctttgtcctttactttatggtcttttcagtttcttttaatgtgccaaaaatttgtaaatgtacaattaaaagtgttgtataatagtgtaatacttttctttgtatgaaaatgtcttcttccccatttgtgtgggctttgtaaagaatcgattttctgccaataattgatacacaatttatattctttatcgtgcctactgtgttaccatactttataagaatgtctttgtttaaagggaattaatcttttatggtgtattaatctgtgttttcaattgtttttcaaatgcacttcagataacttaaatatttactgtactatacaaagtggtatctagtgcgcttttgcaaagacaaatatgttggcagaggcactagtcaaatcatttggcacctggcaagatggctcggagggaagatatgtggaatgtcattatttcctgctgtcatgtttgatggcagaaatgaaattggtaaagatgtttgggtagacattatggaggataaaaatttgacaggatttttttcttcctttggaatgtcttagtagttagaagaatcagattctagccacgcacttttaattgctctccacatgtaaaagatttatttttcatataggtagccttatctttgggggtagttctttaacttatgcctcatatgttttatatattctgtgagccctttccttttctcaattaatctttatagctaatgtcttaataacattcgttaagatcagtacatgcctttctgtgtgtaatgttatgacagatctatttacagtgtttcttaactctccctacatgtccaggaattggtaactggagagatttttcttggatatttgactgttcaaattgcttacattgtatgccacatttatttacatagatgaatgcctgttaagcaatcactgtgaagcactttgtctatataaggtattatataattttaaactatcatttatttgaaaatgacataccttttgtctttttccatattgatttatgtatttgatcccaaattatatttaaggttttctccagcctttttcttgttccaaacctacattttactaaaaaaaaataaaattaagtttaaagtagttctaacttcacctttagatcacagaatattttaaggtttacaagcattttttaaaactaaattagtctatgaaccccactcgtaataaaatattgattgttgagaagttctatttgtagaataaagtgaatgtgaaaacaagacactctggaagctactcttcaattagattttacctatgaagtaaaacatctcaatgttttgattttcattttctatttatctgccctctctgtgcacacccacctacccagacactttctctaggtgttttggaaatgcctcaagcttttagaaggaagtttagcttctgattttttcagcatctgctgtgtgctaatttcagtgtttataactttcactgttgtttgctgtatctttaatgtttggtggattcattcagtaaatggaggaaatatctcatggtatttcaaaataaaataaagcatgctttccgtaagaaacagcatcagaacatatactttaggcatcataaaaccaggaatgaacctaaatatagcagtggcagcttttccattgtgtggtttaggtcaggatttaggggattacagtttctcctgtagtgatcaggaatgtttcaggtactctgatgatgatgtgaaatgactgtacacagatgctaatcagttttcccactgttttgctgaggtaaatgaaatatagttagagatgtctccttcagttaaaatttttaactcacatcacaacaacaaagttctaaaaaaacatcagaatgtaggggttttgtttatttgtttgattttttaatcttaatttcctcttggtttattttgatttatgactgccaacttgtggtatatatgagtgtttatatatgcatataatatatgtatatgaaaaaagttaagatttggtcaaactatattttcccattcaagtacaaaaaatgttttcaaggctgacaaaaagtgtacagttgttaaacaagttgtaaataaagacttagtaataaaaatcca

SEQ ID NO: 39 - DNA, 4220 bp, Cricetulus griseus
  modified_base (2307)..(2307): a, c, t, g, unknown or other
aagcccccaaatcgtcctggaatcactttttgtagattggtgctcgtttggaggcactggactacttacagaaatggtatccatcacgaattgaaaagattgattatgaagaagggaaaatgctagtccattttgagcgttggagccatcgttacgatgagtggatttactgggacagcaacaggttgcggccccttgagagacctgcgctaagaaaagaagggctaaaggacgaggaagagttctttgattttaaagctggagaagaagttctggctcgttggacagactgtcgctattaccctgccaagattgaagcaattaacaaagaaggaacattcactgttcagttttatgatggagtaatccgttgtttaaagaggatgcacattaaagccatgcctgaggatgccaaagggcaggtgagatcccagcacccactaagctggtgttgtcctatcgacccagctggatcgtgtaacccgtctatgggaagtgaggactggattgctttagttaaagcagctgctgcagctgcagcgaagagtaaaacagtgactaaacctcgaaccagtgctaacagcaataaagagaaagagagagatgggggaaaatggtttaaagtaccttcaaagaaggtagagcctccagcttgcatagccacagcagagactgagaaggaggaggaggagctacccacatccagtgaaccatttggacttcacatagacagcgttccaaagatcgtctttccacagccagagagcacagtaacaaacaagaggaaaaataaccaaggcaactcatttcaggcaaagagagcacgacttaacaagattactggtttgttggcatccaaagctgtcggggtggatggtgctgaaaaaaaagaagagcacagtgcaacagctccagtcctggagcaggcgatttcacctaaacctcagagtcagaaaaaaaatgaagctgtccttagcagttctgccaacactcagaaacctgcactgttatcctcaactttgtcttcagggaaggctcgcagcaagaaatgcaaacatgaatctggagagtcttctgggtgtataaaagcccctaagtcaccacttgccccagagttaatacaagccaaggatttgacgcttgtatctcagctttcttccgtgataaataaaactagtcctccacagcctgtgaaccccccctagaccttgcaagcatagtgagcggagaagatctctagaaaagctttcttcttcctcttcagccactgatgggaaagtgttctccatcagttctcagagtcagccagagtcttcaggaccagaggttcctgccgttgcccatctggccctgcagaagctgggaccctgtctccctcttgatctaagtagtggttcagaagacacagcgcctggagccccagactcctcctcccttggtggccaatgttccagggaagaaaaggaggagacacagctgtttgcaagtccctccccaaagcagtgagtggtggaaaaggagccatagcagctgctggaatatcgaaaacagaaaaaaaggtgaaaattggaaagaaaaaaagactaccaactgcatttggtctcaggatgaagatgatgccatgaatgagattgtgcggtgcatctgtgaatggatgaggagaatggcttcatgatccagtgtgaagagtgtctgtgctggcagcacagtgtgtgcatggggctcctggaggacagcattccggagcagtacatctgctacatctgtcgggaccctccgggagatggagtgcaaaatatcgttatgataaggaatggttgaatgatggaagaatgtatgggttgtctttttaaaagaaattattctcatctcaatgccaaaaagatagtctccacacaccacctgcttgccgatgtctatggtgtgactaaagtactgcatggtctacagctgaagattggaatactaaagaataaacatcatccggaccttcatctctgggcttgttctgggaagagaaaagaccaagatcagatagtagttggaagcagagaaaaaactgacacctcaggacatagctaactcagagggaaagaaatacatacagaaccacaaagaaccaccccggaaaatggaaggaacttacataacaagtgaacacagctatcagaagccacaaagctttagtcaggactgccagtctctcacagagcttggaagctcggatgatgacgatgctagcagtttcgaagaagatggggagctccacatgggaaataaaagccattttctgtcctcagcaaaagngcttggagtgtcagagaagaatccagcttccgggaataaagtgtttgttataatgagaaaagggcacagagtgcccaggagactcacatcttcagtggcagctgtgacaacaatgggtctttcttcagttgagaccttcttattgctgagtggatagtcaaaaagcatagtaatgtttggtcattttactgatttgtgacatcagtagtatggcatcttggaaggaagatgaagaccaactctaatcaaggaagctaaatattaaaaaatgagtgagcaagctgcaagtgataatgctgtctatgccaagaatcagtgcgtagactacaaactgtactgaaggaatggaattggcagggttctcagagttgctttcatgaagctcaagatgcctatagacagaaacacggtgtgcttatatagatttctagaagagacgcccatgttgataaaccagcatttggccaaaatcacactataaggaaactcgagttctggagagttgctcagatttgctctgagaattgcctcctcagcagctggatacagctgcaaagagacttagcttatttaaacttctgcgggatcatgagctggttcttgggtgatgaatgtatttaatcagaaaactgacaatggaaatctcactttgggggaaacaattgtggaattctaacttcattatgaatgtattttaagaaacccaccaaataattggaatctactgcgagcattgtgctccttaaaacaaagtggcttgccgaagggcccagtgtgccaaatgttgacactgctggaaagaggatttgaatatcacaggagtccttccgcctgccgtatgtacgcaacgccattagcccacccagtcctgtacaccacgtgcagtgtgtgccccgtgtaggtgagtggcagcgtccagccttcagcatacagtttgatcctggatacacttggtgtgtttgccttttgaaaaaataaataaataactgctagtagtggaatactggaaaagcttcattctgaagataaattttattttaaaagataaatatacacaaaaattttagttttgatcataaatggacagatttatgaaaccaaaggcaactaagttgcttactcagctcttgctggatttttgagcctaggtcctactgtctgccagtcctggtgcgagttgtgtgcaccccccaagtgccacatgcgcaggtatgtgtaagtgcgtccccttgtttgaatagtcaacgtacatatgtacataaccaacacatatttatatcacacatatctagttttattactatagactacacaaatcggggttaacataaaatgttaccttttaatagactgtttttaaaaactaaaaatgtatgtacaggtcttgaaatttttttaaagcgtgagaaaagactgttaagaggaggctatttgatgacattacacttgaatttttttttttgcctcattctgtttgtcagttctagcaatctgtataaactcatttagaactgacagaaagtgaacttgaatttatctttgataagaattcatgccactgtacattcagatattatttaaatttgcaaacacactgttctatatgtaaggtactgtatgtacaactctattaaaatattacacatatcctaaaatttcagcttgcctttttgcggccttatgttttgatgtgaagtttaaaagaatgtgcaaaacattgagaaatttttattgccttttgagattttccaactgacaaatgtgccaaagatcaccatacataaagtatagccctctgtatttacttgtgatacctaaaccttgtcaaagatcctactgatgaatgctttagcagaagtcattgtgggtaattgcttaaatttgcatattaaagtgaaaattagtgcctataa

SEQ ID NO: 40 - DNA, 4217 bp, Cricetulus griseus
gctccacgaggagcgcagccggccgctgcgaagggtgattgtggtggcgtctggctgtggaaaatgtgactgtcatggcgtgaagggacagaagggagagagaggttttccagggttacaaggtgtcattggatttcctgggatgcaaggacctgaggggccacatggaccaccaggccaaaagggtgatactggagaacctggacttcctggcacaaaagggacaagaggaccccctggagtagctggctaccctgggaacccaggacttccgggtattcctggccaagatggacccccaggtcccccaggtatcccaggatgcaacggtacaaagggagagagagggccgctcggtcctccccggcttgcctggactcagtggggaacctggacctccagggttaccaggaatgaagggagatcctggtgaaattcttggcagggagaacctggcattgggctaccaggactcaaagggcagccaggccttccaggcattcctggtacacccggagagaagggcaacatcggaggaccaggttttcctggcgagcacggaattgttggcccccctggactccaggggatcagaggtgacccgggacctcctggagttcaaggccctgcaggtccaccaggggttccaggagtaggaccaccaggagccatgggccctcctggagggcaaggaccaccagggtcatcaggttggaacgccaggagtaccgtgggaaggatggtcaagcaggcatcccggacagccagggcccaaaggtgacccaggtcttagtggaacgccaggagcccctggactccctggacccaaaggatcagttggaggaatgggcatgccaggtttacctgggcaaaaaggtgtgcctggcatccctggccaacagggtgtccctggcttacggggagagaaaggagcaaaaggagagaaaggacagtcaggtctacctggcattggaattcctgggcgtcctggtgacaagggagaccaagggcttacaggtttcccaggcagccctggtgagaagggagagaaaggcagcgctgggactccaggaatgccagggtccccaggcccaaaggggtctccaggaatcatcggccatccaggaagcccaggcctgcctggagagaagggagacaaaggcctcccaggactggatggcattcccggtgtcaaaggagaagtgggtctccctgggactcccggccccataggcccagctggtcagaagggagagcctggcagtgatggaatcccagggtcggcaggagagaagggtgaaccaggtcttccaggaagaggcttcccaggctttccagggagcaaaggagaaaaaggttccaagggtgaagtgggcttccctggcttagctgggagtccaggaattcctggagccaaaggcgagcaaggattcatgggtcctccgggccctcaaggtcaacccggcttacctggcacccctggtcatcctgtggaggggcctaaaggagaccgaggacctcagggtcaacctggccttccagggcatccgggacctatggggcctccagggttccctggaatcgacgggccgaaaggtgacaagggaaatccaggttggccaggagctcctggggctccaggtcctaagggagacccaggattccaaggcatgccgggcattggtggctctccaggaatcacaggttcaaagggagacatgggaccaccaggagttccaggattccaaggtcagaaaggtcttcctggcctacagggagtgaaaggagaccagggagatcaaggcttacccggccctaaaggtctccaaggtcccccaggtcccccaggtccatatgatgtcatcaaaggagatccaggactccccggtccagaaggtccccctggtctaaaaggactccagggacctccaggtccaaaaggacagcaaggtgtgacaggctcagtgggcttgcctggacctccaggtgtccctgggtttgatggtgcccctggccagaaaggagagaccggaccctttggaccacctggtccgagagggtttcctggtccaccaggccctgacgggctgccaggatccatgggtcccccaggtaccccatctgtggatcacggtttccttgtgaccaggcatagtcagacaacagatgatccgctgtgtcctccagggaccaaaattctctaccatgggtactctctactctatgtgcaaggcaacgagcgggcccacgggcaggacttgggcacggctggaagctgtctgcgaaagttcagcaccatgcccttcctcttctgcaacatcaacaacgtgtgcaacttcgcctccaggaatgactactcctactggctgtccacgccagagcccatgcccacgtccatggcgcccatctccggggacaacatccggcccttcattagcaggtgtgcagtgtgtgaagcacccgccatggtgatggcagtacacagtcaaaccatccagatcccacagtgccccaacggttggtcctcattgtggatcggctactccttcgtgatgcataccagtgctggagctgaaggttctggtcaagcccttgcatcccccgggtcctgtctggaagagttcagaagtgccccattcattgagtgccacggccgagggacatgcaactactacgcgaatgcttacagcttttggctcgccaccatagagagaagcgagatgttcaagaagcccacgccgtccaccttgaaggcaggggagcttcgcacacacgtcagccgttgccaagtgtgcatgagaagaacataacgacgcccgcctctgccgccgtcacaacatggtgctactccccctcctcgtcctctcctccctcctgttttatttttaacagcaatgaaccctagaattataccccatgtacctcactgtccactatgaaaaccataaagtgccttatagggatttgcgtaactaacacaccccgctttgttggcttctgtttgctgaaggagaaggacagacagcgataagctttccatagtggcacataccaaatggcactcgtgatcaaataaaagatgaattgccttttgcaatccagtgcactgatgtgtgaggtgagaactccataagaaacccaaaggtgctaggggtacgtggtgccctccagacagcccacagtccgtttcaacctgtcaccccagatgtgagtgtctgtctataccactgtctagtgtttccaaatcaggtccctcgatggtctgtgctaatagcagtcaaggaaactggtttcttcaaccctttacatggaattccatcttttcagccccaaacacaaactcatgccctgtgtggtactacacagctgcttttgtggaagtcatggctttcctgtggaataaagatggtccaaaggtagacagaaaataaatatataagaaaataaatatatatatatgtattagtaatttatatagatgtcagcaattaggcaggtcaagttctagtgtagagaccattgttaaataaagcatacttcgttttcctctctcgaagactgtgctattccttcacagggtttccaacaccaggccaccaaatgtgaaacaccagctttcctcatttattcccaaaccaaagaaggtgttattgccaaagccaaatccattcataaacatggtgtctatgataatgagccctgtgcttggcgcttactgcttttactctgtatggagtattttcagggttttaaacatgaaccacagactgaatgacttacttccaagagcggtgacagccaaggcctttgttagcatccctcatcctgcttcctggcagcgtttcacacctgagcacacacgggccacgctccagcttctcatgagctgtgtcacagctcctacagggagtggacaggtcggtcgcaggagggcagactcagaccactatgcttgaagtgacgtttcactaaaagtccccaccctccaaaaaaaaaaaaaaacgtttttaagactactaaggccttctgtgtaatttccttaaatgtgtatttcttaagagttcaaatttgtaataaaactatttgtataaaaattaagcttttatggatttgttgctaggactgccattgaaacattaaaagaaaacttactacacgtaccgctaataaacctgtaagctttgctgcgtacgtaaaaaaaaaaaaaaaaaaaaaaa

SEQ ID NO: 41 - DNA, 4213 bp, Cricetulus griseus
  modified_base (1040)..(1040): a, c, t, g, unknown or other
acagggtctaattcttccctcaacacctcgctgccttcacctggtgcctggccctacagtgcctctgacaactcctttaccaacgttcatagcacttcagcaaagttccctgattacaaatccacgtggtccccagatcccataggacacaaccccactcatctctccaacaagatgtggaaaaaccacatctcctccaggaacactacaccgctgccccgcccacctcctggcctgaccaaccccaaaccggcatctccctggagcagcacagcacccagatcagtcagggggtgggggacacaggactctcggattgcctcggcctctacctggagtgatggtggctctgtccgtgctagttactggctggttcttcacaatctcactccacagattgatgggtcaaccttgagaacgatctgcatgcagcatggtccactgctgacattccatctgaatctaacccagggcactgccctgatccggtacagcaccaaacaagaggcagccaaggcccagactggcattgcacatgtgtgtgttgggaaacactaccatcctggccgagtttgccactgaggatgaagtcagccgctttctggctcaagctcagcccccctacacctgcagcaaacccaagcgcacctgccacaggatggcagtcactggagaccagccagaaccaggcagaccctgttggacctgcgctgaacctttttggtgggtccaccgggctcgggcagtggagcagcagcgctggtggcagcagtggggccgatcttgctggcacttccttgtggggccccccaaactattcttctagcttgtggggagtctcaacagtggaagatccccataggatgggcagccctgctcctttactacctggtgaccttctgggaggagggtcggattcaatctgaacttagaactttcaactctgacctcgtgaccttttttggaacagcagcagcactaacttgtaccttttcgttttttttttcaacttgcaataaatacattttaaaaggaaaaanaaacggagagaggaaaaaggtggtcattgacagactgtctgagcacatagttgcctttaaataaaagaacaaaaaaacttaaaaaaaaaaaaaagttaaaattttgtgattggctggttgataaataccagtgtgttcttggcacatgtaactgcccaggcatgctcgttctggtatgtgtgtgcacgtgtgttcatgtgcatttgtgtgcatcctcctctctgtctctgtgtgtgcctgcgtcctccctcttcatcctccccaccctgatttctcagaaagctgcattgctgacagttcgcaggctggcaggccggccatctgctttttatttttttttagtctatgagaacacaggagcacagggagctgctgcaactcaagccacttcttcgggctgcattgagatgaagggtgcttttcaatgattagagcagtagccagaatgccctctctgctcctctctcgctgagcattacctgtgccaggccatggcgtgttacagcaccaggccatcactgacagaaacgtttacttaacgaatgttcttaaaccagtgtgtacttcaggcttctccctttgtttctctgtgttgtgtttcctgtgtatgtggttttgcttaggcagaaataacttagcaaagtagacaggaacaggcctatgctgtcctcaaaaaacgaaaaactaaaaaaaaaaaatatatatatatacatgttgtgtgtatatatatatacatatatatatatatatgtactctctctctctctctgtgtgtgtgtgtgtgtgtgtttttttttttttagtttaatatactattgttatgtattaactcactcctggttgccttgggatgtattcttatgcaaatgtgaatttaacaagaggttgttgggtttgtttttgtggggatttttgttttttcaaccacaaaaaaaggtccttatgtggtcatcctttcatccttgctccattttgtaacatgaatttgtaactatgcattttctgaaaaagggggaaagagggggaaagaagtcaatttgcatctttatattttccagtttctgtgtccatggtccacgtctgagaaaggaagaggaggggaagctcaacaggtcagcatagtgagggcaaaagggacctcccagatcccgccctctggcaggtctaatttcgaagcaaagttggggggggggggggtctgccatgcctgtccatcattatggtgcaggattcttgatactggccatgcagtgttaacccagggcagccatggaagctcacaggctcaagtattctctgaactcagaaccctttcaagctcacggaaaccaactgccgcactctgctgacctgagagttcatcttcgtgtgtgtgtgtgtgtgtgtgtgtgtgtgtgtgtgtgtgtgtgtgtttacaagtctgcagtgctctccctggtcttgttcaatgacgacttcctttgagggaagaatcttgataaaagtgcatgggcgtctcctgccccatcttctgactggcactgttcacttggattttacttctgtagtttgtctggagacccttgcctatcaatgtgcttcctctcatcgctagggttctgcctgcccttgttttcctctctgatgttcccaaagggcttcgctgatgtctgcgcctctttcctgggatgtccccttactccaccctttgtacacaccagtgaccaaagtgtatgcagtggtttcaacacaagacatcaaaatggtgcaggcacctctagtgtgctcacagacatgtgcacaagattctgcacccttggccttaatttcagcacgacttaaggtgcaggaacatttttaacaggtttaaaaaaaatctacttctgggagggaaataaaccagacccaaccactccccacaatctgcttacaacttctcattctgcatccaccccagccctgctctgcgacaaccaaaatcaacaacaaaagcaacctgaggtgaggtttctggactgttttatctttctccctttagatggagatacaaatgctgctttgggttctgtaatcctagggggctatgtttacatagtgaaattcattctaccaaatcaggaaacagtgagtgggagacccttcagcaagaggtcactgaggctgaaccagaggtgagaggacctggggatgtggcagaggaggagagagatgctatttaactcattgtgacaccctgttcactccttcctctctgctctcagtgtccctttttgcccctttaatcaaaaaggtttagagaaaggcaccagaaggaggctgaagttttaagaggcagctttccaaccttgcacacaaacagaaggtaccgcaaaaatcctctcatctgaaacactcagcagaaacaacctatcaaaaggactaaatcgctgcacacgttgatgctctctgcaagttacctataagtgttttgttttcttatacttgaaattgcttttatattattttggtgactttcttttctctcttccgatgggcaatagaaactgcaggtgataagttttacagatgtttgaggggagaaaaggatgtggcattgtcttttttaacctagaggttcagtcagactcccatatggcaaagttgctcatcttactggtttaacatggacacagaaactaggcactttggtggttcacttgcacggcaggccggccccctttctatattttattttacttttttagtatagtggtacttaaaatcactggttcacttaaaaaagaaatgttaaactctactaatgtacaaataagctgaaaagttgcattttatgtgtattttttgccatagcaggtactgtatttctcatgctggatttcaaaagttgtatatatatatatatatatatatatgtatatcaaaaacaaactgaagggtggtgttttaccgggttgtggcaggttgagtaataaggaatgaagtcgtagtcatttcattaaaactgagaggtgatgtaatgcatatagaaacgtttttctgaaaggtttttttttttggtaggggggcttttaaacagcttattttttgtttagtttttattttattttggaaagatatgattgtattatgtgcaactcagttgcttacattataactacaaatatttttgtagttcctgaaaaaaaaaaaaaaaa

SEQ ID NO: 42 - DNA, 4210 bp, Cricetulus griseus
ggcgtaatagcttggaactcagtgaagacacagatgtccctgttgagagcaaccagctaatgattacattttaagaagatttctgtggttgagttgtcattggaagagtaagtccatttggagagcacttggagctggtcttcaccttgaggaagcagtggcttattccaaaaagccacttctggcctgagaatttacccagcatgcctaatcagggagaagactgctatttttttttctattctacatgtaccaaaggtgacagctgcccattccgtcactgtgaagctgcactaggaaatgaaactgtttgcacactatggcaagaaggtcgttgtttccgacaggtgtgcagatttcgacacatggaaattgataaaaaacgaagtgaaattccttgttattgggaaaatcagccaatgggatgtacaaaaactaaactgcgcttttccattctactaacagaggtcgttatgttgatggactttttctacctccaagcaaaactgtgttacccactgtgcctgagttgcaagaagaagaagtaaaaggctagccagctcactgttcagcagaacaaactgtctgtccagtctaatccctctcctcagctgcggagtgtaatgaaagtagaaagttcagaaaacgttcctagccccacacatccaccagttgtaatcaatgctgcagatgatgacgaagatgatgatgatcagttttctgaggagggtgatgaaagcaaaacacctgccctgcaaccaactcctgaagttcataatggattacgagtggcttctgcccggaaacctggagtcagtttaaagcaaggtgaatgtttgaattttggaataaaaactcttgaggaaattaaatcaaagaaaatgaaggaaaaatccaagaagcaaggtgaaggctcctcgggagtttccagctctttacatcagcctcagcccaatccaggtcctgaaaaggagaatgttcggactgtggtgaggacagtaactctatcaagcaagcaaggagaagagcccttggttagactgagtcttactgagagacttgggaaacgaaaattttcagcaggtggtgacagtgatcctccattaaagcggagccttgcacagaggctagggaaaaaggtggaagctccagaaactaacattgacaaaacaccaaagaaagaaagagttaataaagctggtgagatccacgtgaagacattggaagaaattcttcttgaaagagccagtcagaaacgtggagaattgcaaactaaactgaaaacagaagaaccttcacgagctgatgattctccatcaggaacaaaaagctcttcctcagtgcggatcaaaaccttctctgaggtcctggctgaaaagaaacatcgacagcaggaaatggagagacagaaatccaaaaaggataccagttgtcccaagttgacagcagatgctgaagtaaaaaagacagtgattctgccacctgctgctgtcagcagaggacagccagaggagcctgcaggaagagccaggtctatgcaggaggtgcatattaagacgctagaggaaattaaactggagaaggcaatgagagtacagcgaacctctgagagcagtgccagctcccggcctcaagctgaggctggcccaggggcaaagaggctgctccgcatcgccaaaagagcaggtgcaaaagaagaggaaaaactcaaagaagacagtgacactgtttctcagagcagtgtgcctaaaacagaggctagtgagacttctgatgagaccgtaagagataccaccaaaattccagtcaataggcctgacactgacagagagaaacaaggagaagccaaccttgacacctgtccagggagatggggcctcttactatactcgagtggtggggaagccggtgctcactgctgtatcaggcatcacgcggcacctggctaagcggctccccctggaggcatccccaaaaaggagaggtagaaacctctggaattggggactcaatactgaatgtgaaatgtgcaacacagactttggaaaaaggagtaaagccaaacccaaagtaaatgtgaagccatctgtggtcaaggttgtttcatctcccaaaatggctccaaaacgaaaggcagtggaggtgcaccctgctgtcattgcagctgtgaaaccactcagctccagcagtatcccgcaggaaagccccaccaagaaagcagctgtggccgtggtcccacttatctctgaagataaatccatcgccatgtctgagacagaacaacctaaggacagttttgtgctgccttcaacccagtctgcttcagaacctttgctcccagaaggatctggcccttcctcgtcccaagtgacaaccaaagctcgacgacttagctccgcctcaacaggaaagcctccgctctctgtggaagatgactttgagaaactaatatgggaaatttcaggaggcaaattagaagctgagatcgacttggatcctgggaaagacgaagatgaccttctgcttgagctctcagagatgattgacagctgaaggtgaaggtgatggtgaggacactttaaagaagaaaaaaaaaaaaaccctacaaccaaaaagactggacttagtttcatctatttacctgaggtgataatttctttagtctcaaattttgcccaaatcaaaagtatatatacctctgaagtacctgtgtgtgtcctggagtcccttggggtcagatcttttacatcccctgataaccgttttgtccacttgatgccattgtttagcatctttgagaagaaagttctgtaatgcccttctctccacatgagactgagctccaaatgaaatggtgcaagagaactcagtggctccttgaggtgtttgtcagtgtgggctatcttcccttttgctgtatttatttatgtattgtcttaatattatcagagtttaaaatgaagacagctgctaaccattgtggaccaaatgtcatgctaccacttaacaaaaaacccacttcgtctatgttaaattgtatgtctttttaaaggtatttggagattcgtctaagctttaaggagggccgagcggctcaagaacctgagatgcggacacaactctggacctggtcctgttgcgttagctgctccgtaagcctctgaagagcaatagctaatttattattactgtaattttttaaaggctttaaagtgcctcaggggtcccctgaaactaattttctacttctgggattccctggattctttataagagatggtgacatgactagggaaattcttttttaagtatgaaaattgtcccttttcttcaatacctttctcctactggcattgaattatcacagagacagaaaattggtaaattttataatttctaactctcccaggaaactcctcttgcctagtatttatttgatgtgctttaaccatgggtgatctacggactgtagcagtacaccgggctgtgctgttgcagggaaggccagatgctctggggtgtattggatacctccagtttcttcatttctggattgagttttcttttcttgatgttggtcttcatatcacctcaaggtttagacttgtgaaggaacaagtctgatgagggaaatagtcttgaaatgagacactgtacagaattggaaggcggaaagaaagacttgttcattgtgatactttctgtaggtggccagtttgtttctcatagggaaatcctggatcacctgtcatgttggctcctaaggaactgctgttgtaagcggctcatcaagagttgaagttcatgtagccttgttgggaatatggaaaaggaagaaagccacaggactgcccgttcagtctgggaagatctggatgattctgcacatgcaaaaatgacttgaaatttatgtatagacacttgtaccaatccatcttcagctgactgaatgttgtaagatagcccttctccaaagcaggggtggaatgttctgctttcaccacacattttataaacacatttcttttttgaattggcctatagattgtaggtcccttttgtatataacctctattcttttgctttaaaaaaagtctgttcatatttaatgccctgtattagtcaatgatttgtgttcagcattatttgaaccatttgccattactgaaagagaaatacttatttgtgttttaaataaaactgatagagg

SEQ ID NO: 43 - DNA, 4203 bp, Cricetulus griseus
attaaccagcccaaagttgtagcacttagtaataacaaaaagatgatgcaaaggatacagattctttatcagatgaagtcacacacaatagcaatcagaataacagcaattgttcttctccatctcggatgtctgattcagtttctcttaatactgacagtagtcaagatacctcactctgttctccagtgaaacaaactcttattgatagtaactccaaaatcaggcaagaagatgaaaaattttaacagacttttacaaaaatggagatattttaaacaattcaccagaagaaaaattcaaagttaatgataaaaaggattttaagttgcctgagtatgatttgagtattgaagagcgattagttctgattgaaaaagatgactcaaaagctgaatctgatgaatctcaccagttagaccatatcaacatgaatcttaataaacttgtgacaaataatacgttccagccagaaataatggaaagatcaaagacacaggatatagtgcttggaaaaggctttttaaattttcattctaaaagtgaagctcagcatacagaaaatggaaataagtatccgaatttggaatccataaacaagataaatggtctttctgaggaatttccacagtcttctggtaggattgaaccacagaactccacttcttctgctgatgtgggtatttctaaaagcattgatgatctctcccctcagagaagtggtccagttggatctgttgtgaaatctcatagtataactaacatggaaactggaggcttgaagatctatgacatccttagtgatgatggccctcagctgccaagtgcagcggttaaaatcgcatctgccgtggatgggaaaaacatagtgaggagcaagtctgccacactgctgtatgaccagccactgcaggtgttcactgcctcttcctcatcctctgatttaatgtcagctacaaaggccgttttcaagtttgattcaaatcataaccctgaggatccagatttaataagagcccctacagtagccggcctgcagtctacacctcaactatatggtcctctgcagtataatgtccaatacagtggcagtgctgcagccaaagacactttgtggcaccctaaacagaattcacaaatagatcctgtcagttgtcctcctcagcgccttcctagatcagagagcgcagaaaatcacagttacatgaagcattctgctaatatgaatttctctaaccataacaatgtgagggccaatactacataccatttacatcagagacttgctccagccagacatggagaaatgtgggctgtctccccaaatgaccggctggttccaacagtaactcggactccagttcagcgacagagtagtgtgtcttcaacagcttctataactctcggtgactgaaggagattatttatcatacagagaattacattcagtgggaagaacaccagtgatgtcaggatcgcagagacctctttctgcacgggcatacagcattgatggcccaaatacttcaaggcctcagagtgcccgcccctctattagtgaaataccagagagaactatgtcagttagtgatttcaattactcacggactagtccttcaaaaagaccaaatgcaagggttggttctgaacattctttattagatcctccaggaaaaagcaaagttcctcatgactggcgagaacaagtacttcgacatattgaggccaaaaagttagaaaagagtatgctgtcaaggtccttttaattccactctcatccccagacatccagtccaggagattcttgccaagatgatagattgatttcaggagagcagaactactcaccaggtgcacttagtcacaaagatcttccagacagcttgatgaaaatgcctttgagtaatggacagatgggccagcctctcaggcctcaggcaaattatagtcaaatacatcatccccctcaggcatctgtggcaaggcatccctctagagaacaactcattgattatttgatgctgaaagtggcccaccagcctccatatacacatccccattgttctcctagacaaggctatgagctggcaaagcaagagattcgagtaagagtagaaaaggatccagaacttggatttagcatatcaggaggtgtcgggggtagaggaaaccctttcaggcctgatgatgatggtatatttgtaacaagggtacagcctgaaggaccagcatcaaaattactacagccaggtgataaaattattcaggctaatggctacagttttatcaacattgaacatggacaagcagtgtccttgttaaaaactttccagaacacagtagaactcatcattgtacgagaagtttcttcataagcactatagaacaaaaaaaaaaaaaaaaaacaaaggaaagatttattgaaagacacttgcaggggaaatgactattttgcttatttttatatataaagaagaactcagacagttggcttggaacttgtacattactgaaataatggagcttgtggttagaggggaagaaccactgtacagaagataaaagagactgttgaattcatatatgaaatttgttgttaggtttttaaacttagcaaatcaaggctacaaaaaacaaaattatgttgtttttgtatagattgtaggtttatttttggtatttcatacacatgactgactgtacgcaaggcaatagttagccttgattgtagcccagagacagatggcagagctatctatctcacagctttttgtgcccttatttttctccaactggtattaatgtttttccttgtccagattaaaacattatttcctataaaatctgaggctaacagtgaaaaaaaagttaatctgataatgtatttttattaatagaataatgcaataaaatacatgacgtcttttttaaaaagacaataattgcattttatgagctctgcaagatcaattattgtcatagctgttgactatacatttgctactggtgattcaattttaatttttttagttactgaagtttttaactctaatgtagatgcatgtccacacatttcccttactacaaagttccctgatattttttctttagcaaatggtggtacttgcaatctaatttttataattagtttccatcataatctaatttataatttttttaagaagcaaatgaaactaaaaggccagttttaagattgtatatgttgcctgtaatacaaagtttcagaaggtttaggaaagcctcttgattttgttcggcctggcattgcctttgtaaagtgaaaggaaacgtggagtgcgcatggagctaggaaaccaaagcaagtctgtgagactggcacagtgatagagaattgctgtggagttatagagcaaagggatggtcctcgaggcctaccagtgtgttaagtgtgcagataaagggctgttcctacagatacattcaatgtgaactccacacttcagagtcgttaaagggtttctaaatgtgtcggtgtaatagtgttttaccaccaattgcctttgttcccagttactgtaacaaatatttgatgatggaagttattaattttgtttatatccagatcattaattttatttgcttttgatgtatgtaatcaaataaaatttgaatgacatgcaggggtaagaagtaatgcatggttatttggaccagaggaaagtgccatagaagaccagcaactgtttttagttgaagctagtctggaaacttttgttagaacaatattctgttcctgaattcattttttaatttctgagatgcataatttgggtatttctaatgtattatgcttttttcttaaaccttgacttagttgagatctttagaggactagctcaaacaccacctgcattatttttacaaaatgagttggaaacatttccattcctagtcagaatagtcagcacttttaaaaatatctgagctcaaatattgcactcctttcaagttgttataaattgggtattgtactgtatagttttaataatcttgattgaaaccctttaacaactctttgtaaattttaactcattttagttggtttttcagtactatttacataggaattgatttttatgaatatagtagaagaaatgtgctgtattttgataaaattcacttgtatgtgttgtaatctactaaaaaacaaagaatgaacaa

SEQ ID NO: 44 - DNA, 4201 bp, Cricetulus griseus
  modified_base (22)..(22): a, c, t, g, unknown or other
ttccaacttcatcaaggagctntcggggagtcggatgatcttggcattcccaggatgagcagctatccaagtcaagcctaagagaaaccacaggctctgagagtgatgggggtgattcaagcagtaccaagtctgaaggtgccaatggggacagcagcaactgcagccatccagcccaagaaagttaaaggagtggggtttggagatattttcaaagacaagccaattaaactaagaccaaggtcaatcgaagtagaaaatgacttcctgccggtagaaaagacaattgggaagaagttacctccagctacggcaactccagatccatcaaaaaacagaaatggacagcaggaccaagaccaaggattactgcaaagtaatatttccatatgaggcacagaatgatgatgaattgacaatcaaggaaggagatatagtgactctcatcaataaggactgcatcgatgtaggctggtgggaaggagagctcaatggcagacgaggagtgttccctgataacttcgtgaagttacttccaccagactttgacaaggaagggaatagacccaagaaaccaccacctccatccgctcctgtcatcaaacaaggagcaggtaccacagagagaaaacatgaaattaaaaaagataacctcctgaaagaccagaaacacttccaaacagaacagaagagaaagacagaccagagagagagccaaaactggatttacagaagccctctgttcctgccatcccaacctaaaaaagcctcggccacctaagaccaattctctgaacagacctggtgcattgcccccaagaagacctgagcgaccagtgggcccactgactcataccaggggtgacagtccaaagattgacttggcgggcagtgtactctctggcatcctggacaaggacctctcagaccgcagcaatgacattgacctagaaggttttgactctgtggtatcatctactgagaagctcagccacccaaccacaagcagaccaaaagctacagggaggcggcctccatctcagtcgctcacatcttcctccctttcaagccccgatatctttgactccccaagtcccgaagaagataaagaggaacacatttcgcttgcgcacagaggactagacgtgtcaaggaagacttccaagactgttaccatatcccaagtgtcggacaacaaggcatccctgccacccaagccagggaccatggcagctggcagcagtgggccagcctctctatcttcagtggcttcctcccccatgtcatcctctttgggaccatctggacacagagccaattctccatctttgttcagcacagaaggaaaaccaaaggtggagcctgcagtcagcagccaggctgctgtagaggagcttaagacacaagtccgagagctgaggagcatcatcgaaagcatgaaggaccagcagaaacgtgagattaagcagttactgtcagagctggatgaagaaaagaaaataagacttcggttgcagatggaagtgaatgacataaagaaagctcttcaatcaaaatgaatacttgataattgagatggtacattattcaccctgagtccgagactcaaattttctgccccagccaaaatcatcttgtgccaaaagattaaaggtttgcctcaatatgtccctgtttgaacgattagcacaaaagtcttgatagcacaacacaaattccatccaagaggagactctttcccatggtgttgtcctgggtctggcagtggttgtgatttatagccaattgtgctaaaggcttttctaccttgagatctcctgtgaaatgaaaactcaggcagtttagtccatagtactattttgatgatattttccattaataaaatgtaatttcagattattcatttacaggctttataattttatgattttttaaatcgtgttttgtcacagatgcccctagtgtttgtgctaatctagtccgaagcaagtgtcttgctcacttgctacaggtggactgaatgccacctggctttttattcccctttaggagtctattacatatgcaatttgaggtccaacccttctctttccttgccagccgacccccactctaacagaaattttagcttatatatgatggtatatttacaaaaagagaaagagaaaatctggtatttgcaatgatctgtgccttctttctaccaccctcttgattggagcttttgtgatgcagctaccatgattccaaataagcagctacttatccttgtccactagaggccgctgtcttcgcagcttctctcaccatagccaaaggtcctaagaggagacagctggaaagtctggcctgctctttggtaccagctgtgacttttcagtttctcctaccttgaggttgttcatgaaactagaaatgtcattccagcttgattgttttgtcatcagccaagttaaaccttgcttcctgccttttacacctattgcgtgaacagaatatgcattattaaagcaaaaataaataaaaaataaaatgcaaatgaaaacaggggggaattggattatttcctgcactgggttatatgtgtgtgtgtgtgtgttattgtttaaactgtattcacagtgtcatttgccttgcgcacttgtaaccccctcctgagatccaggagaacaggaggagggtcttgtggaaatgtagctattggatctttcctgcacttacagaattgctttttctttcccaatgaaactgatgtttgcttgtctgctttatctttatagtacacgaacagttcagccttagactatgtaactgttttctcatccttagctgaaaatgggggtcatcctgtactgcaagattgttgatggggtagagatggaggggtggtcccttaatggcccccaaatatgtttgatgtgtttctaaactgctgctttgtctattacctgcattttatagtgaaattactaaacattaatagattttcactaccacaaagaatgaaaattgatgacacagaaggaatgatgcaaaaacctcacattattcattattgaaaatataacaaataaatgtctcttctttttcttcctgtctccctccccatgccttgttctcacttgcatacttgtcctttctgctcgaggccatcacttccctccatgtaaatacagagtcttggtgccctagccttcatgggtggggacacagttaggggaagggaatatgtaaagaaatcattctttattcccatgtgtgaagatattttccttttcagcagccatggtctcagtgtgcttggggccaagagcaaagggtttctacaagcagtgtaaagcattcctgttccccttcactgtgctaagcctttctgcattacacttgaagccttcagagatttcctagcacctattacaagagtgaggactagatccttgatgtctgaattttcatttgttagaaaatccctaattgatgatataggatgtttctgtagagtgagatcattaacaatgaaactgagaaattgaagtatcctcagtgggtgctggtagcatgcaatgtagaggactcatgtcttcccctaagagaggcaacagaaacgagagacagagagaaagtgattaaagagaaatgagctggtatatccagcttcattactatcccttgggctaaccagcgagaagattgtgcatcacagaactggatgagccactgcccaaacagctaccatctttactcttgaccaaatggacccatcaagaatatcgaaaagcttggaatggtcacttttttgaaaattaaaattcctttgcattcagcatggactcagccaggcatctatggagattattttttttgcttcattttctaaagttgtatttagaaaagtcttacgtattgtgctttgtaaaagaagatgattaaaatgaaagtttgtgaaaatatttttgttcaaagttgtcatggtccaagaggaatgatgtcttggaacacaaaccccttttctctattttacacaatttgattactctgacagaaatgtccttagaagactcgaagtaatccattaaaaatactgtgcctgtgaattcccaatttttaaaattgttagatttttctattgctattgcagcataaaatgctagttaggtataaattcttttttagtgtaaaaaccattaaattatcattattg

SEQ ID NO: 45 - DNA, 4190 bp, Cricetulus griseus
ggactgtgcaccatggatgattttgctgagggagacttggctttggcagatgacgcattattggaagggtgcccttatgaggacgactgtgtctgtgctcccgactttaccactgatgactatgtccgagtgacccagctttactatgatagagtgggtatgcaatataaagattatgcccaaagtgagaaaaatttagaatatgacatctgcaatatatggtgtagtaagccactttctatcctgcaagattactgtgacaccattaagctatatatcttctggccacttctttttcaacatcaacacagttctataatatcaagattacatccctgtgtggaagccacccgttctcgtgccgctgagataagtttgaagaaattacagcatcttgagttgatggaagacattgtggatttggcaaagagagttgcaaatgattcattccttattgaaggcttattgagattggttataaaatagaaaataaaatacttggcaatggaagaagctttaaattggaataaatacacaggtgatataacaattctactaattaggatcagttgacagttgctggcccatgttaagttattttctttactggcctttacagagttactaaatggtttagatcctcagaaataaggcaattgaacctggccatgattaattatgtattagtagtctatggacttgctatttctcttcttggaataggaagacccgaggaactgtctgaagctgaaaaccagtttaaaaggattattgaacactatcccaatgaggggcttgactgcttggcctactgtggaataggaaaagtatatttgaagaaaaacagatttcttgaagctcttaatcactttgaaaaggcaaagaccttggtttatcgtctccccggaattctgacttggcccacaagtaatgtgattattgaagaatccaagccagagaaaatcaagacgatgctggagaagtttgttgaagaatgcaagtttcccccagtgccagatgctgtttgttgctatcagaaatgtcgtggatattccaaaattcagatttacctaactgatccggactttaagggttttatacgaattagctgttgccaatattgtaaggtagaatttcacatgaactgctggaaaaagttaaaaacaacaacttttaatgataaaattgacaaggattttctacaaggggatttgtctcacgcctgactgtgagggaatcatttcaaagattatcatcttcagcagtggtggtcaagttaaatgtgaatttgaacacaaggtcataaaagaaaaggctccttcaagacctattctgaaacagaaatgttctagcctagagaagataagactcaaagaagacaaaaaattgaaaaagaaagaatccaaaaacaagaggccaaaaattaagcacaggagagaatggaagaggacgtgaaggaaagcgctccacccaaaaacgcagagccggaaggaacctcagacaatgtccagagttgtcagtttctagatgacagaatcctgcaatgcataaagcagaatgccgacaagattaagtctgggatattgaatacctccacacttctcaaagagctgctttcctggaaggttctgagcacagaagactatacaacatgtttttccagcaaaaattttctccatgaagcggtcgactatgttatccgccacttggtccaagaaaacaatagagtaaagacacgggtatttctgcatgttttgagcgagctaaaagagatagaccccaagttggctccctggatccagagacttaatagctttggcatagacgccacaggaccgttttttactcgatatggagcctctctcaaggaacttgattttagcgtcatgactttcctctggaatgagaaatatggccataaactggattctatagaaggaaagcagttggattatttctgtgagccagcatccatgaaggaagcccgctatttaatatggctgctggaggaaaacagagacaagttcccggccttgcacggggcccttgatgaattctttgatgtcatggatagccgctgcactgtgttgaggaaacaggacagtgatgaagtgccgtttggttgtatcaaagtaaaaacaaaggcaagaaaaagaagccaaaagattcaaagccaatgttagtgggatctggaacaacatcggtaacagcaagtagtgagactgtcactccagaagaccctaacagacgcaactcagattctgcaggccccttcgcagtgcctgaccaccttcgccaagatgtagaggagttcgaggctctttatgaccagcacagcagcgagtatgtcgtccgcaataagaagctgtgggacattaaccccaaacagaaatgctccacgctgtatgattacttctctcagctgctggaagagcatggccccttggacatgaatgacaagctgttcactgaaaaagatgagttattccctgaagaaactcgaacagatggtagaaaagcaggaggctcaagctgatgaacagtgagtctgcttcctatcctgacatggagagtgacacacaggagtgggaatcgtttctttctgatgtaggagaggagattgagagcacaaagtctcagtttgaagatcagattaagtccattaagaatggctctcgtctcagtgagctttccacagtgcaggtttccgagctttcatttcctgcctggacaccgattcatcctcagttttcctctgagtcctcaggctatgaggatcaagggctgctggcttctatagataacatgactggagccgtctacatggattctcttatggaacctactagcggcttcccagaggaggttcctgaactgtcactaggctcacccacccatcagcctgaagttggtcaagggttagagctcaagagagctagccaggtgtctccatcagaacagagccctgaggctgacgagaaaccatctgcacaggccactcggtcaagccagtctccaaaaaagcctttcaacagtgttattgaacacttgtcaatggtattcccatgttataccagcactgagcttgctgcttttgttaaaaaagttcgaaacaaaaccaagaactcactttctggattaagtattgaggagattgttgagagagtaacggagcacattctagaggaacagaagaagaaaaggccaaatccagaaaaagacaagatcacatccgaggcgcagtctgctgacgttgtggccaagtcctcccagagcgcacccttggctgttgttggaccatcatccaaaatcaaaggacagaaaagagatgaggtccctacaccagatgcaaattcctgcgaattatgccacgagctattcaagtcaaaaaacatgcgcgtgctaaaatgtgggcacaggtttcacaaggggtgctttaagcagtggcttaaaggccagaacacttgtcccacctgcggcagtggggacctgctgtcagaagagtagcctgttgcaccgtccttgccagccgagcccagaaaagacggaaccgccttcctgttgctataggtagacactcttcactaatgcaccattcacttgcgtgatcattgaaatagcagcggtgtcctgttaccagtataaaaccagaaacgtgagaacttgtccactgtatcacaaagctaacacatcgagtcttgaatgcagtccataccaagttccaagcaagtggcaaccgtgtccttcttccttatcctgccaccaaaaagaaatgtagcgacagccctgtgttgttggtgttgttcagttgttctgtgtttgaccttcgtgtaaagtgatgcatgcagcctcgtgttgtggcctgaaaataaacttaactgcgttagaacctactcagaaactagtatttttagtgacctgtagacagtggcaaatgaacctggatgcattccttttctctccaaacaagaagaaacaaaacaagacaaaaatgttttccagcgtgttctctgttgtagtagcggtttggtcaccttctttctacctgtttctgtgtgagttgtggtgtctagtgacttagtggtacgaagaagtgtagctgctgagagaatgaacttctgtgcttctcagagcctgtgaacatgccttatacttgtccagtaactgtcaataaaaagacattcagaaaa

SEQ ID NO: 46 - DNA, 4190 bp, Cricetulus griseus
gagcgagagaaactctataatgtcatcagcctagagtttagccacaccaggcttgagaacatggtgcagcgacttcacggtggatttcattgactgggtagataacatgtggccaaggcacttgaaagaaagtcagactgaatcaacaaatgctattttagagatgcagtaccctaaagtgcaaaagtactgtctaatgagtgttcgaggctgctatactgacttccatgtggattttggtggtacttctgtttggtatcatatccaccaaggtggaaaggtcttctggctcatccccctacagcccacaacctggagctgtacgagaattggctgctgtcagggaaacagggagacatctttctgggtgaccgggtgtcagattgtcaacgaattgagctcaagcagggctataccttcgtcattccctcagcctacagacacattagtgtttggtaggaaattttttagtcatagcttcaacatccccatgcaattaaagatatatagcattgaagatcggacacgggttccaaataaattccgttacccattttactacgaaatgtgttggtacgtgttggagcgatatgtatactgcataaccaaccgatctcacctaactaaggaatttcagaaagaatccctcagcatggatatggaactaaatgagttggactctggaaatggtgacgaggaaggggtgatgaggaggggctggggggagaggaggaggaggaagaggaggaggaggaagatgacagtgcagagggaggggggtgcagccaggctgaatggccggggcagttgggctcaggatggagacgaaagctggatgcagcgggaggtctggatgtctgtcttccgctacctcagccgcaaaagaactctgtgaatgtatgcgagtgtgcaagacgtggtataaatggtgctgtgataaacgactttggaacaaaaattgacttgagtaggtgtaaggccatcgtaccccaagctctcagtggcatcatcaagcggcagccagtaagcctcgaccttagttggactaacatctaccaaaaagcagctgacgtggttggtcaatagctgccaggactaaaagacctccttctagcggctgttcctggtctgcggtctctgccctcagcacatccagctcgcccccttctcggcaggttgcaataaattgacagaccagaccctgttcttcctaaggcgaattgctaatgtcaccttgattgaccttcgaggatgcaaacagatcactagaaaagcctgtgagcacttcatctcagacttgtccatcaacagcctctactgcctgtctgatgagaaactgatacagaagattagctaagacatgctcagactggactgaacaggaaaatcttcccctgccttcccaccaaggagagtctctccctgcgcaggctctgaggccaatgacacactccctctctgctctcttctctgagcccttctcccacaggtggggcagagaggatggtggacaccaaggttatttgcctgctcctctccctcccaaggaaaagagaggagaggttgatcaaggagaaagcacaggctgtgctgtcccagtgcctgcttgcttgctcatctgccagctgggaagctgggctctcagttttggggaatttgtgcatctttcacctgcactgggccaagagccctagcttctcacccatggtcccccagcagtgcctggttctgagcaaactccagggagataggtagccttgcctctgtggccaggttctcctcatggtgtccgttgcgcgtctctcctccgttatactctcccggcttcttcaggaggggctaacagccctaggaacaccagacctggcaggtctcaatggtgctgtgagatgtctgaagctttgttccatgtctgtactatccccttttcttttccctgagcttgatgctgtccaacactcccccccagagatgctccatttcattgccacccaggcatattctaagacaggcatcatctccccttccctccccatcccaatgccttctaccaactgtccttttccacgtgtcctctttcctgcccgaacagggctttcctagaatgtgtgtcctcagaaggagcagcgtgtttcctcaggttgggggaacagaggactggttgagtccccacttgcctccaggccaggctcctctaggcttctggtttagcatagccctctgagcccaggcctgtatagcctagcagctcactgacctggtgccttttaaggggaagtcctaattggaagccagtcacctgccctctgcctgcagccttggaagtgtgtgtgcatgtgcctctgtgtgtctggctgagtgtgctgcacgtgtgtgcagggcaggaggggagcatatgtctccctctccaccacccttcttcaagccccatcagctgccccttttactttgcattgaacggcctgtccaaagatcctctctctagggcagcagagagtcttttttgcaactttaaaaaaaaaaaaaaaaaaaaagaaagaaatggtcggaattattctgggtcaatatttagagtgtgaggagatgctcagcagaggcctgtggccagagtttgtcagtgatacatgcaaatttgcactctgctccccatctgtaggagattgatagcacagccttgccccaccttctcttcccccagccataccccttcccacttaccaccccactttcctgtatcccagcctcaggctttcccaaactccatcaggaggggacagagcccaggcaccatgagtctgaagtgtgaaccgcccaaggagagatgctaactgcacccttgccactgccaaagcaatagaggcagaagcatcccctctttgccacccagcccagctttgaccctggcattaaccagactttttccaggaaaactgggttctggcaaggagtggcattgtttcttccaatctgctgattttcttgtctgcacctaaaacacagcagtatgctcccatgaccctctgccattccattggtcttcaggacccaggattctggggctgaaatgttgaagaaacgccagtgacttattccagagtgcctcagttaggggaacttctgtaaagaaccctgggtgttgagcaaaaaccttattaatattattaatgacctataattagaagcttcctgcctcttttttttctttttggttgctcctgtggaaatactaaaattactaagtttgtttgtcgtctttttataaaaggggaggtggagagaccccttcagagcagggattgtgccgggagagtgcctctgacctttgggagagtttatccacagaaatttctaagctgatggcttgtctggggttttagtctttgcatttaggtttggaaaaagcaagagttttaccacacagattggtcagctgaaaagggagctcaggatggcggcagatggactgatgatgcccttgctgggcctttcttttcttcaggactatgagggagaatggtttttagaggtaagggttggtccttgcaaaggagagaagtgtctctggggcaaagaacatgcaagttcatttgtcctgcatctaatttcagctgtggtcttgccagagcctggcttcctcagactgtaggatcagacctctgccttcatctttccacatactggggcaaaaaaccacaaaggaaaggaagataattatatatatataactatatatatatataatataaaatcacttggtgattaaaaaaataactgctcaataaataaaactcctaaagtcactatgtttaaagggtttgttttttggtgggggaaatattgtaaatatatattttttttgtttgcttatttagagtcgatctccaatgttgtgctgagatttttaaattaaatgtaagcattaagggagtgagtcttcgcctccagctgacacattgacatcattgcgggtcagggaaggaaggaagctagttggactttgttttctaaaagttccccatttggttttagaaagagcaaagatgtctttcttctgacacttgggaatgggagatatttgtgtaataaaatttttaaacgacaaaaaaaaaaatagcctccaatgggaaatattttgatttggttttcttttttgtttttgtttttaaataaaaagactttaaaaacaaaaa

SEQ ID NO: 47 - DNA, 4181 bp, Cricetulus griseus
gtcccagtgcgcgggtctgtggagagccgggatgcgagaggcggcggcgcgaggtggacagagccgagcgggcattggagtcagcagggagacagtggctgtgtgagaccccgaaccgagaggccggatccgcggacgccgctgacaagcgatggggaagaaacagaaaaacaagagcgaggacagtaccaaggatgatattgattttggcgccttggctgcagaaatagaaggagctggtgctgccaaggaacaggagcctcagaaatcaaaggggaagaagaaaaaggaaaaaaagaagcaagactttgatgagaatgataattctgaaagaactggaagaattgtctctggaagcccaaggcatcagagctgacagagaacctgctgcagtaaagcctacagaaaacaatgaagaagaatctgccccaaaacaagataaaaagaagaaaggacaaaaagggcaaaaaaacaagttttgatgacaatgatagtgaagaattggaagataaagattcaaagtcaaaaaagactgcaaaacctaaagtggaaatattctctgggagtgaggatgatgatgattctaataaactttctaaaaaagctaaaaaagctcaaaaatcaaataaaaaatgggatgggtcagaggaggatgaagataatagtaaaagaagtaaagagcgttctagagtaaactcttctggggaaagtggtggtgagtcagatgagtttttacagtccagaaaaggacagaaaaaaacccagaaaaacaagccacttcctaacatagagagtgggaatgaagatgatgactccttcaaaattaagacagtggcccagaagaaggcagaaaagaaagaacgcgagaaaaaaagagagatgaagaaaaagcaaaattgcggaaactgaaagaaaaagaagagctagaaaaaggtaaaaggaccagagtaaacagaaagaacctcagaagaaatctgaagaggaaggtttgaaactcaaagtgactcttgatgcaggagctgcctctgaagagaaaggagacattcctacagctgtaaaagaagatgacaatgaaggagacaaaaagaaaaagataggaagaaaaagaaacagaaaagatagaaaaagagaaagagaaaaagaaaggccctagacaaatctactagttaaagctatccactcattgccaaagaaaaggcccgtttatgaagataaaaagaagaggaaaacaccacaacagccagaaaataaagaagtatctgaagctttggaaataagtgttcctgtggaagtcgtggagcaagtaataccagaaaaagaagagatactcccttctgttgaaccagaggaagaagaagaaactgaggacgctggcttagatgactgggaggctatggccagtgatgaggagagagaacaagagggaaatacagttcacatagaagtacaagaaaaacctgaagaagaagaggaggaagatgaagaggaagaggaagaggaagaagagagtgaagatgaggaagaggaaggagaaagtgaaggcagtgaaggtgatgaagaagatgaaaagatgtcagatgagaaagattcagggaagacaaaccaaaacggagaattgagaaacgacgacttgaacatagtaaaaatgtaaatgcagaaaagttaagagctcctatcatctgtgtgcttggacatgtagataacaagggaaaacaaaaattactagataagctgcgtcacacacatgtccaagatggtgaagcaggtggtattacacagcagattggtgccacaaatgttcctcttgaagctattaatgaacaaactaagatgattaaaattttgacagagagaatgtacggattccaggaatgctgattattgatactcccggacatgagtctttcagtaacctgagaaacagaggaagctctctttgtgacattgccattttagttgttgacattatgcatggtttagagccccagacaattgaatctatcaacctcctcaaatctaaaaaatgccccttcattgttgcacttaataagattgacaggttatatgactggaagaagagtcctgattcggatgtggctgccactttaaaaaagcagaagaagaatacaaaagatgaatttgaggagcgtgcaaagaccattattgtagagtttgcacagcagggtttgaatgctgctttgttttatgagaataaagatccccgtacttttgtgtccttggtacctacctctgcacatactggtgatggcatgggaagtctcatctaccttcttgtggagttaactcaaaccatgttgagtaaaaggcttgcacactgtgaagagcttcgagcacaagtcatggaggtcaaagctcttccaggaatgggcaccacaatagatgttatattgatcaatggacgtttgaaggaaggggatacaatcattgtccctggagtagaagggcctattgtcacacagattcgaggcctccttttacctcctcctatgaaggaattacgtgtgaagaaccagtatgaaaagcataaagaagtggaagcagctcagggagtgaagattcttgggaaagaccttgagaaaacacttgctggtttacctctccttgtggcttataaggatgatgaaatcccagttctcaaagatgaattgatccatgagttaaagcagacactaaatgctatcaaattagaagaaaaaggagtttatgtccaggcgtctacactgggttctttggaagctcttcttgaatttctgaaaacatcagaggtgccatatgcgggaattaacattggcccagttcataaaaaagatgttatgaaggcttcagtgatgttggaacatgatccgcagtatgcagtgattttggcctttgatgtaagaatcgaacgggatgcgcaagagatggctgatagtttgggagttagaatctttagtgcagaaattatttatcatttattcgatgcctttacaaaatacagacaagactacaagaaacagaaacaagaagagtttaagcacatagcagtatttccctgcaagatgaaaatcctccctcagtacattttcaattctcgagatccaatagtaataggcgtcactgtggaggctggtcaagtgaaacaaggaacacctatgtgcgttccaagcaaaaattttgttgacattgggatagtaacaagtattgaaataaaccacaggcaggtggatgttgcaaaaaaaggacaagaggtctgtgtcaaaatagaacccatccctggggagtctcccaaaatgtttgggagacattttgaagctacggacattcttgtgagcaagatcagcaggcagtccatcgatgcactcaaagactggttcagagacgaaatgcagaagagtgactggcagcttattgtggagctgaagaaagtatttgaaatcatctaattttcccacatgggacagaatttggagtaaatgtaatattatgctgtgatattaccaacggaacagacatatttggacgctgatggacataagtgtataaaatgttttccatgagaaaccaagcaacttacactggtttgacagtggtcagttccctgccccacagtccagcgtgcctgcactcacccctccagacttggctgctgttttaaagtttgcccttcctcaaatttggatttttattacaaatctaaatctctttcaattttatactgattaaatcagtcctacagtatttgattaatttaaggattcacacacaaaaaaaagcctgtacaaaatatacatacagttctttattattaaacaactgtaaacacttcactgtaaaaatccataaaactttataaacaaacgttttgtaaatagaatctatgctacaagtaaaagaagtaacacaattatttacatgcaatactgacaaatttggcactttttgaaaagaaatgtacaaaacacttgcttaaaaagaaatttaaaattataaaaactcagagcatcactatcatgcactttgcaaatacctcacaagcactgctggcagagagcagagagcaccaggctctctggaaggtttaggtaactttcagtgtgcttccataagtctgttgtaaaaccacctgaacattgtcaagaataaagtcaaacgccatgttccactgtttggctgctgaagag

SEQ ID NO: 48 - DNA, 4159 bp, Cricetulus griseus
cgaataggcaccggaggacaagttgtggattgtagtcgtttgtttgataatgatttaccagatggttgggaagaaaggcgaactgcttctggaagaatccagtatctaaaccacataacaagaactacacagtgggaacgcccgacacgaccagcctcagaatattctagtcctggcagacctcttagctgctttgtggatgagaatactccaattactggaacaaatggtgcaacatgtggacagtcttcagaccccagactagcagagagaagagtcaggtcccagcgacatagaaattacatgagcaggacacacttacacacgcctccagatctaccagaaggctatgaacagaggacaacacagcagggtcaggtatatttcttacatactcagactggtgtgagcacatggcatcgatccacgagtgcctagggatcttagcaacatcaattgtgaagagctttggtcctttgcctcctggatgggagatgcaagtggtgtcattatgtcctgatgacactgagtgtctgacagtgccaaggtataaacgagacttggttcaaaaactaaaaatcttgcggcaagaactttcccaacaacagcctcaggccggccactgccgcattgaggtttctagggaagagatttttgaggaatcctatcgacaagtcatgaaaatgagaccaaaagatctctggaagcgattaatgataaaatttcgtggagaagaaggtcttgactatggaggggttgccagggaatggttgtatctcttgtcacatgaaatgttgaacccttactatggtcttttccagtattctagagatgatatctacacgttgcagatcaaccctgattctgcagttaatccggaacatttatcctatttccattttgttggacgaataatgggaatggctgtattccatggacattatattgatggtggtttcacattgcctttttataaacagttgcttgggaagtcaattactttggacgacatggagttagttgatccagaccttcataatagtttggtgtggatacttgagaatgataccacaggtgtcctggaccacaccttctgtgttgaacataatgcatatggcgaaattattcagcatgaactcaaaccaaataggcaaaagtatccctgttactgaagaaataaaaaagaatatgtcaggctttatgtaaactggagatttctccgaggcattgaagctcagttcctggcactgcagaagggatttaatgaagtcattccacagcatctgctgaagacatttgatgagaaggagctggagctcattatttgtggacttggcaaaattgacgtaagtgactggaaggtcaacacccggttaaaacactgtacaccagacagtaatgttgtcaagtggttctggaaagctgtggagttttttgatgaggaacgacgagcgcggttactgcagtttgtgacggggtcctctcgggtgcctctgcagggcttcaaagcactacaaggtgctgcaggcccaaggctctttaccatacaccagattgatgcctgcacgaacaacttgccaaaagcccacacttgcttcaatcgaatagacattccgccctatgaaagctatgaaaagctctatgaaaagctgctaacagccattgaagaaacatgtggatttgctgtggagtgatgagcaccaagagcttacctagaactcttatttatccttgggccaacggtctccttcagcagcgcttcagagaacgctggaatacaggacagccccctcccctgccccttagattctaggacactgtgaggggaaaggacaattttgaaattcctttttaaggaaaaataaaggtctttatgctttgccatgaggacacactcagctgctatttaaaaattaataccttgaacctaaagaatgctgactccctgcatctccagagttaggcagtattctacacttaaagactactactatttttataaaaggttatctatccaaatcgcttcacagactctcgtctctcgcacagcaagacaactccagcagtcggtacaagtcacatttcattttgattgaatacatggtttttgaaaagctcctatacttgctctttgtaaaaactaaataaagttattttgaattgttccacctttgtaaacaattggctaaagaggaattattacctttatgaaatcaagccatttacatgtttagttgtgtttttctatagcagagcattatattttgcattatgtgggttaccctagctaaggtgggttttatattttcaagaatgactttcttagaaattcctagtacaacatttaaactgagtttatttgctactctccctgtttttaagacaactttaaaaaaaaaaaaaaaacctcatgttcttgaatcaagaggatcaggtattttgaatttactttcatcttaaattgaaatactgcattttttataacttctccgcatgtgatggggttttcattctttgctgggtcagcttgtcttttatatgctatttctgtaaaccaaagtctctaataagtacatctaacttatattttaattaagtttctaaaaggataattttgccctgaggatggtttagcttagcgagccctgctgttacttcactagaagagctggaggtggcagtgggcatggtgggcagggaatgttgtacatgagtgaagtcaggtgtgctggccatgcctgggatcctgctcctgggaaggccagcctgagctacatagcagatcttggcctcaaacaagagtggctctaagtctattgtacagtttattctaaaccgaaggtttcatttagaagtagggagtggagagcagctgtctcattgtgactcccacgccttcaggtagatagagctttcaaggtttgtggctcatcccgtcgtctagaaggtaaccaaaattctggggtgatggtatgcaaccatctaaaatcacattggattttaaaattcaatgatcagaacaatacactattgttttaaaacatgatgtgaaataagaatagcaaattttgatgagcttggacacaaggacatgaagaatacttgaagaaattgtgactaagcctgatggctgacacctgtaatcccatcattgggaaggtagaggcaggaggaagaggaggtcaaggccagcctcatctacatagtgggtttgaggctcttgagaccctgtctcaggactggaatgtagtgataatgagatgctactttcagtggttttccatgcagtgtaaagtaggcaaatcccatcgctttttgagtgccttttaactttataacaatgacttgacagagctttaaagaaaattgccctatgtaacaaacagtctgcagtagcaagtgatatctgaaaacatgatttagatttcaatttcaaaattatgttacctgattacttccaactaggtgctaagcaaacaaaaaccccaatgtcattgaacctggacttgccttgtgtttaatgtgaatatttatggcataaagttttaaagtagtgctatgtatcctgtacgttttgttttctagtttgttaacctgtatttttacagggctcccacccccaccccacccacacttacaggccagagcacaaattcctcttctcctaaatccattgtcatttgctttctttgacaacactaaatctactctgcacttcagtgcgttggacaaacagcactgatgggtgcacacttccagcggctgcagggtcagcagccttgtgtttcagctgcagcttactgtcagtggccgcgtgtggtggttaatgtcctcaacactagaatgatgattgtaccaaatgctgagttgcttattctagatgtaattagttcactttatgtaatattcttcctttcctcaaactgactttaaaaacaaaattttatcattttcattgtatttattacagaatgttttagctttgatattctttgtattttctctcatttgttacatgagctttatcaataacatctgtataaatggtttttaagaatttactaagtatgtatgtatgtgcccatgccgaagttgagcaataaaatgaatgctgtttgcactgtcacagcagctaaagttaagaaaaaaaaaaaaaaaa

SEQ ID NO: 49 - DNA, 4144 bp, Cricetulus griseus
  modified_base (1155)..(1155): a, c, t, g, unknown or other
  modified_base (1221)..(1221): a, c, t, g, unknown or other
gcaaacctctggactcaggacttctgcataacaatgacagactctcagatggagacagtaaatactctcaaactagtcacaaactagtgcagctgttgacaacaactgcagaacagcagttacggcatgccgatatagacacgagctgcaaagatgtactgtcttgcaccggcacttccagctctgcctcctctaaccccttcaggaggtacctgcccctcttcccacagttctctgactgaacgacataaaattctgcaccggcttttacaggagggcagcccctcagacatcaccactttgtctgtagaacctgagaaaaaggcagtacgccaacttctaactgactgtgtcagtacctggacaagccccaaggaccgccagcataaaactagaactggatgcttacaaagaaaaagagtacgaaagaccaatacaactcctagacgactacctttagacaaagatagaaaaagatttggagaaggcagcacagttgccaagcttgtgtgagacagacaggatggacagtgcagtcactggtgtcaacatcaagtcagagatgatgcccgcttcgcttcagcccaccactgccagatctgcccccaggctgaacagattgcctgaactagaattggaagcaatcgataaccagtttggacaaccaggagcaggcgatcagattccatgggcaaataatactgtgacagcaataaatcagaataaaccagacgaccaatgcattagttcacaattagatgagcttctttgcccaccaacaacagtagaaggaagaaacgatgagaaggcccttctggaacaactggtgtccttcctcagtggcaaagatgaaacagagctggccgagctagacagagcgctggggatcgacaagcttgtccagggaggtggattagatgtattatctgagaggtttccgccacagcaagcaacaccacctctgatgatggaagaaagacccgccctctacccccagccatactcatctccttctcctactgccagcctccctggtcctttccaaggcatgtcgaggcgagaaaccttcactggggactatgccagttcaagtaacacctccccgaggcaccttttcacccagcatgggcatgcagccccggcagactctaaacngacctccagctgagctacagcagcggttacagggacagcagcagctgatgcaccaaaaccggcaancgatcaccagtttgcagcaactgcccctgttggcatgaacatgaggtcaggcatgcagcagcagatcacgcctcagcctcccctgaatgctcagatgttggcacagcgtcaacgggaattgtacagtcagcagcatcgacagaggcagattatacagcagcaaagagccatgctcatgaggcaccaaagttttgggaacagcatccctccttcatctggactgccagttcagatggggaacccccgtcttcctcagggtgctccccagcagttcccctacccaccaaactatggtacaaatccaggaaccccacctgcttctaccagccctttttctcagctggcagccaaccctgaggcgtccttggccacccgcagcagcatggtgaacagaggcatggcaggaaacatgggaggacagtttggcactggcatcaatcctcagatgcagcagaatgtcttccagtatccgggatcaggactggttccccaaggggaggccaactttgccccatctctaagccctgggagctccatggtgccgatgccaatccctcctcctcaaagctctctgctccaacaaactccacccgcttctgggtaccagtcaccagacatgaaggcctggcaacaaggaacaatgggaaacaacaatgtgttcagccaagctgtccagaaccagccatctcccgcacagccaggagtgtacaacaacatgagcatcaccgtgtccatggcaggtggaaatgcaaacgttcagaacatgaatccaatgatgggccagatgcaaatgagctctttgcagatgccggggatgaatactgtgtgccctgagcagatgaatgatccagcactaagacacacaggcctctactgcaaccaactctcatccactgaccttctcaaaacagaagcagatgggaaccaggacaagaagacagaagagttcttctctgtggtgactacagactagaggaattactgctacaagtgcaacaggttcaggtgtttgcttgacgtccagtgtacagtgaatctggtaggcggggacccttacctgaaccagcctggtccactgggaactcgaaaacccacatcaggaccacagaccccccaggcccagcagaaaaaaaaaaaaaaaagaaaaaaaaaaaaaaaagtttggacaatcttaatttcttgagccaaaagttaattattcttatttttataatcagtcattggcttcttatctggatgaaggctttttggagggaaaccaaaataacaagttccaaggggagatgaagccctgtcccaccgggtcagccctgcccctgccctggacgaagagcccacggggctttgcctgtttgtccaccacgaggctgtcatgttcctcccaccaacagccgcccctcccgaccccggcagctcatgtgcacaatcagcttctccaagcaactctatctgttggcatcgagagaatatttttgcttctacatatgcaccccttctcctttttatagagatggattgaaaccaagatgcctctaggaaagaggatgaaatgagtatattcactgaggaatccaaaaaatgcagtttgggggaaaatgcaataattttttgatgagatgggtgaaggacaagaaccaggttctatcaattattgtagataaaatgttctgattaagtctgtggggagaagcagcctgttctttctgcttttactatgttaacagcaaggtagctaaagttatttaaaataaaattaaatttatgatccgagtagcttatatttttccttagatctcactgtaaatatatttttgatttcttgtagaaattgattttgttctgtttaattttatgctttttttatcatcctcttgatttttctaaatttgtgtgtgaaatataatgttgattgaattgcaattacatttggctggtaatttacattatcctagtaactgtgaagccatgtatggatttactttggaactcatcagagtggcactgccagaaagagctcttctagctgagcttgggcagaccaccccagagtgagaaaggagccagtgaactgactctagtgctagaagttctgccacaggtgggagagcttgagcaaggcgtcgcaagagaggccaagggagccctccagcgctaaccttgatctgcgtccctgggcctgcggacggcaacactgaccttctgcaccagctacctctgctcacacagcagagaaaaggccataagaaccaatgcagatgaggagcatggacttaagacttcaaggaagaagccatttccccaggtccttccttccttctgcatctcaccacccctaatttcaaacaactccattgaacagcagcatctattcagaaactattcattttgaaaatggtggaagggctcatgtggtagcaactatgaaacagaactaggaccctcagttacagacattatcttttttagtttttcagaaaatgcatccctgagctcatgcatttccagcttgaaagcccagccatattactctagttcctaccaaactgctctaggaggtcgtttcccctgtttgtgatggtaagtgttcagacttcaggaagttcacctttaacttcagcattccagatgaagtttcctgactcagtgctttcgcataaggacctagaagagaaaagcagtatggaaaattggagatgctaacgccctcccccatccccaccgcaccttaaagtatgcatgtcaccttcgagggtttataattgcactgtttgttttatgtatgtacagattaaaattattgctacatttgaggaaaatgaaattgcttgcttctatgtaattcctgtcattccacaggaaattgacttttccagctactgaatagaaatttgtttaaacaaacctaaaaaaaaaaaaaaaaaaa

SEQ ID NO: 50 - DNA, 4134 bp, Cricetulus griseus
  modified_base (375)..(375): a, c, t, g, unknown or other
tggaagatagctgtcaccaggataacctgtaatgggcaaggagccacagagaagaaaacatttcttttagttttaaaccttggtttgaaagaccagcatgttttggaaatttgatcttcactcatcatcccacatagacacccgcaagctcatagagtttctgttaaaagcagaatgtctcgaagacttagtctcattcattatagaagagccgcctcaagacatggatgagaagatcagatacaagtatccaaatatatcttgtgagttgctcacttctgatgtctcccagatgaatgatagactgggggaagatgagtccttgctattgaaattgtatagcttcctacctttatagagcagcttctatcaaanaatttttcacaaggagaagaatgaatcagccatagtcagtgcaatccagattttactgactttacttgagactcgacggccaacatttgaaggccatatagaaatctgcccaccaggcatgggtcactcagcttgttcagttacaagagtgttctagaagccatccgaggaagacttggatctttccatgaactcctgcttgaaccacccaagaaaagtgtgatgaagactacatggggtatactggaccctcctgttggggaacactcgattgaatgtgattaggttgatatccagcctgctccaaaccaataccagcagtataaatggggacctgatggaactgaacagcattggtgtcatattggacatgttcttcaagtacacatcagaaaatggcaccattactgatcaagactctgctggtgacaatctgttattgaagcatcttttccaaaaatgtcagttaatagagcgaatccttgaagcctgggacacaaatgagaagaaacaggctgagggaggacgacggcatggttacatgggacacctcacgaggatagctaactgtattgtgcacagcactgacaagggtcccaacagtgtgttagtacagcagcttatcaaagatcttcccgatgaagtaagggagcgatgggagacattctgcacgagctccttaggagaggcgaacaagaggaacacggtagatctagcctttctgattatcagatgacgatgagaagtttgcagatcaagacgacattggcaatgtttcttttgatcgggtgtcagacatcaactttactctcaatacaaatgaaagtggaaatattgccctgtttgaagcatgttgtaaagaacggatacagcagtttgatgatggcggctctgatgaggaggatatctgggaggagaagcacattgcctttactccagaatcccagaggaggtccagctctggcagtacagacagtgaagaaagtacagactcggaagaagaagatggggccaaacaagacctgtttgagtccagcagtgcaaacacagaggacaagatggaggtggacctgaatgagccacctacctggtcagccaactttgatgtcccaatggaaaccacccatggtgcacccttagactcagtgggatctgatgtctggagcacagaggagccgatgccagctaaagagacaggctgggcttctttttctagagttcacatcctctctgagcacaaaggagtctttaaggagtaattctcctgtggaaatggaaaccagcactgagcctgtggatcccttgacacctggtgcagctgccttggcccctcagccagaggcaccaggcagtgtggccatggaagccagctcagacggggaagaggatgctgagagtacagacaaggtaactgagaccgtgatgaatggcggcatgaaggaaacactcagcctcactgtagacgccaagacagagactgccgtcttcaaaagtgaggaagaaaaactgtctacctctcaagatgctgcttgcaaagatgtagaagagagccccgaaccagcagaggccaagtgcgcagctccccggacccccagcagtagtcctgagcaaaggactgaccagccaagcatgccaagcgacacgtcagttaatggccctgtatgatgaatgacacctgctgctgctgaatgaggactgcaggccaccaccacccaggggctctggaggggttacccagagctaccaagccgccactgctgcactctgcaagggatcaggaccagcaacctttatattctagattctaagacattgtacagagaaattcagaagtgtaaaaatattgcacattgaaaaataccaagaatttttgcgtatgtttatattgtactgatctaaataatgggtagcctgtgacatcagatcttgccacccatgtaatgatagtagtgatacatagttcagatggttgtaagaatagttttataaagtgactacacagatctattgtattcgaaacataactatttgacaattattagtgtgaccaaagtattaggcagttttcatacattttccaccttgtacaaaattctgaattcatttttcttccaggttggcacagagctgtcgatgggaaagccctctgcgtattattttggttgttctgacttacaaagtgattttgaataatacttggtgttcttttataacccacttttgattggtaactgttttctgtattgttgcaggcggatcaaatgagtgagtcttggtggagatttaagtatttattgctacagcttagttgatgaaattgctgttcttgtaaagccatatgttctgttaggtcctgtttgctcagagcgtttctttctacaggtgaaacactagaatattggagtgtacatgactgtggttgggtggttttttgtttgttttgggggagtgtttgttttttgttttggtagttcatccgccttttaacccattcaccaaaacatcccttgtcagcaagcatcactggtggccatttcagagtggtctgccatctgcactgctccaagtcacagaggtgagtccctggaaatgctcgtgctggtgacagtgtagaatgcatccatcaaacgggatggctttaacagaatcacaacctggcatccaagcatgtttcttgttttactgtaccttgtgaggttttcacttgtaaaccagtggattttagaactggtttgtgtgtatatagtgattatggatactaattcatgtaatttataattttctatgtcagcataaacacatcctagcctcctccaacagctgaagcaatggcctgtgccctgccgtggcatctggggaaagggctcagtcacctcacctcttgcacttttagatgcagatcagttttcatttctttaatagaaatctttaatgagtcacatatttttacatcatttgtttttcctgaccagtatttaaaaccaaaagaatcttctgaaaaatggccaacaagttttttagaaccagcatcccaagcagcgtgcctacatgacatcacgtttggaaagagagtcaagtgtttgatgccttactccttacttgcttctcactgtagacagtgcagggactgcctcaggtgtccgaggcagtctggtctggtcaccaggctcagtgggcagcaggaagccctgggactggtggtgaggggcttggtggcctgtgcgtgcccacccaggacccttcagtcacagctccttcaggagagactgctctcctctggaacctggtgccaccagaagacagggctccttctgctcatctcagggatggttgacctgcgtggcccaggacctcacattgctggcggatggcatgttcctgtctctcctggtgatgggcgttgcttgccacagccagggtttggccctttgtcagcccacactgcctgcttgctgtggtttgagctggcttttccatcccactgtccactggggagaagcatttgggtgttgtctttggggaagaacttaggtttgcttgtcttggggaaaggctgtgagggtaagaagggacaggtgtgttgggttggagggtgccagctagggcttgagatgagttcctgctcctttcatttctgtgtattggccgtatgaatcgcaagactaacagatgtctgcagtacaatacctgtattaaaagtaataacaaaataaagcctgatgctttgtttctaaaaaaaaaaaaaaaaaaaaaaaaaaa

SEQ ID NO: 51 - DNA, 4100 bp, Cricetulus griseus
tgcagttcaagattacgccccgtgtcagtagaaatggacagcagcagtttcattcagttcgatgtgcctgagcacagcagcaccgttctgagccaactaaatgagctccgcctgcaagggaagctatgtgacatcatcgtccacattcagggtcagccattccgagcccacaaagccgtcctggctgccagctccccatactttcgggatcattcagcattgagcactatgagtggcttgtcgatatctgtgattaagaaccccagcgtgtttgagcagttgctctccttctgttacactggaaggatgtccttgcagctgaaggatgttgtcagttttctgaccgcagccagctttcttcagatgcagtgtgtcattgacaagtgcacgcagatcctggagagcatccactcaaagatcagcgtgggccagaagcgagctatgtctgttcacctgcacagtgacctgcagggtgtggtgcaggggtctgacagtgaagccatgatgaacaatcccagttatgagagcagtccccgggagaggagtgcaaggggttactggtacccatacaatgaaaggttgatctgtatttactgtgggaagtcctttaaccagaagggaagcctcgacaggcacatgcgactgcacatgggaatcaccccctttgtgtgcaagttctgtgggaagaagtatacacgcaaggaccagctggagtaccacatccggggccatactgatgacaaaccattccgctgtgaggtctgtgggaaatgctttcccttccagggcaccctcaaccagcaccttcggaaaaaccacccaggtgtcactgaggtcaggaatcgcatggagtccccggaaagaacagatgtgtacgtggaacagaaattggaaagagatgtgtcagcctcagagatggctctagattcccgaatggaaatccacacagtatctgatgctcctgactaaggagtctcccaactctgccagtgattcagctatgccaactggttgaccccatgttctctgccaagaggcaggcacttttactgtgggtgttagccctagtacattttcatggagagaggctagatgccgtcagctgatagaaatgggtaacctttcatatttaaaatttctttagtggtagttagacaatttatacatatatatatatataataaagtggttattatatatagtatatatacattctcaaatttgggtttattctgggtgaggtgaatgtaaggaatatataatttaaatacaatgtgaacagagctctgactctgtttcaaccctgcctactatgttagcaaacacataaaccaaatgccataaaaactccttcaactgtagtgggaaccatttggaacttttgttcgttgtccaggtatgctggatgacctgtggtgctgacctttctacacagtgtagtgttatactagccaaccccaaaggagcagtggtttcaaggtttttacacaaatctaccttcattccgtactgtagacgcatacataccaggttttgttgttttgtttccttttgggtttttctctctcctcaaacagccagttcaggtgcacaacaactttttctatgcagttcccaaggaaactgcagaacttggaatttgtactttttgtaaagatatatactctatgggaattgcaagcaatatatctatcttagtattgtatgtgctaatgagagcctcactggctcctccactctcagtgtttcctgcttaaaagaaaaaatcaaggggaaagatggacccccaagtgtttacctacttaagtgtgttctgaggtttcaggtaaatgtttgtgatttttcattttccttacacaaatacattttttttttttgcatttttctttttgagaattaaatacaaaaacttttttgtgttgtgatatcagttaagtttgtgacaagaaaggccccaaatctaaggacatgagacgtcaagctcaggggaaggagcctccttttcacttaggcctggggccttctgagatggttccagagctttctatggtgagtggggtgcactcgggcagcacgcccatgtcctggctcttgttactgtctgtctgaacttacgtacatgtagttcttgtgtttgtcaacttgttagctggtttgagtttaccaaagagtgacttatccaaaattagttctttgtacaaaaataatacattgctttgtattgttacagttcaggttcaaacgtaatgggacgtgttaggggcgagaaaaccaatttgagtttttaatgatcatgattccgcatttcgcaagttgtgcttgctcccattcgcgttgctaacactttactctctccactgctagcagtgttaagaatgaattctcaagccataacacagtactgtaaagttcacggggctttgagggaggcagtggccaggccagcatagcactgcataactccttgtggacagcaaacctgtccctgtacagttgtaggttaggtctctcactatagcagatgcagaagtccactaagataaacaatatgtgaagacatcctttacagtgaaatatgtcctgctttcatacaggcctgtgcgtaattgagtctcttctcagctacctttccatgttagacaatgtgaagacagccacagcacccttccctacgacatttaccccattgcacaaactgtgaaaacattttatacttttgctaacacttgtggttttcaatccttatgtttcttctcactagtcctctgccctcttgtttctactaaagctgtaaatacatttagaaaccatttgtaaatacaattaaaaagatgaattcattttcccgttcagtggaaaagcctcccaatcaattggctctgccttggcaattttttgttgttgcgtggatttctctctctctccctccctccctcccttcctccctccctccctccctccctccctccctccctctgtgtgtgattttaaattttaacaacctagattctggggagaatttgcaggaacacaaagcaagggctagggaaatggtccatgtgaatgaactctactttaggttggtgtgttttattttaagctttccacttattactgtgatgtttttgttatcactgttgttaaattctttaatggtttcctgtgaagcctccactgaaagggactcaaatatgcaacatctaaactattttccaagggctcatgccccttgaatggtgcttctagcctggtcagggttatttattaaattttatatatgaaagtattggggaattatgtaaactctttatatgagactatctagttcttacatcatagatttcatatactcagtgcagctgaactgaaagttcagcgaagtcattcactctgttccagatttgtaatggttgtcatgtgtggtcttcagtaagtgccagagttcccactgttctgccaggacttgccaaatccaggtgcccctgggtctggcatatacagggctatcactgctcctgtttagctaccggagtaagcctccatcactactcagtggcagattgagcacacagacctctcactgcccttcagtgacaagtatgctgtgaactcggcctcgggacttgaagatccaagtcccaggctgctgtcctgaggaggtaaactcgactgcctccctgacaatgaccgttttcctaatgtgaaacatctcttaccactttagcagtagggctaacatagtcttccgttacaaatggctgagcaatttgaatgacttcacatggtgtcattatcttgcaatataaactggtaacctcacaacgccacacttcatcaccacgtgaagtaaatgaagctagctaagcggatgctgtatcaactagtaacttgccattaagggttattttatagcatgaattgaagactatttattcaaatgatattttactcttgtattcattttgctttaggtttgtgacatgaatatttcagtgctgcttaattttgttctgaattcttgtttcttgcttgtaaatggctttttatggtataaagtcaatggaaattgctgtttgtaaataaagatgctgctagagcaa

SEQ ID NO: 52 - DNA, 4079 bp, Cricetulus griseus
gagagagagagagagagagagagagagagagagagagcagctactgtagcctgcatccacatgaacgtttgagctaccccatcccactcctcagcagacatcaactccagtctccctccgatgtccacgttccatcgtagtggcacaaaccattacagcacctcttcctgcacacctcctgccaacgggacagacagtataatggcaaatagaggaactggggcagcaggcagctcccagactggagacgctctgggaaaagccctggcttcgatctattctccagatcacactaacaacagcttttcgtcaaacccttcaactcctgttggctcccctccttcactctcagcaggcacagctgtttggtctagaaatggaggacaggcctcatcatctcctaattatgaaggacccttgcattctttgcaaagccggattgaagaccgtttagagagactggatgatgcaattcatgttctccggaatcatgcggtgggcccatgcatggaatcattggaccctctcataatggagcaatgggtggtctgggcgtcagggtatggaactggcctctttcagccaacagacattcactcatgttggggccaccgtgaagatggcgtagctctgagaggcagccattccctcctgccaaaccaggttccggttccacagcttcctgttcagtctgcaacttcccctgacttgaacccaccccaagatccttacagaggaatgccaccaggtctccagggccagagtgtgtcttctggcagctccgagatcaaatctgatgatgagggcgatgagaacctgcaagacacaaaatcttctgaggacaagaaattaggatgacgacaagaaggatatcaaatcaattactagcaataacgatgatgaagacctgaccccagagcagaaggcagaacgtgaaaaggaacggaggatggccaacaatgcccgtgagcgcctgagggtccgagatatcaatgaggctttcaaggagctgggccgcatggtgcagctccacctgaagagcgataaaccacagaccaagctcctgattctccaccaggccgtggctgtcatcctcagcctggagcagcaagtgcgagaaaggaatctgaacccgaaagctgcctgtctgaaaagaagggaggaagagaaagtatcctcagagcctccccctctgtccttggctggcccacaccctgggatgggagatgcagcgaatcacatgggccagatgtgaaagggtccaagttgccaccttgcttcattaaaacaagagaccacttccttaacagctgtattgtcctaaacccacataaacactgctccttaaccccctttttgtaatataagacaagtctgagtagttatgaatcgcagacgcaagaggtttcagcattcccaattatcaaaaagcagaaaaacaaaaaggaaagaaagaaagaaatgtacaggctgagacacagcccagagactgaatggcaatccttccacactgtggagcaaatgcatttgtgcctaaattcttttaggaaaaaaaatataattaatttgtaagtctgaaaaaaatatttaatttaaaaaaaattgtaaacttgcaataatgaaaaagtgtacttctgaagaaaacgacatgaacgtttttgttgtcaagtcagctagtgtttctaattaccggatattgaataggggaagcccggctaccctcataacaaaaccagcaaacgtcctgatggcaacgaaatgatgacattagccattccttagggtaggagggacagatggatgttatagacctatgacaaatatatatataaatatatatataaatatatattaaaaatttagtgactatggtaagcttttgttcatttgtttcagacttttttctcctgtacaaaaatagtactgattaacttttttaaaagaaagattttactgtaaatatggattttttttttggtcttgatttttgttcctttcccccagtttgttatcgtaacctgtagtgccaactctgctaccggaggggcagtgcaggatgaaaggctgaccctgtttgttgcttctcattcataaatagtagaaagttgtttctccagtcttttgggaacacaaggacttaaaaaaaaaaatacacatcatgtgtagaaattacatgcagcattgcccaggcaaggcaaaaagagtttgtctggcttgtggcgctgcccttgcgaccctctcctgggattttcagaggtacacggttagaatgctacaatgttaccactgtgccttccaatgtttatatcatcggaaacataacataatcaaagtaggctgtgatttaacaaaaaaaacgattcaagtgttacctacctgtgtagccgaagtagtgtgcagtgaggcgtttctgaatacatggtcagatttttgaaaaaataaaaaaattaaaaaaaaaaaaaaaaaagaaaaaaaaaaaaaaaaacttaaaaaaaagagtcaagttcaaaaaccgtcaaatgagaaaattgcaagtagtgtgaccgagctgattgattttcttttctttcttttcttttcttttttttttttcaaaaattgggtttactaaaaagtagatgacttacctgcctcctcctttgtgtgaaaaatgccaactaatcatgcagcattataacaagccttataagtcctaaagcattaagttgcactttcatgaggaggggtagaacagtattctctggccagtatgaatgaagtttatacttaacatttgatagaaacatacgtcaaactatggcacagcaactcatcagatagctagcgttgactctgggcacaattgaaccaattcccatcctaaatcttcctaatggttgactttggtgtgtagtgcagtaaacaagtagtgctcctacttaagcatttgtcagcatccttttgtctctaactggttttctatttttacagtccacacaatcttggcatgtattaagaaaaaaaaaaataaccctagttagaagtagttttccacctatcagcactgagtaaatgccataaatccatggaaatggtctaaacgcttcacctgttgtcctgttttaccagttacatagtgatgaaacacatttgtaaattttatgcaaccaatggcaaacctatcattattttgaaactgtgtatgtaaaagttatatttttacatgtagactcttgttattatgtgttttaatacattgtatcaggttttttttttttttttaaactgtgtgtttttttaaaagtcatttaaatgaatagtgagttacaagaatctgaaatatatgttcatttctgaaaatgtaagaacaaataagatagttaccacgtggtcaccttttacaaacccataaacattttgattagctgtgtatgtgtgtgtgtgtgtgtgtgtgtgtgtgtgtgtgtgtgtgtgtgtgtgtgtgtctgtgtgttgaaaactgtaaatatgttcagtagcgataaaactaaatgctctgatttgttgataagttcctaaaatgtggaggtggattgaaaacataggagaatagcagaaatcaaatttcatgaaaagttctttgggggctttcctgtgaaaagcaacaaacaaaggggcttagagaagggcatggaagacaataatgtacacttcccctcctccctaaatgatggaaaccatgtgtacttgttctctcaccatgttaaggatttccttttcgtgatacattctgcactcattttgtatagtctaccaaggcgggtatccctaggaacattattattatataggaagcaggtatactctgatcacattcaggataagtgtatagaagagaatatggtgtttactctttagggaactggaaatactccctgcattgatgtacattttcagaatggcacttttgatacatgttatcgtaaaggtgcttactaaagtggaattaaagtttttcaaatctgtaaacaaaggaaataaagtgatgataagaaaaaaaaaaagtagttctagatcgcgattaattaactttttttttgtttctcgtatatttttatttt

SEQ ID NO: 53 - DNA, 4076 bp, Cricetulus griseus
tggaaatcagagagaagtactattacgccgtttatgatatggtggttcgtggtaactgcttctgttatggccatgccagcgaatgtgctcccgtggatggaattgatgaagcagtggaaggaatggttcatggacactgcatgtgcaggcataacaccaaaggcttaaactgtgagctgtgcatggatttctaccatgatttgccatggagacctgctgaaggtcggaacagcaatgcctgcaaaaaatgcaactgcaatgaacattccagctcatgtcactttgacatggcagttttcctggccactgggaatgtcaggcgggggcgtgtgtgatgactgtcagcacaacaccatacactgtatttctcgtggcggtctcattgctggtcagtggccggtgacaaattgcatgttagaaggagagcgctgcgatgtctgtaaagaaggcttctatggtttaagtgctgaagacccatttggttgtaaatcatgtgcttgcaatcctctgggaacaattcctggtgggaatccttgtgattctgagactgggtactgctactgtaagcgactggtgacaggacagcgctgtgaccaatgtctgccacagcactggggcttaagcaatgatttggatggatgtcgaccttgtgactgtgaccttggaggagccctaaacaatagctgttccgaggattctggccagtgctcctgcctgcctcacatgattggccggcagtgcaatgaggtggaatctggttactacttcaccaccctggaccactacatctacgaagccgaggatgccaatctgggacctggagtcattgtggtggaaagacagtacatccaggaccggattccttcttggacaggacctggcttcgtccgagtgcctgagggggcttatctggagtttttcattgacaacataccatattccatggagtatgacatcctgattcgctacgagccacagctaccggaccactgggagaaagctgtcatcaccatacagcgacccggaaagattccaaccagcagccgttgtggcaacactgttcctgatgatgacaaccaggtggtgtctttgtcaccagggtcaagatatatcgtcctccctcgcccagtgtgctttgagaagggaatgaactacacagtgagattggagctgccccagtacacagcatctggcagtgatgtggagaacccctacacgctcattgactcctgtgacacagtgacaggggagtgtctgagctgtcaggactataccacaggacacaactgtgaaaggtgcctggccggttactacggcgatcccatcattgggtcgggagatcactgccgcccctgcccttgtccagatggtcctaacagtggacgccagttcgccaggagctgttatcaagaccccattactctccagcttgcatgtgtttgtgatcctgggtacattggctccagatgtgatgactgtgccccctggctctttttggcaatccctcagattttggggggtcatgtcagccttgtcagtgtcaccacaacattgatactactgatccagaagcctgcgacaaggagacaggaaggtgcctcaagtgcctgtaccacacagaaggggaccattgccagctctgccagtatggatactatggtgatgctcttcggcaagactgtagaaagtgtgtctgcaattacctgggcactgtgcaagagcactgtaatggctctgactgccactgtgacaaagccactggtcagtgcttgtgtcttcccaatgtgatcgggcagaactgtgatcagtgtgcacccaatacctggcagctggccagtgggaccggctgtgagtcatgcaactgcaatgctgcacattcctttgggccatcctgcaatgagttcaccgggcagtgtcagtgcatgccgggcttcggaggccggacctgcagcgagtgccaagagctcttctggggagaccccgatgtggaatgccgagcctgtgactgtgatcccaggggtattgagacaccacagtgtgaccagtccacgggccagtgtgtctgtgtggagggtgttgagggtccccgctgtgacaagtgcaccagagggtactcgggggtcttccctgactgcacaccctgccaccagtgctttgctctctgggatgtcatcattggtgagctgaccaacaggacccacaaattcctggagaaagccaaagctttgaaaatcagtggtgtgattggtccgtatcgggagaccgtggactctgtggagaagaaagtcaatgagataaaagacatcctggctcagagcccagcagcagaaccactgaaaaacattggcaatctctttgaggaagcagagaaattaaccaaagatgtttcagaaaagatggctcaagtagaaatgagattatctgacacagcttcacagagtaatagcacagctggagagcttgctgcactgcaggcagaagcaaagagcctggaaaagactgtgaaagaactggccgagcagctagaattcatcaaaaactccgatattcagggtgccttggatagtgttaccaagtatttccagatctctcttgaggcagaaaagagggtgaatgcctccaccacggatcccaatagcacagtggagcaatcagctctcacccgagacagagtagaagatttgatgttggagcgagagtcccagttcaaggaagagcaagaggaacaggcacgcctcctggacgagctggccggcaaactgcaaagtctagatctgtcagctgctgctgagatgacctgtggaacacctccaggggctgactgttctgaaagtgaatgtggcggccccaactgcagaactgatgaaggagagaagaagtgtgggggacctggctgtggtggtctggtcaccgtggcccatagcgcctggcagaaagccatggattttgaccgtgatgttctaagtgccctagctgaagtggaacagctctccaagatggtctctgaagcaaaagtgagagcagacgaagctaagcagaacgctcaggatgtcctgttgaaaacaaatgctaccaaagaaaaagtggacaagagcaatgaggacctgaggaacctcatcaagcagatcagagactttctgactgaggatagtgcggatctggacagtattgaagcagttgctaacgaagtactgaaaatggaaatgcctagcactccacagcagttacagaacctgacagaagacatccgggaaagagttgaaaccctttctcaagtagaagttattttgcagcagagtgctgctgacattgccagagctgagctgttgctggaagaagcgaaaagagcaagcaaaagtgcaacagatgttaaagtcactgcagacatggtgaaggaagcattagaagaggctgagaaagcccagattgcagcagaggcagccatcaaacaagctgatgatgatatccagggaacccaaaacctgctaacgtcgattgaatctgaaactgcagcctccgaggaaagcctgagcaacgcctcccagcgcatcagcaagcttgagaggaatgtggaagaactcaaacgtaaagctgcccagaattctggggaggcggaatatattgaaaaagtagtctatagtgtaaaacagagtgcagacgatgttaagaaggctctagatggtgaacttgatgaaaagtataagaaggtagaaagtttaattgcccaaaaaactgaagagtcagcagatgccaggaggaaagctgagttgctacaaaatgaagcaaaaaccctcttggctcaagccaacagcaagcttcagctgttggaagccttagaaaggaaatatgaagacaatcaaaaatacctagaagataaagctcaagaattagtacgactggaaggagaggtccgctcgctccttaaggacataagcgaaaaggttgcagtttacagcacttgcttgtaacccaggaaaagggctgtaaggaggctgcaatgaccaaagtaaacctatttaatgtttttattccacccacttttgtatggagttaaataaaatacattggttttatat

SEQ ID NO: 54 - DNA, 4072 bp, Cricetulus griseus
atcagtcctgccacacagggatcaagttggtgtctcgggcaaagaaaacccccaccacggtggttccccttatctccaccatcgctggggacagcagccgaacttcgttggtttcaaccattgcgggcatcttgtcaacagtcactacatcttcctcgggcaccaaccccagtagcagtgccagcaccacagccatgcctgtgccccaggctgtcaagaaacccagtaagcctgtcaagaagaaccacgcctgtgagatgtgtgggaaggccttccgggatgtgtaccacctcaatcggcacaagctgtctcattcggacgaaaagccctttgagtgtcctatttgtaaccagcgcttcaagaggaaggaccggatgacttaccatgtgaggtctcatgaaggaggcatcaccaaaccctatacttgcagtgtttgtgggaaaggcttctccaggcctgaccacctaagctgtcacgtaaaacatgtgcattcaacagaaagacccttcaaatgccaaacatgcactgctgcctttgccaccaaagacagactacggacacacatggtacgccacgaaggcaaggtgtcatgtaacatctgtggggaagctcttgagtgcagcatacatcaccagccacttaaaaaacatgcatgagtgaagagaccagcaatcagaagcaacagcagcagcagcaacagcagcagcagcagcagcagcaacatgtgacgagctggccagggaagcaggtagagacactgagactatgggaagaagctgtcaaagcaagaaagaaagaagctgccaacctgtgccaaacctccacggctgctacgacacctgtgactctcactactccattcaatataacgtcctctgtgacgtctgggactatgtcaaacccagtcacagtggcagctgcaatgagcatgagaagtccagtaaatgtttcaagtgcagttaatataaccagcccaatgaacatagggcatcctgtaactatcaccagtccattatccatgacctctcctttaaccctgactaccccagtcaacctccccacccctgtaactgccccggtgaatatagcacaccctgtcaccatcacatctccgatgaacctgcccacgcctatgacattagctgctcctctcaatatagcaatgaggcctgtggaaagcatgcctttcttgccccaagctttgcctacatcaccaccttggtaaacagtattataaagtcaaaatactatgaaattgggaggttttattacgttagttagtaagagtgtagtagcattttgcttcaatttggctggggttgttcaaagtagggtatgtgtgtaacttatcactggaccacattagtttaatcagaaaccctgttagctgacagcattgcttaaacaggatagtagctgacaaggtgaaatgccagaattaaaaccaatcataaaacccatttcaaaatgaaaaaagcattatttgtttttattattatttttaatcctacaaaatcattttattgtaaacactagcagagcttttctctctgtacaaggtggatggtttaacctgaagttctaaacccacagactgagagctagtgtagaattgtctgtgttttttgtttgtatgagtaaatagatacattgtcataataaaatgcatttcagagaatatgcattttacctttgggaatatgttaatttcaggcagcattccctatgggaaaggtgataccagctctgatatgcaaagcatatgataatttatcattctaacttcaacatataatagggattgtgacctgatatttggagatgtaaatattgctcagcatattaatcctgatggaatatagcattgtagttgaactttttaaaaaaaaaaaacaaaaacttaaaaaaaaacaaaaaataaattgtgttttgatgagaaaaggctgcaactgacttaggagaagtcaggtctgcgcacaggcaggctccaaacacaggccagtgggtcctggtttgggagcgatgaggactttggaacagtttaaatcttattgtacttttaaattggaagacattggaggcactgggatgtgataggcccctctctctcccaatcagcgcctgttgatgttacaacaggcacagatgtgttagatgctcactagagtttatgtcttatattaaattgtatacagtttttattctaaccactaactaggtaggatgccccttcagaacaagcagagtgtatcttttctccctccttctgtctaatcaagtattgtgcagatttgttcaactttgtaaatattggacatcacttttttttttcctctggaaacaatcaaaacaacttgtatctgctttctggagttttcagggaggcagctatctgcatgcttcatggaaactcagcagtgatgtgcacgttgagacatgtgcttttgtttcttagccggatgctttatccctgtacatacggtagaaaccaaaagctaggaaatcagatcctctttacgccatcatgccacactttgtgtttttaaagcattgtgttaaagaagagttcattcaaaccaagatgctgtattttttttttttacattgcaatgtgttttgagtctttttcatttttaatcttgcagttaagagaaatggaaatgagttttgttagccctgcagaaagcatgcaggactctcaccagatgacttccgtttataccccactgtgtcagtacaaacatcaaaataccttgcatctgaggcagacttcctacatcagggacaggtatctgtgtgtcattatacaaaacagttctagggggatgaactacatagtaaaaaaaattaaaataaatagtacctagtgtaaaataattttataaatgatcttttgtactttaggacattaaattgtacaacttttgtatatataaagcttaggaactttctgtttagcaggaaggcaacacattcctacacttttaatgtatatgtttgttataatgtccatgtaaacatgccctatgtttgtgccttttaattagtttgtctcaataaacaaaatgtagagaaaaatatgtagctatgactttgttacaacagttcttatccacagttgaaaatcggtttgtttttaatctgtagatcattatgtgtgagctactggaagggctcatgtggggaaggcccaggaatggcactgctgagacctgggagggcagtggtcacatgtggaggaaaccctcatttcctggcatgtgctctgtctgctgggccctgtcatctgttctgctggcagttgtgatccttcatggttcagacagcccaggcttcctccacagtggtccaaggagcagtcctcaaagtgggcaggtacaggcccttccctcaggctacagcgtggtcataagatcctgagagtattagttcttacaggaaaaaaaaaggatatatactagaaatgattgttttatcaattcattgtaaacaggagcgagacttcattgtatgacttcagttaaaatgctattttgtatgcatactctattcacttaagaagcttgtctgcaataataaagccacgttgtgtcttcttcagggagggagagagctgctgtgagggtgagggtaggccattgcaaagggggcacaaacaggctgtggtgagatcctcctgtgtcttggaactgaaacagttgtgatgctgatgaactgactcaactatgtgttgaaggcaccgacggccaccactctacaaaaaggcagagtatgttttccctcctggttgtaacctggtggagagcttcccctttatcagatcggcagctaaacagttgtattagataatcctcaaatctgacatccagcctgttatgcttgctctagggctcgctgcttggcctgcatttaccttttactgtgtattcatttccctcctaaggtgtgctcctcaatgaaggtttctatgtacgcagatgatgattttacctgtcaataccagcactgtattactaacatgcaaaatactgcagattttattttgacaaattaaagttaaccaagtcaacaa

SEQ ID NO: 55 - DNA, 4067 bp, Cricetulus griseus
ttcattgctagtgctgggaagaaaactgcagataaagcagtagacttgtccaaggatgatctgctaggtgacattctacaggatctgaatactgacgtatctcaaatagctccaccacctgtgttgataccaaagaaaaaagatccagtggaactttgctcaatcctttctcagtacactctcctaaggcaattcctccaggaaaacctgcttcccctgtcctcaggaaggagcctctgttaactcccattcctattaaacgtgctgaatttgctggagagctgtcccagccagagtgtccagaagatgagcaggagtcagggataatggaatttgaagatggtgactttgatgagcccatggaagctgaggaggtagagtggggagccgtgtgacgtgccagaacttggaccaggagagtgagttatgaagatccatacaaccaaccaggtgtggtttttctgtttggcaaagtatgggttgaatcagcccaaacccatgtgagctgttgtgttatggtgaaaaacattgagcgaacactttacttccttccccgtgaaatgaaaatagacctaaacacagggaaagaaacaacaactcccgttacaatgatggatgtttatgaagaatttgactcaacaattgcagcaaaatataaaataatgaagttcaagtccaagacagtggaaaagaactatgcttttgagattcctgatgttccagaaaatctgagtacttggaagtcagatactcggcagaaatgccaccgcttccacagtttctgtgttgtgtctaaaccaaaggactgtattttcccatgtgctttcaaagaagtcattaagaaaaagaatatgaaggttgaggttgctgcaacagaaagaactttgctaggatttttccttgcaaaggttcacaaaattgaccctgatattcttgtgggtcataatatttgtggttttgaactggaagtgctactgcaaagaattaatgtgtgcaaagttccttactggtccaagataggtcgactgaggcgatccaacatgccgaaacttgggagccggagtggatttggtgaaagaaatgctacctgtggccgaatgatatgtgatgtggaaatttcagcaaaagaattgattcattgtaaaagctaccatttgtctgaacttgttcaacagattctgaaaactgagaggattgtaattccaacagaaaatatacagaatatgtatagtgaatcttctcatctgttgtacctgttggaacaaatctggaaagatgccagattcattttgcagatcatgtgtgagctaaatgttctaccattagcattgcagatcactaacatcgctgggaacattatgtccaggacactgatgggtggacgatcagaaagaaatgagttcttgttgcttcatgcattttatgaaaacaactatattgtgcctgacaagcagattttcagaaaacctcagcaaaaactgggagatgaagatgaggaagttgatggagataccaataaatacaagaaaggacgtaagaaagcagcttatgctggaggcttggttttggaccccaaagttggtttttatgacaagttcattttgctcctggatttcaacagcttatatccttccatcattcaggaatttaacatttgttttacaacagtacaacgagttgctttagaggtgcagaattcaactacagaggatgaggaacaggaacagatccctgagttgccagatccaaacttagatatgggcattttgcccagagagatccggaaattggtagagcggagaaaacaagtcaaacagctcatgaaacaacaagatttaaatccggaccttgttcttcagtatgacatccgacagaaggctttgaagctcacagcaaacagtatgtacggttgcctgggattttcctacagcagattttatgccaaaccactggctgccttggtgacctacaaaggaagggagattctgatgcatacaaaagagatggtacagaagatgaatcttgaagttatttatggagatacagattcaattatgataaatactaatagcaccaatctggacgaagtatttaaattgggaaacaaggtaaaaaatgaagtgaataaattatacaaactgcttgaaatagacattgatggtgttttcaagtctttgctactgctgaagaaaaagaaatatgctgctctggttgttgaaccaacatcagatgggaattacattaccaaacaggagctaaaagggattagatatagttagaagagattggtgtgatcttgccaaggacactggaaactttgtcattggccagattctttcggatcaaagccgggacaccattgtggaaaacattcagaagaggttaatagaaattggagaaaatgtgctaaatggcagcatcccagtgagccagtttgaaattaacaaggcattgacaaaggatccccaggattaccctgataaaaaaagcctacctcatgtacacgttgccctatggataaattctcaaggaggccggaaggtgaaagctggagatacagtgtcctatgtcatctgtcaggatgggtcaaatctcactgcaactcagagggcctatgcacctgagcagctgcagaaacaggacaatttaactatcgacacccaatactacttggcccagcagatccaccctgttgtggctcggatctgtgagccaatagatggaattgatgctgtgctcattgcattgtggctaggacttgactccactcaatttagagttcatcagtatcacaaagatgaagagactgatgctctacttggtggtccagcacagctgactgatgaagagaaatacaaggactgtgaaaaattcaaatgcccttgtcctacttgtggaactgaaaatatttatgataatgtctttgaaggctcgggaattgatttggagcccagcttgtatcgttgcagtaatgttgattgtaaggcttcaccactcacctttatggtacagctgagcaacaaattgaccatggacattagacattgcatcaaaaaatactatgatggctggttgatatgtgaggagccaacatgtcgtagtcgcactcgacgccttccccttcatttctcccgaaatggacctctttgtccagtctgcatgaaagctgtacttagaccagagtattctgacaagtccctgtacacccagctgtgcttttaccggtacatttttgatgtggactgtgcactggagaaacttactgaacatgagaaagataaattgaagaagcagttttttactcccaaagttcttcatgactacaaaaaaatcaagaacatagcagagcacttcttgtcctggagtggctactctgaagtgaacctcagcaagctcttcgccagttatgctgggaaatactgagagacccaggaacaagcacggagaccagcctctgaatctcagcttcagagtgcctccacttgccttacctgctttgccagtagcttgcttttcttttgaggagttcttttgaagattgcatgttgtgttcatgtagatgtggaccaggatgggagtgtaaaaatatttaacctgccaaacagtcttcagagcacaatgtgccaccagatcctttgccaagtacctgaagacctataagtgaccttcagtttgccctgaggctgtagaagagacacccctaagaagagttttgtggagtctagtgggagttctaacattttgctttttcatgcatcaattaaacacagtttatatccaaatacttgttcagctactcgttccaaacatggctgttttcagtgctgtctttcacattcgagggggaggggtggtgtttagaaatttttcacttactgaataaatagatttcacacagcaagtttgtttattgaattgttcaaagtccaacactgaacaggtgtctcatactcacattccttacgttttccctttacatagaatgttcagagtggagatttatacaacaggaaagcacattttacatactttgacctaacatttcacaaaaatcatggtgagattgt

SEQ ID NO: 56 - DNA, 4066 bp, Cricetulus griseus
gtgggatctgcagtacaggaattacgagcaactgttcaattacatgaactctcaaccccatcttaaagtgaagatccagtttggaactttgtctgattattttgatgcgttggaaaaagcagccgcagcggagaagaagagccgccactccctgttccctgtcctgagtggagacttcttcacttacgctgaccgagacgatcactattggagtgggtactttacgtccaggccattctacaaacggatggatagaatcatggaatcgcgcttgagggctgctgaaattcttttactattttggccttgaagcaagctcagaaatacaagataagtaagtttctctcatcaccgcactacacaacactgacagaggccagaaggaacttaggactctttcaacatcacgatgccattacagggaccgtcgaaagactgggtggttgtggattacggtaccagactctttcaatcgttaaactttttggagaagataattggagactctgcatttcttctcattttaaaggacaagaagttgtaccaatctcagctttctgacaccttcttagagatggatatgaagcaaagttcacaagattctctgccaaaaaaaaccataatacaactgagtgcaaaggagccgaggtacctcgtggtctacaatccttttgagcaggagcgggaggcagtggtgtccatcttcgcaaactcagctgcagtgcaggtgctgtcggactcaggaaagcccgtggacgttcaaatcggggcagtctggagtgatccaagaacgatttcacaagcagcctacgaggtttctttctagctcacgtgccaccactggggatgaaagtgtataagatcttagaatcacagagtgcaagttcacacaaggctgattacttcctgtacaatgacggagtagacagaaaatgggatattccagatagaagaacatggttgatgcaggggatgccataaccatagagaaccccttcctggcactctggtttgaccgctctgggcttatggagaaagtgagaacgaaagaagacggtaaacttcacgaaataaaggtgcagtttctatggtatggaaccacaaataagagagacaaaagtggtgcctatctcttcttgcctgatgggcagggccagccatatgtctccttacgcccgccctttgtccgagtggctcgtgggagggtctattctgaagtgacttgcttctttgaacacgtgtcgcataaagtccgactctacaacgtgccagggatagaaggacagtcaatggaagtttctaatattgtggacattcggaatgtgcataaccgtgagattgcaatgagaatttcgtctaaaataaatacccaaaacagattttatactgacctaaatggattccagattcaacctagaaggacaatgagcaaattgcctcttcaagccaatgtttacccgatgagcacgatgtcgtacatccaggatgcagagcaccggctcacactgctcgcagctcagtccttaggcacagccagcttggcttctggtcaaattgaagtcttcatggatcgaagactcatgcaagatgataaccgtggccttgggcaaggtgtgcacgataataagattacagctaatttgtttcgaatcctgctggagaagagaagtggtgtgaacatggaagaagagcagaagagtccagtcagttacccttccctcctcagccacttgacttcgtccttcctcaaccatccattccttcccatgatactgaatgtcaagctctcctcacccgctgtcgagctgctgaatgagctgtctctgctccagtcatctttaccctgtgacatccatctggttaatctgcgcacaatgcagtcaaagatgggtaaaggctactcagatgaggcagccttgatcctccacaggaaagggtttgattgccagttctccagtagaggcatgggtctttcctgctcaactactcagggaaagatgtcagtaccaaaacttttcaacaagtttgctgtggagagcctcaccccttcctcactgtccttgatgcactcacccccagatgcccagaatctaagcgaagtcaccctgagtcccatggagatcagcacattccgcatccgcttaaggtgaaactgactgtcagatttgagtggagaaactctgacttccttactttccttggtttttacgtgcaataactaagtacattactttagcttctggctactgtgagaacgtgacttctgtgatttatttttttttttaaaaccagtctagtaaaaaaaaaagaagaaaaagccatgctttccaaaacggtttctttttctaagtttgtcccacaaagaaccactatcagtgtgaactgatggaataaaaatgaagaagtattgaacgacagccctcaacagactgtatctcaggttaaatgctaactaattatgtttgcattgagggctgtaaagagattcttaaaaaattcaatttttctgatcattaagtttataattatttaaaaaaaataacccctttaacctaaatagaaagaaaaaatcattactacaaatttcaattttttgtgcgtgtttcaaatatgtggaaaagtgcaatccctcaacccctatgataagtgtagttgattttcatattctttcccaatgaacctcttgactaccctttcctacccatatgtttaaaataataactgatttttatagtcattcaacagtagaaaaagaggcatattttcattacttgacaatgtgagataggtgcaatttattccattgtcactgaaacagaagaagcaattccattttaggtaccacaaggtgtctttttacacagctcatttgaatacaggtgttccaaggtggggttttctatttttaaattaccatatcaaaaataaatgtgccttatttttttataagtcttgttaaatcttttggtgtccatgttactgtttgggaaggggaggggtgttgggaggctgtggcaggggttgggtactttctatgacacataaattatgtaatttttgcttgataatgctggccacgttctgatctgtttcattaaatttgtggtggtgttactctaaacattttgactatttgaatgtactgagatgtcagaaaacaaaacaaggaaaaaatattgttaattaaaatatgctgctgccaaggaaactgcaacttgaagcaaggattttgtaacacacgagatccaaatactgtttgcatttcacagtagttaaccatattaaagagagaatgctttaaaacagactgttttgaaatccatttgtgtagctcatcttgatgtctcttactaaagatatgttccaaacgttttcgtgtggtgaacttagagtgttattctagcccatgtaccatcacaggacttttaagttaatttcagatcatttgtttctttaatataataatagtatttaatgtctgcctagaaattgaattctctggctatgtacttttgaaaaaaaattctactttcagtgtcgtaacctggtttagtattatctgactttaaacttcctatttacctcttgtgttgttgccgccagctgtttactcacaggtgaagcagaaactctatttaaccagcaagtttctgctttttaaagttactttcagactacaacatcagggaaatcaagagaggggtttttttgctttgggttatggtcaagaactctccccacgtgctgaaattctaattttgtttattaggtgcattgttcaaatatcagcagtctccttttctaaaaaatgtcaacagtgcacagtaaaatgctgtaagatgttataattgtggaattctcttcctgtgtctttgtacttgtgctgaaatgtcttcacaggcctttgtcaagaagaaaatgtctgctttcattctgattattttgctcattgaaatcaacaggttttgattatttttctcttggaagatttttataactttttgggaattatgtaatataagatctctaataaaatataatcttatcctgaaaaaaaaaaaaaaaa

SEQ ID NO: 57 - DNA, 4063 bp, Cricetulus griseus
gacaccataaggattacatgggcggacaactccctgcccaaacaccagaagattacggattcccgatactatacagtccggtggaagaccaacatcccagcaaacaccaagtacaagaatgcaaatgcaacaactttaagctatttggtcactggtttaaaaccaaatacgctatatgaattctctgtgatggtgaccaaaggtagaaggtcaagcacatggagtatgacagctcatggggctacctttgaattagttcctacttctccacctaaggatgtgacagttgtgagtaaagaaggaaaaccaaggaccataatagtgaactggcagcctccgtctgaagctaacggcaagattacaggttacatcatctattacagcacagacgtgaatgcagagatacatgactgggtcattgaacctgttgtgggaaacagactgactcaccagatccaagagttaacacttgatacaccatactacttcaaaatccaggccaggaactcaaaaggcatgggacccatgtctgaagctgtgcagttcagaacacctaaagccttaggatcagcaggaaaaggaagccgattgccagacctaggatctgactacaaacctccaatgagtggcagcaacagccctcatgggagccccacctctcctctagacagcaatatgcttttggtcatcattgtctctgttggtgtcatcaccattgtggtggttgtgatcatcgctgtcttttgtacccggcgtaccacctctcaccagaagaagaaacgagctgcctgcaaatcagtgaatggctcccataagtataagggcaattgcaaagatgtgaagcccccagacctatggatccatcatgagagactggagttgaagcctattgacaagtctccagatccaaaccctgtcatgactgatactccaatccctcgaaactctcaagatatcacaccagtggacaattccatggatagcaatatccatcaaaggcggaattcatacagagggcatgagtcagaggacagcatgtctacactggctggaaggaggggaatgagaccaaaaatgatgatgccttttgactctcagccacctcagcctgtgattagtgcccatcccatccattccctcgataaccctcaccatcatttccactccagcagcctcgcttctccagcccgcagtcatctctaccacccaagcagcccatggcccattggcacatccatgtccctttcagacagggccaattccacagaatctgttcggaacacccccagcacagacaccatgccagcctcctcatctcagacatgctgcactgatcatcaggacgctgaaggtgctaccagctcctcttacttggccagctcccaagaggaagactcaggccagagccttcccacagcccacgttcgcccttcccacccattgaagagctttgctgtgccagcaatcccacccccgggacctcctatctatgaccctgcactgccaagcacaccattgctgtcccagcaagctctgaatcatcacattcactcagtaaaaacagcctccatcgggactttaggaaggagccggcctcctatgccagtggttgttcccagtgcccctgaagtacaggagaccaccaggatgctggaagactctgagagtagctatgaaccagatgagctgaccaaagagatggcccatctggaaggactaatgaaggacctaaatgccatcacaacagcttgatgaccttcacatgggcatgactccacacctgagtctagaagtcttggaacttaaccttgaaaacaaggaattgtacagagtacgagaggacagcacttgagaacaggagccagcagaccagccagtgcctccacatggggctggctccaggcacagccacctgccttctcctggtcagcctggatgacactttcattgaggcagcttccctttgcctgctgatagtctgcaggactgggcaccatgggccaaaattttgtgtccagggaagaggcaagaagtgcaaactgcctttcactttgtggtcagtggctgtgtcttcgtgctgcagctacatcacatttatggagtgtagacattggcatttatgtacaattttgtgtcctattttattttaccttaaagaaaacactattggaagctgaggaagtccgtgatgttctccgcaagcagttgacatttgactgctggttccacttacttatggaaagtcattgatagtgcagttgtttgacaccattgatgggttggcttgtttggggttttgtttttgtttttaattctgagtaccttgcatcctctgccagctgttaatccatcactttgggggggaggacgatattgcattgctgtttgtaagcttttttattatttttttattgtaattattaaaggcctgactttctcctctcatcactgtgagattacaaatctatttgaatgaaatgtaacattgaaaagacttgtttgttttctgtgcagattcagtattggggtggggttggggattgggactaggaaatagaggggctgctgaggtcctgtgaatgtttctgtcattgtactttgttccaaaagcctgcagagaatgggagcagcatctttagtgtcctttcctggcatgtctatcttagtgtcactgcatagcaactggagttttgtttggatctggttataaatccctgtacgataggtggttttggtgatttagctgccctggtgtattggtcatgtcctttttggagtgtccacactgaggcccccagtgatatttttaatttcttaagtgatgccaagtagaaccagagcctgactctgccctgagaattcagaaagtgcagggtggagacccatttgtgctgctgtcgtaagttctctttggaaggtgaggagctaaggaaggaacttggttttctattccaaatagaactcctgcttctgtggtgccagtcctcaggcaggcagctctcattcctcattgcagaggcttctgaaaagcttcaatcaggatgaggcaggatggtgtggtgcccgtaaggcttccccacacgcttctgaacataattctgcaaggagcggaggacagagatagtagagagagggtcagtggccttccccatcccagcagctcagccaaaccctatttagaatgaggcagtgggagattacaggtgtgctgaggactcagccacacacagaagcctttgctgttaatatataatgaaaagtgtaagactaaccctcaggcatcatcttccccaacaaatccctggaagacagtatagaaagtaaattgggcttgggttttatagccagtgagattacgcagaccaccagtaaataccctagcctacccacccttgaacatgggttattttacccttttgcaatgatctaactcctgctgcttttctagttggtcaccggatggcaccaggaagggttcttggacaaccattgtgctttggctgtcctacaaaaagcagtcagagcattctggccacctggaggctagattcctcagaaactgtctagcctttgcccacagaacatgttagatgtttagggcattccttcccatgaaccccaatacttgttacctcagggccttggtacctggatactgccacagaattgctatgggtgggggagggacatatttttaaaaaaaaaaagtaacttaaaaattggggaattttttaaattcagaaaatgcaaagctattctgtattacaccatttcacaatttaatacatgtcttatattttcctgtgtttctggaaactaaaccattttgtgtcgttgtgtcctagttgagccatggcccagcagcttccttcaggagggtgtggaacacatgtgtctgttgccttgctacctgctcaaggggcctgaaggactgctgggactgggttctgtacacacttgtttggccttttctgtagttgatgctgtaaaactctatggtctttttaaaaacagtttcattgtttttatttagtattggaaatccaatacacttttttaatcc

SEQ ID NO: 58 - DNA, 4061 bp, Cricetulus griseus
aatccttctgcggaaaaagccagaactgtgctcgctgtggaagctgcccctggagagctggtgggagaccgagctgctcgccagccagccccaaggcatccgaattccattaacttttactctctgaagcagtggggtaatgagctcaaaaattcaatgtcatccttccgtcctgggagagggcacagtgagagtcgcaggactgtgttttacaccaatgaagagtgggaacttttagacccacctcctaaggacctagaggagtccctgatacaggaaagaaaggaaaaagcagatgcctgaggggagcaaaggactaagcccgtctctgagatgcagctgcagattcaaagccagcaggaagaactggagcaactcaagaaggacctgtccagtcagaaggagctcattcggctgctccagcagacagtccggtcttctcaatatgacaagtattttacgagccaccaaatcagccaggggtcccagggacacactggagcttctccaccagaaggacgagcagatcctgggcctgagtggccagctggagaggttcggcctggagaaggagagtctgcagcaggaagtgaggacgctgaagagcaaggtgggcgagctcaacgagcggctggggatgctgatggagaccatccaggccaaggacgaggtcatcatcaagctcagcgagtgtgagggcagcgtgtcttcgcccaccttggggccaagctctcctttggccacaccagccagcagagaccagctggagctggacaggctaaaagatagtctacaagggtacaaaacccaaaataaatttctaaataaggaaattttggaactctctgctctacgaagaaatgcagaaaggagagagagggatctgatggcaaagtattctagtctggaagccaagctctgccaggtagaaagtaagtacttgatactgcttcaagaaatgaagacaccagtttgctcagaagaacaggggcctaccagggatgtcatagcccagttgctggaggatgctctgcaggttgagagccaagagcagccggagcaggcattcattaagcctcatctggtcagtgagtttgacatctacgggtttaggactgtccctgatgacgatgaggaagagaaattggtggccaaagtccgagcattggacctgaagactctgtacctcacagaaaaccaagaagtttccactggggtcaagtgggaaaactattttgcaagcacaatgaacagggagatggtatgctctccggagctcaagaacctgatccgagcaggcattccgcacgagcaccgctccaaagtgtggaagtggtgtgtcgaccgtcacaccaggaagttcaaggacagcatggagcctggctacttccagagcttgctccagaaggcactggagaaacagaatcctgcctctaagcagattgagctggacctgttgcggactctgcccaacaacaaacattactccagccccacatcagaaggcatccagaagctgcgcaatgtcctgctagccttctcctggcgaaatccagatattggctactgccaaggcctcaacaggttggtggcagtggccctcctttacctggaacaggaagatgctttctggtgtctcgtcagcatcgtggaagtcttcatgcctcgagactattacacaaagactctgctggggtcccaggtggaccagcgggtgttcagagacctcatgagtgagaagctgcctcgattgcacacccattttgagcagtacaaagtggactataccctcatcaccttcaactggtttctggtggtatttgtggacagtgttgtcagtgacatccttttcaaaatatgggactctttcctttatgagggaccaaaggttattttccgttttgccctggcactttttaaatacaaggaagaggagatcctgaaactgcaagatgccatgtccatcttcaagtatctccgttacttcactcgaactatccttgatgccaggaagctgatcagcatctccttcggggatctgaaccccttccccctgcgccagattcggaaccggcgagcctaccacttagagaaggtccggctggagctgacagagctggaggccatccgagaggatttcctgcgtgagcgggacactagccctgacaaaggcgagctggttagcgatgaggaggaagacacttgaatgaacccccaccctaggatgctgctcttcatgcctttacaaccaaaagtagcaaagaggactccaggcatgcctctgctcattcagctgccagaatgtaacaactgtggcctctgggtatctgctgggcagatgacccaaactaagctgcactttcccatctcccatttggggctggctgcaggtgtcacatgcatcacagtcatgctgcctgattggtgcctcgccagttgactgtttccaagggcctgtttacagcgtctgcccattgtgtgagtgtttgaccctgcaaatctactatactccacgtctccccatgctttttctattcaaggacagcactatggaggaatggactctggggacttggaacacttccttcttgaagcccggagagggtttgaacaagggaggttatttttgctcaatcctaagcgtccctgatgggtggttgtcatgagaaaacattgtctaacagtattatcagaacacaagggaagcagccttaaatggactatcttacactacctggaaaaaatcggaaacaatccttagctagtgtaaacacagtcagactaagaattggagcaaggcagttgtgagagatctttttccatgaccggtcttcctgtttttgctgtccactttctagcacttgaatggctgagttggtttttcagcatctagactgtgctcaacttctctgaaagttgcttcacttattaccatgtaaaaggagctggtctctatatttagcctttgtctcatttcaggtatggaaaatgtcatcattgtgtctttaggatggtggtttgaggcccagcttcttcaaggcccacggtctgaactggaccgtggtctcactgctgttctcggggcctccctgataccaaatgctagaagaattcccaccccctgtgaaatgatggctgtcagccttggggacagctgctaaggaggtgcagcaggatggggttggagccccatggctcagttgcccagagctgagaaggcatggctgccctccttccagtgtggggacagaatgacacaggctcctcccagtggcagaactcgagtgatttgagccatcaccttccattccctcatcactgagacctgtctttgccctcccatgcccctgaggttccagacttaagaccggccaccgtggcaggtaccgctaacgtcagggactgcctcatgctgctgttcatttgaacgtttacccagcatgcaacaaagcatagccctccagtgtgtgggtccaaatgcaccccatctggtggaacttaaccaatatttcaattgttaatacctttatattttcactacattttatatttttatagactattttattaaggtttttctagaatctgtacaacttttatataacaagttctattttgtgtgcacagctcccttgtatgtatttatatcaacctgagcctcccaagttacagttccctcctgctccaccttcaccccttagccttgaccatcactcactcctgctcacccagggagcctctagtgctacttctagccatgctgacaactgaacagtagctcggttgctgtttacttctctgatgttagccatgttatgttgatacaggaagtgctccaggcaggacccagctagatttggttatctgtgtcactgcacgcgcccctctcactctgcacagtgccgtcttcctaatccaccccctctgggtgggtctgttcagggaagtccttgaagatagaggctggatgctagcccagtgtatgaggttcttctcctgtgggcaactggaggacatgagggcacactaccaagtgactgtcctttgtatcacaacagctt

SEQ ID NO: 59 - DNA, 4046 bp, Cricetulus griseus
  modified_base (1618)..(1618): a, c, t, g, unknown or other
caataggcatgcctctgccaagccaaactccaggacattcacttacgccaccgccatcactttcatcacatggatcctcatccagtttgcatttaggaggactgacaaatggtagtggtcggtatatctctgcagcacctggagcagaagcaaaataccgaagtgcatcgagcacttccagtctgtttagctccagtagccagctctttcctccttctcggctccgctataatagatcagatatcatgccctccggccgcagtcggttattggaagatttcaggaacaaccgcttccccaaccttcagctcagagacctgatgggacatatagtcgagttttctcaagaccagcatggctccagatttatacagcaaaagctagagagagctactccagctgagcgacagatggtatttagtgaaattctacaggcagcctatcagttaatgacagatgtttttggaaactatgttatacagaagttttttgagtttggaagtttggatcagaaattagccctggctacccgtattcgtggacatgttctcccattagccttgcagatgtatggctgccgtgtcattcagaaagcattagagtctatttcttctgatcagcagagtgaaatggtaaaggagctagatggtcatgtactcaaatgtgtgaaagatcaaaatggaaaccatgttgtacagaaatgcatcgaatgtgttcagccacagtcactacagttcatcattgatgctttcaaaggacaagtgtttgtgctatcaacccatccttatggctgcagagtcattcagcgtatcctagagcactgcactgcagagcagaccttacccatcctggaagagcttcaccaacacacagaacagttggtacaggatcagtatggcaattatgttattcagcatgtactggaacatggtcgacctgaagacaagagcaaaattgtttctgaaatcagaggaaaggtgttagccctgagtcaacataaatttgccagcaatgtagtagagaagtgtgttactcatgcctcccgtgctgagagagctttactgattgatgaggtgtgctgtcagaatgatggtcctcacagtgccttatacaccatgatgaaggatcagtatgccaattatgtggttcagaagatgattgatatggctgagcctgctcagagaaagataatcatgcataagattcgacctcacattactactcttcgaaaatatacatatgggaagcatatactggccaagttggaaaaatattatttgaaaaacagcccagatctagggcctatcggaggaccaccaaatggaatgctctaagggaaaggagaagattcaaccatgtttaaagaatgggttttctttgtgaattatcaaaacacaattcaactatgaatctttgatatttttttaaagtcaaaactatttattgactttcttcatccatttgtaaatttttaaggttcttgtgtatatttagggggtgggggtggtgaattataaattatattcaaccctgagtggagacctatcagattggatttctggtgaagcacagaatgcctgtatatgatgtaactgtatcccctccccccaaaaaaaanaaaaccaaaaaaaggaaaaaatgttagtcacatactggcttgcagtctggtaggtctacaaccccatagcacaacaggtttatatagatgtacatagaattatagttcttattttttcctttatgtgaagccttttataacagattaacaatcaactgcataaaatattattaatattttaaaaagaaagttaagttgtattttggtaattcacaaactatcatgcaaagaaaaactcagaaaaagacaagaataaaatgatttgagataacattatttacagtggatgtggttttaataaaaattactgccctataatgtccctggcaatgtacagaagaattgtatatacttattgtaatgagttaggaaaaaaatcatggaggcacttccattcagttaaaattgcactgaatgaaaagttaaatttcacactaacttttcagtttggtttgcaacaagaacggatggagatttgtattttgttctaattatagaattaaagactgttgaggaagtgtcggtttattctgcgttttcatagtagatacataagtaggaacctgatagaggtgagagaggccactgaaaagtgaactgatagttcagcatttagcatgattgcatattcagagagttctttttttccttcctataaataaacacattgtgtgtgtaggggtaggtgtaagtttacaatttgaaagcagatcttgtttcagtgttttttgaaagccttgctaatttcgtagtaactttccttggttgtacaggtgtacatttgtaaaccttcatgctgtaaatggaatctgttttatctctttgggaaacatttgcattttagtgtacatttacatccctgcccactttaacctggcaatatagtgttgtataatgtaaattaatttctccaaattgagagtgatttttaaaaattttttatctttatatggtttcagaagtatgaaccagctttccttttattattgtgggaaaccttttgttttataacatagttgttgactctgttgataatggacatgctaggatctggatcactttcaactgaagtcagggtattgtgcatagtaaatagaaagtattggactgagatttgattaccacagatgccaatgcttcttccatctttaaatgtgatgtgacttttttctttgtacagaagagtactgtatttttgaatagcctactcccaagtaagagcaaatctgtatgataacattttttcctctggacataagacattataacaataacatgatgtacatttacaagcggccttatgtacatttcccaacaatctttttaaggcaaaattgtgaccatatgtgtataattaaaatcgtttttaatcctttgcctatgaaaatattttggaaaaattgctttgtatattcagtttctgaaagataaagaaagtgctttgtattttgttgaagtcagtattttgtataaacatttatgttgacccacttacgttcagtgctgaacactgaaatgacatgatgaattgtagaagggattttttactagaggtctgcagaacaaaagcaatcagagcacaatattgagtataaagttctatccttttgttactcatatcatgaaccttaaaatttggcatgaagtttggggtgtcaggagtctttcacgttgatgttgagttactctagctttctaacccaacattccttggtgaggccattaaatccagccacttgtcaccattctcagtcacactgattcatcagcatgtccctgtcacagtagcagcattttgtcccctgtagagtggcactcttcctcctttttccactttgttttgccagcctcagagtgtcttgttcctgggttgaatgtaacttccctgcatcggcccatggtttcagggtcaaaggcagcccttcctggttccttttcaccctttcttttggatgttcaggcagctgtcactcggttcagaaagtggcaagttctagagaaagttacttggaactgaatcctcctctagcagtcctgattcatacttcccagtgctgacaacccagtcttcctgatacttttaggcatattctagaaaaatacctgttcgtgtagaaattttatgatctgccagttttggtgcccaccctgattccatcttctagtatgttggcatggaactttaggaaaatcaatatttcagaatttaaaaaaatctgattgggcagaaaccgcttaggctttactcttgagtgtctccttttgatgtagattgtttctggaccagtttgtctaagtcctggctcttattggttcatatgaaatgttatcttcacttctttgtatattatgtataaattagaaaatgaaacgtgtgaataacattgtatgaaataaacctggtcttgtgtttttctactaaaaaaaa

SEQ ID NO: 60 - DNA, 4019 bp, Cricetulus griseus
  modified_base (2151)..(2151): a, c, t, g, unknown or other
caagttcttctggatcagaactctcaaactcctcctccaagccctttctcagtacaagcttttaataaaggggcaacctgcggtgcccaaggatttgattatggcctcggaaacaataaaggtgatcaactgagtgccatattgaattccattcagtcacggcccaatctcccacgctccttccatctttgatgaagctgcaaaacctccctcttccctagtccacagcccatttgtgttcggacagcccctttccttccagcagcctcagctccagagtgatagaggaactgtctcaacatcttcaagaccagtctctacatcaggaaaatcagagctgtcctctaaacacagcagatcgattaaccctgatgggcgcgtgagccgggccgctgctgaccagaagaagccaaagggcacagaaggtttatctgctagtgaatccctcatgttaaaatcggatgctgcaaagttgaggtcagattcccacagtaggtcactgtcccctaaccacaacaccttgcagacactgaagtctgatgggagggtgtcttctagcttcagatctgaactccccaggaccagggtctaggtcatcatctcctaagccaaagactctcccaactaataggtctagcccgtgtggtgctggttctccacgctcctcttcaccgcaggataaaaatctacctcagaaaagcacagctcctgctaaggcaaaacttgatcctcctcgggaacgttccaagtcagactcatacacacttgatccagataccctccggaagaagaaaatgcccctcacagaaccattaagggggcgatccacatcaccaaaaccaaaaccaggaccaaaggatcctaaaagactcccctggatctgaaaacagagccccctctccccatgtggtacaggaaaacctccacagtgaggtcgttgaagtctgtacttcaagtactttaaaaacaaatggtgtctccgacagcacttgtgatgacaacagtgaattgaagagtgtggatgaaggttcaaataaagtgcacttcagcataggaaaagcacccctgaaagaggagcaggacatgagagcatcacccaaaataagccggaaatgtgctaatagacacaccaggcccaaaaaagaaaaatccaactttcttttcaaaggagatggagccaaacctctagagccagccaagcaagccatgtctccatctgtggctgagtgtgccagggccgtcttcgcctcttttctgtggcacgaaggcatagtacacgatgcaatggcttgctcttccttcctgaaatttaatcctgaactttccaaagaacatgctcctataagaagcagtttgaacagccaaccacccacagaggaaaaggaaataaagttaaaaatagacattcattggaaatatcatctgcgctcaatatgtttaacattgcacctcatggaccagatatatctaagatgggtagtatcaacaaaaataaagtcttgtctatgcttaaggaaccacctctacatgaaaaatgtgaggatggaaaatccgaagccacttttgaaatgtccgtgcatcatacaatgaagtctaagtctccgacttacccttaacattacaacacttagtggctttctgggaagatatctctttggctacaatcaaagctgcttcccagaatatgatttttccaagtccaggttcctgtgcagtaacttaaaaagaaagagtgtgagaaagagaataagaaaacaaaaaaaaaaaaagcgaggtgaaagtcattggtggatgaaaggatcaactcctacgcagatctccgagatcatcatcaagctcattaaggatatggctgcaggtcacctgtcagaagcttggtctcgagtgacaaaaaatgctattgcagagaccatcattgccttgactaagatggaagaagaatttaggtctccagtgaggtgtattgcaacaactagactctggcttgctctagcatcactgtgcgttcttgatcaggaccacgtggaatcgcctctcatcaggaaggtggatggggaaaaatggacaacgagaaacaaatgcctatgtgtgacaaccatgatgatggggaaactgcagctatcatcttatgcaacacctgtgggaatttangtaccgatgtgacagatttccttcatctgcaccgagaaccaaactcatggtagaacaaaactgttttggttgatggcgttagcagattctaaaacaatgaaggcaatggtggaattccgagaacacacaggcaaacccaccacaagtagttcagaagcatgccgcttctgtgggtccaggagtggaacggagttatctgctgtgggcagttgttttgttctgacgcagactgccaggaatatgccaagatagcctgtagtaagacccacccgtgtggacacccatgtggaggtgttaaaaacgaagagcactgcttgccctgtctgcatggctgtgataaaaatgctaccacactgaagcaagacgccgacgacatgtgcatggtctgcttcactgaagccctctccgcagcaccggccattcagctggactgcagtcatgtattccacttacagtgctgtcggcgagttttggaaaacagatggcttggtccaaggataacatttggattcatatcatgtcccatttgcaagaacaaaattaatcatatagtattaaaagacctgcttgatccaataaaagaactctatgaagatgttagaagaaaagccttgatgagattggaatatgaaggtctacataaaagcgaagccatcacaactcctggtgtcaggttttataatgatccagctggctatgccatgaatagatatgcatattatgtttgctacaaatgcagaaaggcgtattttggtggtgaagctcgctgtgatgccgaagccggacaaggagatgattacgaccccagagagctcatctgtggtgcctgttctgatgtgtctagggctcagatgtgtcccaaacatggaacagactttttggaatacaagtgtcgctactgctgttcagtggctgtcttcttctgttttggaacaacacatttctgcaatgcatgtcatgatgattttcaaagaatgactagcattcctaaagaagaactcccacactgtcctgcaggtcccaaaggcaaacagctagaaggaactgaatgtcccctccacgttgttcatccacccactggggaagagttcgctctggggtgtggagtgtgcagaaatgctcacactttttagaacattcagatcctttgtctacagagagaacagttgccttcatctgggaggatgcagtgaagtttaaactctgctcaggataagaacgggaccattttacatccgtgaaaatgaaccattcacagtgcaagaatgatgccaaatacattgtacataattcttgctgcggaacgtttgcctaatattttggtttatcttcttttgaaccaagatatctaacttgtgaggtgtttgcatgtggccattactgttattggcctgtgaagcattggacatttatagataattgatataaaaggatcaccatactcatgaactaagaatgatgctggctttcaagcaaaaaagaaaaataatcactgtttattgtatactgcctttttgtaatcctgtacaattgcatcacgggtggggataaaaagaggaatattctggtttatttcctagactgttatttaaaaaaaattgtgttagtaaggcctataaatgtaataagtatcacactgtatataaagctatcaatgtttgtcctgtataagaattactaaattacaaaagcagtttcatttaaacttctaggttaagtttgagcctgaaattttaatgaagtgcaatactgagtgtgcctcactatcttgcagctgtaagcatattggaatgtacatgtcaataaatccactgtgcatttttatacagtgagaaagtactaaaaaaaaaaaaaaaaaaaaaaaaaaa

SEQ ID NO: 61 - DNA, 4015 bp, Cricetulus griseus
cgcttgcagtcagtccgctgtttgcaaaatattgcgtgggctcggcgcgctgcgggctgcgggagggtccggacccggcgtccgattgcagcgccatccagtttgcatgaaactttcacctgcgctcccggggacagtttctgctccgactcctgatcgctctcctccctgttttcccgacagcgaggactgtcttttccaacccgacatggatgtgctcccaatgtgtagcatcttccaggaactacagattgttcacgaaacgggctacttctcggctctgccgtccctggaggaatattggcaacagacctgcctggagttggaacgctatcttcagagtgagccctgctacgtgtcagcctctgagataaaatttgacagccaggaagatctgtggaccaaaatcattctagctcgagagaagaaggaggaatcagaactgaagatttcttctagtcccccagaagactctctgatcagccccagctttaattataacttagagaccaacagcctaaactctgatgtcagcagcgagtcttcagacagttctgaggaactttcacccacgaccaaatttacctctgatcccattggtgaagtcttagtcagttcaggaaatctgagctcctccgtcatttccacacctccttcttctccagaagtgaacagggaatcttctcaactatggggctgtgggccaggagacctaccctcaccagggaaggttcgaagtggaacttctgggaagtctggtgacaagggtagtggcgatgcctccccagatggcaggaggagggtacatcgatgccacttcaacggctgcaggaaagtttacactaaaagctcccacttgaaagcacatcaacgtactcacacaggagaaaagccttacagatgctcatgggaaggttgtgagtggcgttttgcaagaagtgatgaattaaccagacacttccggaagcataccggtgccaagccttttaaatgctctcactgtgacaggtgtttctccaggtctgaccacctggccctgcacatgaagaggcacctttgaaggagcagagggctgaatcctgtaggctaaaagaggcttccaggctgagaggcggccatggaaggagggatgcctgtaccagccaaagcatgccattttgcttcctacccagttacctccaggggcctctctttggaaggtcttttgagggctacaaaagtcatgtcagaagcggcatagcacccacggtgcatggtgtttgggtgaccctggactcgcctcgccactggttcctaaccttctgagaggctcccagagccttttgccgtgagcatgcgcactgagaatgttaatgggtgggatgactgtatgttgaggatctattaccgactgtatgaggcagcactttttttttttcccccttgtggtagcaaataactgcaagagacagaaaaaaaaaaagcagtttgaatgttttgtgtgtgaggagtattccaagggatgagttgacaaccaatcatttcctgaagggtgtctgcaccttagaaaaaaataaaaaataaaaacaacaaaaaaattaataaaagttaaaaaaataaaaaaaaaaaaaagaaaaacttggagggtgggagtgggaactcaggaccccatagtggtgagtgttaagggcaaggggagtacctgtccccctttcctgtgtgaaagggccttctggtgtctggtgcagctatagaatgtgcagtgtgtcaagtagcttgttttactggctacacagagctcatttgtaacccattgtataagctgtatttacaaataacagtggtcattttcccttataatacaaaaaagtcgtgcatggtctgggggagctataaacttttccatttttcaatcgggtctccaatcttgattccaattaataagcagctataggattcagtttgtttaaaacaatgattccttaagccatttaggcctggcaagacacgcccccagatccgtctgttttgtgacactccccgtgcaacatgctattgtgcagtgtagggtgtatttttaatgactcagaatttgaacttactttttggagaatcttaaggtgccctttgaagaaattggacgcgtgtcaaatgtctaaatgcttgggcctggaaattactggtctaatgccacattaggctaagaacataaactgttttttctcagtcgggtggatcaaaccactaagcttagaaaccgttttctcatgcagctatgtctctcttatttatgccttgaggactaattctggttttctagctgttaatgcactgttgaccttcataatggtgccttatgcaactggcccttctgtggggtcaaatacaggggtatgggtgatgcatgcttaattaaggctcttttttcacctggcattgtactgtatgatgtataatataggaaaaaaaaaaaaaaaaacaaaaaaaacaacaaaaaaaccacctctttaagatcctccacaatgacaaataggtgaaaactcctttgacatgtcaacatgtgttcatttccaacaacttgactgtcagtgttaaaatagggaaaaaaatagacatgataattgaaaactaattctgctaccatgagactcttttagagaccttgcacaattgtacagatcacacacaccaagttttgagtacctgtctagctatctgttggtaatactgaaagtatactgctttttttttttttttttttttttgaaaaaagtggatgaaatttcttgtgtatgtatatttgtgtgtatagtatgtgtatgtatgtgtgtatatatatattatatatagataatatataaatattttttaagaagaaactagaatgtttagctagaaaattctacagcctgtgaagaagtatttcaaaatggccataaaggaggttaaaaaatttgaaaactataacctaacttttataaaggctttatcttttatttaatgatttgctgaagacattttcggtgttgattctattccaccctgttgattttgctagtcattattggcaagcctggaatagggtacctttggccattcacaaggggcaggaacaaagtgctgctcaaccagctggactcacacacacacaaaggtttgcattttactttcagccttactggaatatctcacctaagagtaagctgatcacagggattgttttttagaatactttttatgcagatgaaactattttttccagcatgtagattctcccagctttttcaaggagtactttcccggaattggcataccgcagcatagacagctgatgtttctgatatttcatccagctgctgactttttgggtgtggatctcatatatatatgagaatgagtctggctgggctggtattttgtttgatcttcctggaaatgagcaatgattaaagctcacgtaattgttttttgtttttgttttttttttttgtatctgggctgatgaatacatttctctacagaactggtttcattttgcttaaggggaaaatgcacttttgtttggcagttcagaatccaagcacttgatatgctggattttggaaaactcctttttggccctgctgtgcttatccataacaattccattaagtaagaaggtaaacagaagagaaagaaaacttgtgctggctcgtctcacttatgaaacatcatggatgttgtctgactgggtggggctgggtgcgtatatgtcaatgcctgtaattttcataatgagcaagtacattctgttcaggtgataactgagcctcaatcaagcagaacttttgcttgaaattaaaaaaaaaaatttctattagtgaaatttctttatttctttttttttgtaagcaccctgttatctaaagaatctttgtaagatttttgtaaaattttgttttacaagattttatttgaaattgttttttgcgagattgttatatttctgtatgaatgtattttttattcgaataacataaaaagaattcttatcagc

SEQ ID NO: 62 - DNA, 4008 bp, Cricetulus griseus
  modified_base (994)..(994): a, c, t, g, unknown or other
  modified_base (1061)..(1061): a, c, t, g, unknown or other
atcgcgcttgcgcggtgtggggactgatgacgctataaaggcttgtttggctccgggtccgatgttcgagagcatacccgtgcggtgcgctctcccttggggaggctggagtgcagaaattctgaagtgagaggaagagtctgagctccggtaccccacttggtgaagatgaaggatattgacatgggaaaggagtacgtcatccccagccccgggtacagaagtgtcagggagagaagcagtgcacctggaccacacagagactgtgagaaatccaggttccagagagcaaggccgttagaaagtcaagatgccctagaaacagcagcccgagctgagggcttcccctggatgtctctgtgcattctcacctccaaattctggacgaggagcataccaagggaaaataccaccatggcctgagtgccctgaagcccttccggaccacttccaagcaccagcacccagtggacaatgctggacttttctcctacatgactttctcatggctctctcctctggcctatgtggttcacaagaaaggggagctattaatggaggatgtgtggtctttgtccaagtatgagtcttctgatgtgaactgcagaagactagagagactgtggcaagaagagctgaatgaagctgggccggaagccgcctccctgcgaagggttgtgtggatcttttgtcgcaccaggctcgtcctgtccatcgtgtgcctgatgatcacgcagctggctgccttcagtggaccagtgggagagacacccccagttgagattagttcaaaaaagaagctagtggttcacagaagtcacaagacaagggccccaaaccagggtcagtgaagaaggagaaggcagtgaagtcagaggaaggccaacttgtgcaggttgaggagaaagggcagggctcagtgccttggtcggtctatggtgtctacatccaggcagcagggggtcctttggctttcctggtcatcatggccctnttcatgctgaacgtgggcagcactgccttcagcacttggtggctgagctactggatcaagcaagggngcgggaacaccacagtattccaagggaacagaagctatgtgagtgacagcatgaaggacaactccccacatgcagtactatgccagcatctacgccctctccatggcagtcatgctgatcttgaaagccattcgaggagttgtctttgtcaagggcacactgagagcctcctcccggctccatgacgagcttttccgaaggatccttaggagccccatgaagttttttgacactaccccaacaggaaggattctcaacaggttttccaaagacatggatgaagtggatgtgcgcctgccattccaggccgagatgttcatccagaatgtgatcctggtgttcttctgtgttggaatgatcgcagggatcttcccatggttccttgtggcagtggggcctctcctcatcctctttgcagttctacacattgtctccagggacctgattcgtgagctgaagcgcctggacaataccacacagtctccgttcctctcgcacatcacgtccagcatacagggccttgccaccatccacgcctacaacaaagggcaggagtttctacacaggtatcaggagctactggatgacaaccaggctcctttcttcctgttcacttgtgcaatgaggtggctggcagtgcggctggacctcatcagcattgccctcatcaccaccactgggctgatgatagtcctcttgcatgggcagatccccccagcctacgcgggcctggccatctcctatgctgtgcagttaacaggactgttccagtttacagttagactggcatctgagacagaagcccgattcacttctgtggagaggatcaaccactacataaagactctgtctttggaagcacctgccagaatcaagaacaaggctcctccgcctgactggccccaggagggagaaataacctttgagaatgcagaaatgagataccgggaaaatcttcctctggtccttaagaaagtgtccttcaccatcaagcccaaggagaagattggcattgtgggacggacagggtcagggaagtcatctctggggatggccctcttccgtctggtggaattatccggaggctgcatcaaaattgatggagtgagaatcagcgacatcggcctggctgacctccgaagcaaactctccatcatccctcaggagccagtcctgttcagtggtactgtcagatcaaatctggaccccttcaaccagtacacagaagaccagatctgggattctctagagaggacacacatgaaggaatgtattgcccagctacctctaaaacttgaatctgaagtgatggagaatggggacaacttctcagttggggagcggcagctgttgtgcatagcaagggctctgctgcgtcactgtaagattctgattttagatgaagccacagctgctatggacacagagacagacttactgatccaagagaccatccgggaagcctttgcagactgcaccatgctgaccattgcccatcgcctgcacacagttctgggctctgacaggattatggtgctggcccagggacaggtagtggagtttgacaccccatcggtccttctgtccaacgaaagttcgaggttctatgctatgtttgctgctgcagagaacaaggtggctgtcaagggctaagtcctccatgggtgaagtctgttcctcagcatcgctattctcttcctggtttggatccctcatcctgtcctgctgaaaccttgccttttccctgttttatctctcacacaacagttcatgattagccgtttgtttcacttttagggaaaatcatattttgattattgtatttattccctattcatgtaaatgaaatttttttgttcttaattgcactcgtaagaggttcagggaaccattactataaatgtatcagtggcctataatgaagctttatatgtgtagctatgtctatatatgactctgtatatagcctatatttacagtaaagatgtaagcggtttattttctattaaaagcaagcactgtgctaccagcagtgcacattcatttctatcgttttgtacagctcactgcactagggctctcctgctcttagctgtaggaaaggcagcgttccgtcctctagctggtcgtttcacggtgctgggctttccaggtgtccaggggacacgtggcagtggtgggccccccaggcctgctctttgagctccccagtgggaatccagtgcagctgggctgtgggaggccttgccgagcaccgtgaattctcaggtctcctgctttcttgtcacttaactgtttatgttagagcagtggggcaaagcccacccccccctctcaggaatgagaaccccagcattcctcagaggggagagtttcattctgccctcctcctcctgctgtcgtttctaaacgagatccagactgctcccagtgtcccatacttcaggttcctaacactggccaccacagagctccagctctttggccagttggttcccagccctggggtccactgctgctgttgtaggtggcatttttttttcttttgcctgatcccacacgtccagagttcggtggcaggactcagggtcgtggggtctgtccttcctcatgtcagtctcctctgcaaagtctgcggccctcagcagctcttgctagccagtgtcttcactggtgtagtaagttttttgtactgtaaagagacctacctcaggttgctgattgctgtgtggtttggtgtgttcctgcagacccccttggtgccctggggcccatagcttgggtgggtgtggctgccactgtcatcagtccagtggtcagcgttgcatgtcctgaccacctagacattctgtcgccttagcatgtttgctaaacaccttatgaaagacaaaaatctagaaaaagtgaaattaaaattattttggatttataaaaaaaaaaaaaaaaa

SEQ ID NO: 63 - DNA, 4002 bp, Cricetulus griseus
gagcccaggcacctcgggcagcgccaacgactcccagcacgaccccggtaaaatgtttatcggtggactgagctggcagacctcaccagatagccttagagactattttagcaaatttggagaaattagagaatgtatggtcatgagagatcccactacgaaacgttccagaggcttcggtttcgtcaccttcgcagacccagcaagtgtagataaagtattaggtcagcctcaccatgagttagattccaagacgattgaccccaaagttgcatttcctcgtcgtgcacagcccaagatggtcacaagaacaaagaaaatatttgtaggagggttatctgcgaacactgtagtggaagatgtaaagcagtattttgagcagtttggcaaggtggaggatgcgatgctgatgtttgacaaaactaccaacaggcacagagggtttggctttgtcacttttgagaatgaagacgttgtggagaaagtctgtgagattcatttccatgaaatcaataataaaatggtagaatgtaagaaagctcagccgaaagaagtcatgttcccacctgggacaagaggccgggcccgggggctgccctacaccatggatgcgttcatgcttggcatggggatgctgggctaccccaactttgtggcaacctatggccgaggctaccccggattcgctcctagctatggctaccagttcccaggcttcccagcagcggcttatggaccagtggcggcggcggcagtggcagcggctcgaggatcagtcctgaatagctacagtgctcaaccgaattttggcgcgcccgcttccccggcaggctccaacccggcgcggcccggaggcttcccgggggccaacagcccaggacctgtcgccgccgatctctacggccctgccagccaggactccggagtggggaattacataagtgcagccagcccccagcctggctcaggcttcggccacggcatagctggaccctttgattgcaacggcctttacaaatggataccactgagcaggtgcttccgttgccatctcactctgagagcatacctggatgtccaggcaagactgggcgaagtttctgagtggtcctttgtttaggtgatgtcctcagacctggatccccaccagcctcactcctcatcccaagcagaggtggcacactttggattgagggttgactacatctcatctcaccaacctgctgtaatataagacaacagcttttaaacgtgtatataataccatgattttggtttggttctgttgtttttcttggtggtctccctctccctcccccccccttctcccttcccccctttgaaatctccctgaatcacatttggtagtgatttttgacttagtctagtgtcaccttagcttaatacctagtgaaaagctaaccattagtatacttgttatatattaaggagttttctttcttcttttttcttttcaaaaaaaaggtaattttgttttggttttgttgttttgtattctgttctcacttttaacggatgctgagatggtgatgttactctccatttttggtaccaatgctgagactgtaagaattttcatctgggactttagcacacacttaagcagagttgtgatgtgcggggcgggaggtgggcatagactctctatgttacattatagaagtgacatgcagttcttttttctgttcaaagaggtcgtattataaggtttttgaaattgtgaattctaaaaacaaaaacaaacaaaaaagttgtaaatagaattccattaactacatagaaactattaaaaagagaatcaaaatattttgtggggagttgctcccaggcagttaggtaccctggaaggagggaggggagggaaccttgatgaagcccgaactacacaacacaagagcacccagctgccagggccacctggaactccactcttagcgcctctgttggtgtggtagacctaagaaccgcattagcaccctgccagcccagcaatctctctgtgcacagcttcaaatgttatggtctagctagatttttatttaaaatatgaaaaactgcttttcccaagacattttttaaagaaaaaaaaaaagctacaattttaatatttaacatatttaaagtttcaaagcacacctgttttggcttaggggaggggcagggtagggacattctttttcagtcttaatttttaaatatctgatcattttatattgtccaatcatttcagcacctccaaaggtccctagggtactctgtctctctcctcaccctgtccccaccctttctccactcactttactatttttactaaatttaggaaagcaacctttcggtttatatatatattttttttgtgctgcaagtatcatcagagaggctatggaagagtttttttttttttttttttttatttttttttttaatttattgtagatgtaaacagaattttaaaaataaaaagtataaacatcactgcactgtgactggtgggaaaaactgacagtttcctgtttgcacatgtttgacatttggctgttataatatatggtcctcagttgggggaagacacttaggatgaaggatgttttttaatttaacttttttttttttttaaagaaaaatattggtaataggtcggcaacagaaactgtagaagtacaactcaataggtggcattaaagcgtattgtagtgtggatatattttttttcttttttaaaatgtgatattgacattttattaatattttttaaattgttacgtttataaatttggtacttaaggcacagccagtatgagacactgaatgcgacatttattataaagaactgctgcactcctatttttataaattttactaacaatagactaacatagacattcatggacatggtagcgcaaaagcatcttcaacctaaaagtctccaaaaaattccaactagaaaaacaaaagactattttgatctttagtggaaacgagggctagggacttagcctccaccacccctaccacactgcttcattctgccgttcactgactgcagcatcttcaagactaaagcaatatagtttcctactatttttttttttttaattgaaggtcagccatgctttctgtattatattgcatatgaaattgtttacaaaagaaacactaactcatacttctctctatcatttggaagtgacacacaggaacagagggaattttggagggcaggtgagggatgggagagaaaatagtaaattaaaaatacaaaaacaaacatataattaaaaccgacccctctcggggatcaaccataattcaaacacggctatttgataatcagaaggtattgtctcagataggattccatttccgggaggcagggcacgagaggggaaaggagcaggactgagagacagttccagagcctcaatggaaggctcctactgctgtattctgtacatactgtaccaccctgtgtggtgtctgtgagtgtgctcttgagtagcgtgggctagccaatttgccattcatggtgttaaactcagaattccatatgtaataggatgcaagtctaagcgtttcatgtggacataaatgtatctaaataaaactttccctagcactgtggctgacctcacccttacttttatactttagtatgaaactgacaagaactttggtagtgagtattttttttatatatatacatatatatgtatctatatatatatatatatctcaagcatctttcaggtctttgtgtgtggctttcttaaagccctgtttaaaaaaaaaaaaaattactatgtggatggcagtctctcacatcacagatgtggaaagtataattttatatttgtattttcaaataaataagtttgtgaaaggtttccatcctctactgtggtccagaaatcaatgtgtttgtctgacaaaaaaaataaaaaaataaacttagttttgtaacaaaaaaaaaaaaaaaaaaaa

SEQ ID NO: 64 - DNA, 3999 bp, Cricetulus griseus
  modified_base (784)..(784): a, c, t, g, unknown or other
aacaaatacaaatgtaaacacaagcacaactacatctgaaggagcaacatctgggttaataattcctcttactatatctggaggctcaggccctaggccactgaatactgtaagtcaagctcccctgccacctgggtgggagcagagagtagaccagcatgggcgtgtttactatgtagaccatgttgaaaagcgaacaacatgggatagaccagaacctctacctcctggttgggaacggcgtgtggacaatatgggacgtatttattacgttgaccatttcacaagaacaacaacatggcagaggccaacactggaatctgtcaggaactatgagcagtggcagctacagcgtagtcagcttcagggagcaatgcagcagtttaaccagagattctattcttacgggtaattcaagatttgtttgctacatcacaaaataaagaatttgatccccttggtcctctgccccctggatgggagaagagaactgatagcaatggcagagtgtattttgtcaaccacaacactcgaattacacagtgggaagaccccagaagtcaaggtcaattaaatgaaaaacccttaccagaaggctgggaaatgagatttacagtagatggaattccatattttgtggaccacaataaaagaacaaccacttacatagatccacgtacaggaaaatctgccctagacaatggacctcagatagcctatgtgcgggacttcaaggcaaaggttcagtatttccggttctggtgtcagcaactggccatgccanagcatataaagatcacagtgacaacagataatgagcttcagcccgcaagatctgagaagacgtttgtgggtgattttcccaggagaagaaggtttagattatggaggtgtagcaagagaattggttctttcttttgtcacatgaagtgttgaacccaatgtattgcctgtttgaatatgcagggaaggataactactgtctgcagataaaccccgcttcttacatcaatccagaccacctgaaatatttccgctttattggcagatttattgccatggctctattccatggaaaatttatagataccgggttttctttaccattctataagcgtatcttgaacaaaccagttggacttaaggatttggaatctattgatccagaattttacaattctctcatctgggttaaagaaaacaatattgaagaatgtggtttggaaatgtacttctctgttgataaagaaattctgggtgaaattaagagtcatgatttgaaacccaatggtggcaatattcttgtgacagaagaaaataaggaggaatacatcaggatggtagctgagtggagattgtctcgaggtgttgaagaacagacacaagctttctttgagggctttaatgaaattcttccccagcaatatttacaatattttgatgcaaaggagttagaggtccttttgtgtggaatgcaggagattgatttgaatgactggcagagacatgccatctatcgtcactacactaggacaagcaaacagatcatgtggttttggcagtttgttaaagaaattgataacgagaagaggatgagacttctgcagttcgttactggaacctgccgattgccagtgggaggatttgctgacctcatggggagtaatggaccacagaagttctgcatcgagaaagttgggaaagaaaattggttacccagaagccatacttgttttaaccgcctggaccttccaccctacaagagctatgagcaactgaaggaaaagctgttatttgccattgaagaaacagaaggatttggacaagagtaactgttgagaccttaggccaccagaggacagggactcatctacagtgcctgccccttccttctctgcctgttgcacatcttattgtaaacttggactgtgactagagagttatctgagtgtaagtagattaacgttatcactgagatttatcttccagtaattctggatttctactcagcgtcttcagaaagcagatctacaaacagtagtcagaaacttacttaacatgagatttaacacatgatgagatctcccttgtcttattctactagattgttcccttaacaacagttttctgtggcacttgagcaattgccgcttgtgctctccctctcatctcagcctggcctgactgttgttttcatccctggagcatgaatcagtgcgtcagtgcgtcattctgacgttattcctggcagtgacgcaggactcacatctttgtacaaagtagttttgtctatttgaattcagggaaacttggtccccgccacacatgacttcatacctcttttcattcagtttataattattttattgccttgcaaatactaaactttacaagcagtatcagcactgtggttccttcacattttagaagttaacctaaaattaaaattattttttctgaattcatctaagatcattcttgattttttaagtcttacacataaattgaagctttatggttttatcataatctaataccccagttacatttcgctgtctttacacttctgccacacacaggagcaggtgtcccatcttctcacatggtcctgatctgcaatatttttctcacccctaaaaacattagattttgctttttttcttcatgacttgtttatttcagactgctcctttagtaactgatgaatgcactttgactttctctgtactcagtttcccttggctttgcttagactgtcaggatggctgctgccatagatacgacttcatgagcagtgaaatgaagcctcagccatgtgagtccctattatagccaaatcccccaaaagccttatagcatgaagccaagaacacacagagagtgacaaacccctgttccataggaaagaaagtgtttctctgtccctagctgctcttcttgttctcaccctggaacattttgaatttgtgcagctgtactctaacactgccatcggtggtcagcggagactctcgtgactgaggaagggttgcctcatctagagaccatcagtgaagggaagctcagcttctcccagccctcttttcgtcctgtataccacaggaaatacatgtcatctctagaagccctagttatctccaaagtaggaactctctgcctttttgttggtagggttaaaatatatatatatatatatatgctattgctttgtcttacagagcgaatgtctgccaactacccatttactacataggcttggactttaatatatggctataaatactaagccttctacaaagacctcccattggatcaaattcttgtactaaaatgtagtcatctaccatatccactagagatttatgaaattaaattaagaaataatgtaagaaaataggctttgttgattctgcataatgcttcatgattcatttagggacctagagatattatgtgaaattgtataaatatcacccaaaaggctttctgccctatatttttaaaatacagaagttatatttgaagtagtcctggccctagttctatagggcttggctatttaatatttttatggaagaaatgtttagttctggaaaaggtaaatgcttgtatatatttttgcagccctggggtctcccaactccatttcttcctttaatttaattgatcacatgtatatgtcttccctgctgtgttaggaaaatggggctggatatcccaagaatcagagattatataaaataatgcaaccaaacagcagacataaatatttaccaaatgctctcacattttggttcagagtgagtatttggaaatagatttactgtgtttaattagtgattttccttaaatccagactaagttgcttttaagacctttttctctgtaagcattgtaaatgctaatcaatcctgttaagtttttttttttcttactgcatgttacattgaaataaaaacagagtacagtgaaaaaaaaaaaaaaaaaaaaaaaaaaaaa

SEQ ID NO: 65 - DNA, 3995 bp, Cricetulus griseus
ggcgtccgtcgccgggcgttccgcggtcgatgctgcggtcggcgcggcccgcgaggctcctctgagtccgggaacggcggcgagcgcggcgggctcgggtcgccatgcctacccgagtgtgttgctgctgctctgctctgcgtcctcgctataaacgcctggtggacaacatattccctgaagatccaaaagatggccttgttaaagctgatatggagaaactgacattctatgcggtgtctgcaccggagaagctcgatcgaataggcgcctatctggcagagaggctgagcagagatgtcgtcaggcaccgttctggtgtaccttctaattgctatggaggcgttggaccagcttcttatggcctgccattctcaaagcatcaagttccttcatatggtagcaaagctcctggaatcagggaaccaaagcttcaagttcttggaacaaattcttttgtcaaatttgcaaatattgaagaagatacaccatcctatcatagacgttatgacttctttgtatctcgattcagtgccatgtgtcattcctgtcacagtgaccccgagattcgaactgagatccgtattgctggaataagaggcattcaaggtgtggttcgaaaaacagttaacgacgagcttcgggcaaccatttgggagccacagcacatggataagattgttccctcactcctgttcaacatgcagaaggtagaagaggctgacagtcgcctaggcccgccttcctccccctctgcagctgacaaagaggagaaccctgcagtgctggctgagagctgcttcagagaactgctgggccgagccacttttgggaacatgaacaatgctgttaggccagtttttgcgcacttagaccatcacaaagctgtgggatcctaatgaattttgcagttcaactgctttaagattataatgtaaattctattcaggcccagtattctcaccatgtgatccaggaaattctgggacacctagatgctcggaagaaggattccccacgggttcgagcaggtatcattcaggttctgttggaggctgttgctattgctgctaaaggttccatagggccaaccgtgctggaagtcttcaacacactgttgaagcacctgcggctcagtgtggaactggaagccaacgacccccagcggggctccatgggcagcatcgccgtaagttccaaagacaacgatgagaagattgtgcagaatgctatcatccagaccatagggttttttggaagtaacctaccggactaccagcggtcagagatcatgatgttcatcatggggaaagtgcctgtgtttggaacatccactcatgctttggatgtcagtcagctaggggacttgggaaccaggagaattcagataatgttgctgaggtctctgcttatggtgacttctggatacaaagccaagacaattgttactgctctgccgggctcatttctggaccctctgttgtcaccatccctcatggaagattatgagctgagacagctcgtcctggaagtaatgcacaacctcatggatcgccatgacaacagggcaaagctccgtggcatcagaataataccagacgtggctgacttgaagataaaaagagaaaaaatttgtagacaagatacaagcttcatgaaaaagaatgggcagcagctgtacagacacatatatctgggctgcaaagaggaagacaacgttcagaagaactatgagctcctttacacatcgctggctcttatcaccatcgaactagccaatgaagaggtggtcattgacctcattcgattggccattgctttacaggacagtgcaattgtcaatgaagataacttgtcaatgtttcatcgctgtggaatcatggcactggttgcagcatatctcaactttgtgagtcagatgatagccgttccagcattctgccagcatgctagcaaggttattgaaactcgaactatggaagccccttattttctaccagagcatattttccgagataagtgcatgcttccgaagtctttagagaagcatgacaaaagtttatattttctgaccaacaagattgcagagtccctcggtggcagcgggtacagtgtggagaggctctcggttccttacgtgccacaggtgacagatgaagatcgtctttctagaagaaaaagtattgtggatactgtatctattcaggtggacattttatccaacagtgtgccttctgatgatgtggttagcaacactgaagaaatcacctttgaagccctgaagaaagcgatcgacaccaacggaatggaggaacaggaaaaggaaaagagacgtcttgtgattgagaagttccagaaagcaccttttgaagaaatagctgcacagtgtgaatccaaagcaaatttgcttcatgatagacttgctcaaatactggagctcaccatccgccctcctcccagtccatccggaaccctgaccattacttctgggcatgcccagtaccagtccgtccctgtctatgagatgaagttcccagacctgtgtgtgtattgacgggctcatgaagactgtagcatcgaaaggaaacttaaagcttgaaaagcaaggccaagatgagttttcaggatttgcataagtctccctgatgtgtcctgagacgggatgggatttatctctaacagacacttgtcatgcttctttagaagttcagggattctggtttagaggacttctgaaggtagatttacgccacgttcatttgttgtgaggttcctgttagctttgaagattgaacatgtattgcttgcacattatgccgttgttaatagtatattttaaactttgcacaaacatgatttttaaaaaaagattgaaaatgtacgaagtgtctgctaaatctatgcttcgcttggactgtgtagtcacccttcagtcctcagtagtaacacgtggcaggcattcctacagtatcaacggtagaaaactctactgagtagtattcccacctaggtgcccatccggaaactggccaggacttaccggtcttgtgatactgtgtttgctgcttcaagctgagcccttgagccccttagtgctcactcttggagcaccgaaaggtacggtgtcttccacatatgacgtgttagttacagactgcgctttgaaactatagttgtattttgctgtgactccattaattaaatgaaatatatatttactatagagaacaaagacatttaaaatagctacatgttcacctgtgcagagcctatacatttcagtttcttttaaatgaacaaattttcatttttatattgtacattgttttaggtcttctttttacataaaacagtattcctatcaaaaattatagctcaaaaataacttggatttaagttttgttttgtttttaaaagaaatggggatgttttaaatatgtatttatggttatttgggcaccattagttcaaaaagaaaaaaaaaaaaaaaaaaaaaaaaaggaagtttgaatatatacgacagagtaaaacatcttggagaggggtctatttgctaaaacctctgacaggacagccaagcctctgatgagggcagacccgccagaccttgtcctcagggacagtgcagctggtactggaaggccagtggccagctccagctgtcacggtagcttcccctcacgccggggaatatgtcaccagttagggttaagcatcatgcatttttatttcccttctttcttgtgcattttaaaagaaggccattatattttgactacatttaaagtctaaacaggggacatgcaaaaacaatcatcatccacttggatgtcattttataaattaacactgtgtgcttttgtatggaagatatataatttaatagtataagaaagatacatatatatatatattcacttgtattcctgaaaaaatttgctgtacagaattttgcttttcttagtgatttaaaaaggcatgctttgcatgaaaag

SEQ ID NO: 66 - DNA, 3994 bp, Cricetulus griseus
agcatttgacattgggcagcaaagaaatggtgatggagaagcccagtccgctgcttgtggggcgggagtttgtgaggcaatattatactttgctgaataaagctcccgagtatttacacaggttttatggcaggaattcctcctatgtccatggtggagtggatgccagtggaaagccccaggaagcagtttatggccaaaatgatatacaccacaaagtgttatctctgaacttcagtgagtgtcatacgaaaattcgtcatgtggatgctcacgcaaccttgagcgatggcgtggttgtgcaggtcatgggtttgctgtctaacagtggacagccggagaggaagttcatgcaaacatttgttctggctccagaagggtctgtcccaaacaaattttatgttcacaatgatatgtttcgttatgaagatgaagtatttggtgattctgaaccagaacttgatgaagaatcagaagatgaagtggaagaggagcaagaagaaaggcagccatctcctgaacctgttcaagagaatgctaacagcgcttactatgacgctcttcctgtgactaatggcatagaggagcctttagaagaaccctctcatgaacctgaacccgagcctgagtctgaaacaaaggctgaagagctgaaaccacaggtggaggagaaaaacttggaagagctagaggagaagtctaccacccctcctccctccgaaccctgcttctctccctccaagaaccaccgaaggctttctcctgggcttcagtgaccagtaaaaacctgcctcctagtggtactgtttcttcctctggaattccaccccatgttaaagcaccagtctcacagccaagggttgaagctaaaccagaagttcaatctcagccaccaagggtgcgtgaacaacgacctagagaacgacctggtttcactcctcgaggaccaagaccaggcagaggagacatggaacagaatgactctgataaccggagaataattcgttatccggatagtcatcagcttttcgttggcaacttgcctcatgatattgatgaaaatgaactgaaagaattttttatgagtttcgggaacgttgtggaacttcgaatcaataccaagggtgttgggggaaaacttccaaattttggttttgtggtttttgatgactctgaaccagttcagagaatcttaattgcaaaaccaattatgtttcggggagaagtgcgcttaaatgtggaagagaagaaaacaagagctgccagagagcgagaaactaggggtggtggtgacgaccgcagggatatcaggcgcagtgatcgaggtcctggtggtccacgtggaattgtgggtggtggaatgatgcgtgatcgtgatggaagaggaccacctccacgaggtggcatgacacagaaacttggttctggaagaggaaccgggcagatggaaggccgcttcacaggacagcgtcgttgaagttccactgttggcaaagttttggcagtggtacctaactcatcgtgtttgcattcttgttaagtttttttggctttggaatgtgacacagcctttttgatcatttctttgatgtgaaaagcatcttttggttatcagttaaattgaagtggacattattcccccaatttcacaacaggattcatattaatttataaatctagacttggagaattaaggactgagaaatgaccatatcttaaactctctacaacaaaatgaacttaaaaaaaaggacatgcccactgaattcaggtcatttgaatttaaaaaaaaaaataatcctctgctgcacattttgtttaagtgttaactgtttctgctattaatgttggaaacacaaatagtgcaatttgtgcaattggagaatcttgccttttttcttggcttccccccaatacaaaccaacagaaacttgttatgtattcatcaaaatgcactatccgggtactctgaagtcattaacattgattgacatctgcaccaggaggcaacaggggaaacaaaaaaatctttcatcttcttttccagtagagaatagtttgtgaaatgatgagggcattttatctgcttgctgtgaccagcgtgtgcacacacaaaccttaacaagactgcaaatattccagaaggaaatcatttagttatgaacgaaataacaaaatgacaacctcaaatgccctggtcttaaatactaggccagatttagcggctcggtatcgtaagagttctcgacttgccctcttgagtacagggatggctggctgctcaacacactcctcccctttcctttctttaagctgtggacagtgaggactgtttcctgtatttttgttctctggtaatgtaatgagcatgatggtgccttctacaacacatcattccagtcttgctggtgatcctgtgcagtgtagttatgaattgctgtgctgcgaagccaaacagctgcaaaatgttggagaaaatcattgatgtataaaaattgcagtatctttaagattagtaaaatggatgcttatttatcttgtttcttcagttaacatcttctgtgttctgtgggaggacttggaaaagtcaaacatcttgatgtacattttattttagtcacattttaaaagcagtcagattcccaaaaatggcaagtaaacttgagttgaggatactgcaattttcagagggaagaatggcagctcttaagatttggggggcagggaactgtcattcaatttgcacaattcttgaactgatgtcagcacccaaatggctcctgaatttaagtctgggacgacatctttttatttttacatgaatctttaagcaattctgtgagcagagtttctagctgctggattattgtctgtctttatagcaggttccagtaacccacaagaatggcaaaggttatctggctctatgattggaacggtcagtgtatatcagatctctgatgtttcaagcaagaagcagagtataaatacatgtgaccacttaaagctgcttgttagttaacatggaagacttctccattccaccttaaggaaaacgaaatacacacttgacatgatagcaaattggttctcaactattggactgtttgctagttaacttttttttttgttcagctgggcaatatgggtaaaatttactgtctctttttcccctttgaggtcttccatgtttgaggaaatgtcttgcactattgcatatattttgtggacgcagatttttttgtagtttccattttggaaggctaaggttttttgtttgtttgaaacagttttacactttctaatgtacagtacttgaagttcatactagagaattactttggagttttgaagcttttatccaaactgctttgaaataagtggctttattgtcagtggttttcccccaagtgtattcttctttggttattattcccctttcttgtcacgtgagtatgtgtgtgcacacatagaaacacatggacacaagcatatatatttccaatccaagatattgccctgtaacccatataaactgttatggcaacaagagacatgagagatgttaagtgtaatacaaaattggagctaagagccattcagcttcagcctttacataccacaaatgaaacattaaaacatcacatggagaagtttacatggtgactattcacctgcagtactgtggacttttaacattttgtcccttttcagtgaaaaactaaaaaatattaatcatcattactgttatttgctgattttattttattttgatggtaatattctatccttatgacactattgcaaccaaattggctttaccatcttggctttagtaggtatagaaaacaatgattaccatctttatttgtaatgtgttaataagcattatatgctggtagaatctagtttttgtttcaggtggaaaatattctttttgagtttccattttaaatgtgtttggactaaaacaataaactactgatgtctgcag

SEQ ID NO: 67 - DNA, 3993 bp, Cricetulus griseus
  modified_base (20)..(20): a, c, t, g, unknown or other
gaacacagtaactgccagancttcaaacatcaagttcagctttgtctgcctaacctgtctgacatgtcgggacccgtgccaagcagggccagagtttacacagatgttaacacacacagaccccgagagtattgggattatgagtcacatgtggtggaatggggaaatcaagatgactaccagcttgttcgaaaattaggcaggggaaaatacagtgaagtgtttgaagccatcaacatcacaaataatgaaaaagttgttgttaaaattctcaagccagtaaaaaagaagaaaattaagcgtgaaataaagattttggagaatttgagaggtggtcccaacatcatcacacttgcagacattgtaaaagaccctgtgtcacgaacccccgccttggtttttgaacatgtaaacaacacagacttcaagcaattgtaccagacattaacagactatgacattcgattttacatgtatgaaattctaaaagccctggattattgtcacagcatggggattatgcacagagatgtgaaaccccataatgtcatgattgatcatgaacacagaaagctaaggctaatagactggggcttagctgaattttaccatcctggtcaagaatataatgtccgagttgcttcccgatacttcaaaggtccagagctacttgtagattatcagatgtatgattatagtttggatatgtggagcttgggttgtatgctggcaagtatgatcttccggaaggagccatttttccatggacatgacaattatgatcagttggtgaggatagccaaggttctgggaacagaagatttatatgactatattgacaagtacaacattgaattagatccacgtttcaacgatattttaggcagacactctcgtaagcgatgggaacgttttgtccacagtgaaaaccagcaccttgttagccctgaggccttggattttctggacaagctcctgcgatatgaccaccagtcgaggctcactgcaagagaggccatggagcatccttacttctacactgttgtgaaggaccaggctagaatgagttcatccaacatgccagggggcagtacacctgtcagcagcgccactatgatgtcagggatttcttcagtgccaaccccttcacctcttggacctctggcaggctcaccagtgattgctgctgccaactcccttgggatgcctgttccagctgccgctggtgcccaacagtaatgacccccatccatctcctgatgcctaagcagaggtggggaagtccaccctctccttgatgcagcttgcgcctgttgggaggggtgagaacacttcagaagcaccgtgtctgaaccgttgcttgtggatttagtagttgagtcaaaaaaaattataataggctgattttcttttttctttttttcttttttttttttttttttttttttttttaactttgaacttttcataactcaggggattccctgaaaaattacctgcaggtggaatatttcatggacaaaattttttctccccttccaaattcagttcatcaccactaaagatcaaagataaactggcctcagtcccagctgctgtgtttgggggggtctcttcccctctccacattgctctccccacattactacactcttgggggttggatcttatgctctcctccagagattataaaatgtagcttatcaaaggaggtgggaagaagaaaggtagggaggacccagtccatgctccacactgttctgctggtcacttcatcacctttctccaggactgcgtccatgggttattccagctctggtggcggtggatctgtcttagttacatcaagatgttaaaagtctacccgacttgcagacagatccttaagcttttctgaatgaatcatgtcttactgacctaaccctaaatcattttaattttagtttagtttaaatcggtgatactttccctccttgactcctgctttgttctttcccttttcatctcctgacatactgtgcttcagacctggtaggaaagggaaggcaaaatctttttcagttttctttgacttggccattttgaagtcagttagttactgggcataatttattgctttttaaaaaagaaatactgtccatataagtttcatgctagcactcttaagagctaacgggtgatgtggccacactgggttcattttaagctttgtacttttttctcctcctaccgtcccctttctttatatgccatctagtgaggagacctgctctcagagttgtaattgtgtctgagaggcaggagcagagccactgtctgcagtgaaccagaaatggtagacctgtaattgtgggaaactatcagttctcttgttatggccctgccatcccttgctgtgtgtatatatataatactttgtccttcatatgtgaaagatccagtgttggaattctttggtgtaaataaacgtttggttttatttatacaaggttagatttaagttccctgtgtaaagttctcgctgggtgggtgtctcacattcaaacctgaggggactacagcccataccatggagacttcccaacgcccccatttttatactcccctcgttcgacccatggtactgggcagggcagggcagagaggccttaaaaaaaaaagcaccacaagccaaagcgtctctggggattaaggatcctttgccataaaactcattctgtgtctcagcattgcagggattggggataggataagtcgccagtttgtgtgtttgtgtgtgtgtttaaagtggactttccactgtaatccagccacctaagtttatcaggtgcttcactgaggaagcctagttttttaagcacaatagcaaaccatcagctctgtattttctcctcttgtttcattacagtagctgcctgtggggactaggaaaaaaatcttccaacatattttagggcctaaagtcttagttccccattctcctatctttatagattcataagcctttctcacatggcatcatagataaaacataattgtttggggagttgaatttaattaacttacctaactttgtaacccatcttggctttagtaactttatcaaggtggtggctttagcgaatgtaatgataaagtagaggacgctaatgcctttcttaacctttctcaaccatagggacagctaaaagactgcagagtgatttttcttatttttggccacttgcagtgactatttattgtacttgattcttgtatgccctagtgtgctgtgagggttaccatgatgggtttgtgcagagccgaaagcaccaggtgtgctagagatgcagtttatgattatgtttgcactggatcgtgatttgaacaagacacttagatggatgaattctttcttttgaggtggaaaggaaggttgtagatcaggactccctaccctacttacagctcagaagtccaggtgtgtctgaggctggtgtggatagctgcagatggctgggcctcctcactcatcacacctggtacaagagctgatagtgaatgcagaggactctgagagccttttaaaataagtagaaatttaaaagaaacagggagtcactgcagaaatgtggagagttttaaaagacctgaatgggggaggggtagggagggtcagggtttacagagtaacaacttctgtgttgtaaattacctcatctgtacaccttgtattgggacactatttctcagcacttcctgtgtctgcattgcttagatggtgggaaatggatgccaacatgaaagggctgtgttggcagttactctgaaagtttttggctttgttttgaagtgtccccttccccctttaaaatcagaattcccctctttgatttattggttgtaattgtattgtaattggtatgactaagacataactgtgctgggaagaagttgtgccatgaaggtctttaatttttttttttaataaaaacatttaaataaatgaaaaaa

SEQ ID NO: 68 - DNA, 3989 bp, Cricetulus griseus
  modified_base (2554)..(2554): a, c, t, g, unknown or other
actgtgccgtccatgtcagtgtaacgacaacatagaccccaatgctgttggcaactgcaaccgcctgacgggagaatgtctgaagtgcatctataacactgctggcttctactgtgaccggtgcaaagaagggtttttcggcaatcctctggctcccaatccagcagacaaatgcaaagcctgcgcctgcaatccctatgggacagtgcagcagcagagcagctgcaaccccgtgaccggacagtgcgagtgtctgcctcacgtgtccggccgggactgtggtgcttgtgaacctggcttctacaacctgcagagtgggcaaggctgtgagaggtgtgactgccatgctttgggcaccaacgggcagtgtgacatccaaaactggtcagtgtgagtgccagcctggcatcactggtcagcactgtgagcgctgtgagaccaaccactttggatttggacctgaaggctgcaaaccttgtgactgtcatcatgaagggtccctttcactccagtgtaaagatgatggtcgttgtgaatgcagggaaggcttcgtgggaaatcgctgtgaccaatgtgaggagaactatttctacaatcgctcttggcctggctgccaggagtgtccagcttgttaccggctagtgaggataaggttgctgagcaccgagtgaaactccaggagttagagagcctcatagcaaaccagagagtgaatagcagtctgcatagccaaattagccgattgcagaatatccggaatactatagaagagaccgggatcttggctgagcaagcacggtcccgagtggagagtaccgagcaattgattgagattgcctccagggaggcttgagaaagcaaaaatggctgctgccaatgtgtcaatcgctcagccagagtcgtacaggggaaccaaacaacatgaccctcttggcagaagaagcccggaggcttgcagaacgccataaacaggaagctgatgacattgtccgagtggcaaacacagccaatgagacttcaactgaggcgtataatctgcttttgaggaccctggaaggagaaaatcaaacctctctggagattgaagaccttaataggaagtatgaacaagcaaagaacatctctcaggacctggagaagcaggctgcccgagtccacgaggaagcaaagcgggcaggtgacaaagctgtggagatctatgccagtgtggcccagctgacccctgtagactctgaggcgctggagaatgaagcaaataaaatcaagaaagaagctgcggatctggaccgtctaattgaccagaagctaaaggattatgaggaccttcgggaagatatgagggggaaggagcatgaagtgaagaaccttctagagaagggaaaagctgaacagcagacagcagaccaactcctagctcgagctgacgctgccaaggctcttgctgaagaagctgctaagaaaggacgaaataccttacaagaagccaatgacattctcagcaacctcaaagattttgatagacgtgtgaatgataacaagacagctgcagaggaggcgctgaggaggattcccgccatcaaccggaccatagctgaagccaatgagaagacgagggaggcacagctggcactgggcaatgctgcagctgacgccacagaggccaagaacaaagcccatgaggcggaaaggatcgccagcgccgtgcaaaagaatgccaccagcaccaaggcggatgctgaaagaaccttcgcagaagtgacagatctggataatgaggtgaacgttatgttgcggcagctggaggaagcagagagtgagctgaaggagaagcaacaggttgctgaagccgacatgatgatggcggggatggcttcacaggctgctcaggaagctgagctcaatgccagaaaagccaaaaactctgttagtagcctcctcagccaactgactgacctcttggagcaactgggacagctggatacagtggacctgaacaagctaaatgagatagaaggtaccttaaacaaagccaaagatgagatgaaggtcagcgatctggacagaaaggtggctgacctggagagtgaagcccggaagcaggaggcagccatcatggactataaccgagacatagaagagatcataaaggacattcacaacctggaagacatcaagaagaccctaccgtctggctgcttcaacaccccgtccattgagaagccctagtgacgagagggctgcaaggcagtgcccccgaaaggggcccctgtgaggccacagtgccttgacacaaagattacactttcatgtcccccacttctctgctgctctccatcactgtccttttgaaccaagaaaaatcagagtttaaagagaagcaagttaaacatcctgaaccaggaaacaaagggttttgacctaataaagtctctcttccactcatgtcaaccaccttaccgcagaatctatctcacttctcatatttctatgaaggaaatgtttggctcctcatcatagcattgagatggccaatgtgtcccatcttcagcatccnctttaaaaggaaataaacatcctgtgccaaaggtattggtcatttagaatgttggtaggcagccacctgtcacgctagctgttggagtataggacactgagccatcgtggataagagtgcagttatgtgtgggtctccagagaacgtggctctaagacacttaggatttcctcccatgttcattgaccaggaaagcaaacttttatttcaaatccttaggcagctgataaaaagtctggatgtaacctgtataattgggttccatatgtacatttctttttctctgctggagagagatgtgatatttggcccttagctcaaattctcttctaatgtttccatttttctagaactcttcaaaaacacattgtttgccagatcctggtggcaaacggctgtcgctcagtatttcacaccgctgccagcaccatctagttcctgcactttgtggctccacccactctaagcctttcctctggatggagcgggaagaaccttgtgtggcatttcctagtaggcttctcaacctctgatcctcagctctgtggttttctgaagaccacactgtgacagtccctgccacacacccccttcctcctacctacctgcctctgagattcatatatagcctttaacactatgcaattttgtactttgcgtagcgggggaaagaaactattatctgacacactggtgctattaattatttgaaatttatattttttgtgtgaatggtttttgtttatcatgattatagagtaaggaatttatgtaaatattcccggtcctcctagaatggcactgtcagttcatgtcttttttgctcagtttcccctcttgctagcacagggaacatgtcctcaccaagttctgtgctgactagctagtccctctgattaagtgcctcgccgccttaacaaatgcattttggtcacagttgcaagaaaatggctgaaaccgaccgccatcatccattgggtcagcgccactccagcaggtcttaggccctggtgggtgtggtgttttgtttggtttatttgtcctctccatctgtgtgctatatttttaaacagaaatttatttttaaaaggaaagttatttacaagatgatacctattacactcctgcagcccagccattgttttattgtatagttccagtaatctgtattttatgtaataaaattgacaggatggctgctgtaaaatgctgggtgtcacacagaatagattgttttattttatctctcccccgccccaggttttccttttgattccaactgtggcccttttaaatgtgcctcacttgagctgtttgcctcaatctccacagccttcctctccagggagggcaagcaaaacacatggcatttttctatgtttaaaaagaaaacagtattttatttataataaaaatctgaatatttgtaaccctt

SEQ ID NO: 69 - DNA, 3989 bp, Cricetulus griseus
  modified_base (532)..(532): a, c, t, g, unknown or other
  modified_base (603)..(603): a, c, t, g, unknown or other
agcaaggatctgcaaaaaatggagagaatacagcaaatggggaggagaatggagcacataccatcacaaataatcacactgacttgatggaagtagatggggatgttgaaatccctcccaacaaagcagttgtgctacggggccatgaatctgaggtttcatctgtgcctggaaccctgttagtgatctcctggcatcagggtctggagactccacagcaagaatatggaatcttagtgaaaacagcacgaatggtcccacacagctggtgcttaggcattgcatacgggaaggaggacaggacgctggcaagtggttcttttgactaaatgtgtgcacatctggaacacacagacaggtgctttagttcacagttacaggggaacaggtgggatttttgaagtttgctggaatgcagcaggagacaaagtaggagccagtgcatcagatggttcagtttgtgtcttagaccttcggaaatagcgttactagttggaagccatggaccgactatgaatgtgtacatagccanaagactatccctgacccacatactgctatagtcccacttgaaccatggccagtccactacaactttttttnttttttattacaataaagagattaaaatgtttctggataaggattagcttctcaaagtgtccatcattctatatagaagcttaaatatgtaatttagccagattccagtattaaaaatctctcctgttattttctttttacaaagcaagattacagcatataacactgccatcacatggcaaaatgcttgctaccttagttttaaaacaacttttaaaggcttgcttcgaggtttttttgagtagcgatgactgaggatttagggagaagtgtggctgctgtgccactctgcccgagtctgtggcgtcaaggctgcacttggtcaagcaacatgatctaagctgctgctttctttttttttggtttttcgagacggtttctctgtgtagctttggagcctatcctgggcactcgctctggagaccaggctggccttgaactcatagagatctgactgcctctgcctcctgagtgctaggattaaaggcgtgagccaccatgagatatttagagctcactgctctggggttctgtaggaaatctacaatgccaagaatgtctggcacttgagattctgcttttactgcgagagggtcacatctgttggcctctgttgttgctgtttaaaaaatatataataaaaataaaaatctgtgcaataatttataaatgtgctcccaggaatagacacaaaagttttgagtatgcctaaactgcatttccttcagcaatgcatttgtcagttgcactgaatctaaccctgatagtcagaggtgattgctgatagtgcttttgtattttgatatggactttattcatttgcatacagtcattggcattcttcccagctgattcaaagacagtcacaaacctgtaatacagctgccatagtaacagctgactttttatgatattgtcttgcttcctgttgggtatgtttgttggtttgatttctttttttcttttccttaattctttggtctatttactttagtcacttagttgtgatagaatgtctaacagagcatgagtgcagacctttgctgttccaaagcctcaggtcttcctgtgcaggcttgtctgaaggtgtccatctttaagctggttcttcatgagcgtaggactgtgtggtttgctgctgttctcactgtcaccgtagcctgctgacgtgccacaatgctgctccacagacactgcaccgtgtctccgccagagcagtcaggtgatcacgggagaccatgtttcacagcttatgaagttctgtcttggggttcttattttccctcttgtctttttctgagagcttactctgaagattcatggagtccagttgtctttctatggtgttcatttagatcattgttttatactcttctgtaagtttccatgatcaggtaatattattcactttcaaatgtctttaggagtggtaagtggaataatagatcttagagtatagcaaattctgttttcatgagttatcctctaggtgagtatgttttaggattaaacatcttttacagatactgaaagtgcctccttttgtggtataaaaaaaaaacaaattatggtgcaaaaagtaatcaatagattgaatcacatgaaggttttttgctttttgacataaaaatgtcaagagacaggccaaagatttgtacttttcacttataaagcactccttttttccttaagattatttctgtcaaatcagatttaatgagagagtactatttttaaggagctatctgtttatgtagaatgattttgtttaaaaagagtaatgtagactatgaatgaggagcagaggcccatggaggactgggcattctgctggtgaaaggaatcacagatgaccaggcttctgcaagcagacatgaccagtttgaccagacgcataggaaaaccatctcagacagagctgtcttgctcttttaaagaccatttatgtttttgtaagtgcattgcacgtttccacaaaagctggattcccacgagttaagagtggtactggcacagttgctgcagaaatcctgcctccgtggaccaacatcgtggcacaccagcaaaagccagcatttgggggctagcagccagcctacagagaccctgggggtggttttctgtttgtttttgattccctccttttgtttgaaaagcagttctgaggtgtccatagcattctttatttttgcccttctgtgaccatgttggagctgggtgaataattaggcttctttttattttaaaacaactagcaggcagtttcatgttttctttggaatttctggataagttggaggaaacattttgcatgctttgtctggtttactttttcatctcattacagacttcattgtgtatctctgtcatccttaaatacagaagtggttttctctcccgactttgacattgtcactatgtagactgttttcatttgggtttggcaaatcctttgggtctaattctgtgagcataccttaccactgggtgatgatgtctgcatcctttctttagttccccagtaaccttaaagctgttgtaaagtgtaaaccagcccatgacagtttttgtacatgttaaagaactttattgttcagttttcatgatgattgtgtaaggaagactgatacagatgtctgtctctcctggaccatgtcaatgacacttactatgtattttggttccacatcatggtgatttgtccccaatgaccctttgaccctttccaggcacattttttatgtgtgtgtgtgttgttgttgcagttttccctttgcattgtattgctttgacaactgtaatttgaatcagatctgaaagaggtccagaataaagtatattttgatattatgttggctgtgtacatatataaaacctttgatacctaggtggtttgtacagactgtttagtcatgggaagagagggatggcatttgtttacaatttcctgtttacatcttgattgcttttatctcccactgttcagtgtacaataaatgattttgctccaagagtcttccctactacaacctatctgtcctcactcttactatctccagtgaatataactgccatgggaatcactgttttcataaacattgtttccaagatgtatactttaaagaagcccatagatgaaattaaagtttttgctattttattacttcttgcaggggataagattttttaaaatgaagggattattttctatatttgttaaataatagcatgtaatcagctaaaggataatgatgactcctgagtgattttgaaaaaattgatagtttatttagaggatttctcacatgagctaagacttcagattcactgttagctttgcatgcagtgacacaagacacaccaagtatgggactgaaaggctttca

SEQ ID NO: 70 - DNA, 3986 bp, Cricetulus griseus
cacaatatatgcattttctcactggacagcccgatgccacttttatattttaaagggtcacaaagatactgtttgtagtctttcgtctggaaaatttgggacattacttagtggctcatgggacaccactgctaaagtctggctgaatgacaaatgcatgatgacattacagggtcatacagctgcagtatgggcagtaaagattctaccggaacagggcttgatgttaactggatcagcagacaagactattaaaactgtggaaagctggaaggtgtgagaggactttttcagggcatgaagactgtgtcagaggtttggcaattttgagtgaaacagaatttctttcatgtgcaaatgatgccagtattagaaggtggcaaattactggcgagtgtcttgaagtatactatggacatacaaattatatttatagcatatctgtctttccaaattgtagagattttgtgacaacagcagaagacagatctctgagaatatggaaacatggtgaatgtgcccaaacaatccgacttccagctcagtctatatggtgctgctgtgtgctggataatggtgacattgtggttggtgcgagtgatggtatcattagagtgtttacagagtcgcaggatcggacagcaagtgtcgaggaaatcaaggcttttgagagagagctctctcaggcaactatcgattccaaaactggtgacttaggggacattaatgctgagcagcttcctgggagggaacatctgaatgaaccaggtactagagaaggacagactcgtctaatccgagatggagagagagttgaagcctatcagtggagtgttagtgacgggaggtggataaaaattggagatgttgttggctcatctggtgctaatcagcaaacatctggaaaagttttatatgaagggaaagaattttgattatgttttttcaattgatgtcaatgaaggtggaccatcatataaattaccatataatgtcagtgaggatccctggctagctgcatacaacttcttgcagaagaatgatttgaatcccatgtttttggatcaggtggctaaatttattattgataacacaaaaggtcaaacgttgggacttgggaataccagtttttcagacccatttacaggtggtggtcgctatgttccaggaacttcaggaccttccaacacagtgcaggcagcagatcctttcacaggtgctggtcgttacatgccaggttctgcaggtatgggcacctccatggctggagtcgatccatttacaggaagtagtgcctaccgatcagcagcatctaaaacagtgaatatttatttccccaaaaaagaagctcttacctttgaccaagcaaaccctatacaaatattaggaaaactgaaggaacttaatggaactgcaccggaagacaagaagctcactgaagatgacttggtacttcttgaaaagatactgtctctaatttgtaataattcttcagaaaagcccacagcccagcaacttcagattttgtggaaagctatcaactggcctgaagatattgtctttcctgcacttgatattcttcggctgtcaataaaacatcccagtgtgaatgagaatttctgcaatgaaaaagaaggagatcagttcagcagccatcttatccaccttctgaaccctaaaggaaagccagcaaaccagctgcttgctcttaggactttttgcaattgctttgttagtcaggcaggacaaaagctcatgatgtcccagagggaatcactgatgtcacaggcaatagaactgaaatcagggagcaataagaacattcatattgctctggctactttgaccttgaactattctgtttgtttccataaagaccataacattgaagggaaagctcaatgcttgtcagtaattagcacaatcttggaagttgtacaagacctagaagccacttttagactccttgtggctcttgggacacttatcagtgatgattcaaatgctatacaattagccaagtccttaggtgttgactctcaaataaaaaagtatgcctccgtatcagagccagctaaagtaagtgaatgctgtagacttatcttaaatttgctgtaacaatggggaagggaagctgaggattttaaattgattaatggggtttttttttttcacattttacatgactgattgaagatgtttaaaaagaaaagaaaagaaaacaactgtggattaagttcagatcttgtaaagttgtgttgagtagaaacaaattataaataaagtttttgcactgatggttgtgaggttttcctgtgtaatggggtagattttcaagggtatagaaacattaaaaccacaatcaatagcagcacaattacaatgtcatttccttccttaccttaattactcaggagaacacagaagcttttatttatataatctgctatttgtatatgacatcttgttcagtgactattctcttgtacatcagtttctctacttattttcactgttggattctttcagtagcacatttcaaggtcttttaggatttacttgaaaaataattttaagtttgttataagttataaattgaaaacaagatacaataatttcttgagccatttgtaaaatagaaaatatcacctttcatggttcatttttagatgaagaaaaacaaaattggtaaagctgttattacatatcaattcagacaactgaggccttcaatgattgtgggttagatcagactttaaagtcaagaatctgtcgtgtgaaattagtgtttttagcccctagaatggtccagacattatatctattgtcatttaattctcaaatcagctttctttaaaaggtggttattatgcttctgttttcaaaaggaagataatagaataaattataatgggagggacaaaacaaggtaaaggcaagagtactccatgctctctgcacaaagcacttgctgtgatgcagcttccttaatttgcacaattcattatgtctgtgacagtgatgtttcttttttcttattttggtttctttaagacagagttttctctgtagtcctggctgtcctggagctctctgtagaccaagctgggctttgaaccagaaacctgcctgctgcctcctgactgctaggattaaagccacacgctcagctcaatctttttcctttagaagtgtatttatgttggtgtacatgtgtgtgccttttggttttctttgttttgtggtgctagctatcaaacccaggtgcatactggggaaactctacccactggattacattcccagcaacagtacttccattttaattatgggaaaaatgttatttttacaaggactttgctttaaaatttcgagcaatgttttcaacactgacagtatggataaccatgaggtttcctgacttaatgtcatacagcagtctaagaaggacaaattttttccagtaagtggaagaagattctgaatgtttagattaatacaggaagaacttgtaaaatatcataagggagtgaggaaatgtaaatagaggatatataccttactaagtattaaattgggatttcctgtgtgtacctgagaactttaaacttttatgttgctggttcatttatgttactcgtgctttacttttgttgaattgggatttaaattgttacatcaaaattaagtggtaaaaacatcatcctggttctattgcaatacactgcttgttaatacatccaatctagcatgcaattttagttacaatttatcttatattttgaaaagctgggtgggtacctttgaaaaacggttggatgtattcttattttagaacatgagttcactcttccaaatgtaagaggtggcatattgtaaatactttatttcatagcactgtccttttttatatcagcttctattatttgtatagttcatcaaaaaagataatctcacttgaaatggctcacaactgcctcgaactc

SEQ ID NO: 71 - DNA, 3985 bp, Cricetulus griseus
cgccccgtttctcccgtccggccgccgccgccactgccgctcagctggtgtcggagccgcgcgtttctccccacgtcgtccccgcagcctatggcccaggccgccttgggtatttctgctcaaggtaaccacatccctctttaaaaattccgccgaaaaagagaagacgctttacccgactctttgggccgttatctcacggcgaactttctgaccgagtatacaactacccagaaggcctaggagaagtgctgtatagagagcagttcgacttcaacgctgagccaccttggaacctagctgatgagtagggggttccatctcctaacttgtccagtttgttgcatattctaaggacccagacagaggcttggtggcccgtctcttgtttttcctggtttatgactttcggctttgtggaatacggctgagatgaaaggatttattgacgatgcaaactactccgttggcctgttggatgaaggaacaaaccttggaaatgttattgataactatgtttatgaacataccctgacaggaaaaaatgcttttttgtgggggacctggggaagatcgtgaagaagcacactcagtggcagagtgtggtggcccagataaagccgttttacacagtgaggtgcaaccccactccggctgtgcttgagatcttggcagctcttgggactgggtttgcttgttccagcaaaagtgaaatggctctagtgcaggaactgggtgtgtctccagaaaacatcatttacacaagtcattgtaaacaagcgtctcagataaagtatgcagcgaaagttgggataaatatcatgacatgtgacaatgaaattgaattaaagaaaattgcaaggaatcatccaaatgccaaggtcttactacacattgcaacagaggagaatattggaggtgaagatggtagcatgaagtttggcactacgctgaagaattgtaggcatcttttggaatgtgccaaggaacttgatgtccaaataattggagttaaatttcacgtttcaagtgcttgcaaagaggatcaagtgtacgtacacgctctctctgatgcccggtgtgtgtttgacatggctggagaatttggctttacaatgaacatgttagacattggtggaggcttcacaggaactgagattcagttggaagaggttaatcatgttatcagtcctctgctggatgtttacttccctgaaggatctggcattcagataatttcagagcctggaagctactatgtgtcttctgcgtttacacttgcagttaatattatcgctaagaaagttgttggaaatgatcagttttcctctggaggaaaaaatgggagtggtgagccagccttcgtatattacatgaatgatggtgtttatggttcttttgcgagtaaactttctgaggacttgaatcccatcccagaggttcacaagaaatacaaggaagatgagcctctgtttacaagcagcctttggggtccatcctgcgatgagctggatcagattgtagagagctgtcttcttcctgagctagatgtaggagactggctgatctttgataacatgggagcagactgcttccaccagccctcagctttcagtgatcctcagaggccggctgtttattacatgatgtcattcaatgattggtatgagatgcaagatgctggagtcactttggatgcagtgatgagaaccttcttctttgccccctcttgcattcagctgagccaagaagacagctttcccactgaggcttaagcaggcattacgcttctttagatctgaagtcgcaggttaagcttgtctggtctacattccagtgtggggaaaaatttcaatcaatctttattctgttaattggaaacaaaattcatggtaatagctatttgggaccagacaaaatcagccttcatctataattcattgggggtaatgggggatttagataatgtatccagatttaaacttaccagtttgacccaccccttaagcgtttaaaataaaatatgcaacaaaatggatgacttagtggagatggaagcccattaattgggttccccatcaaatcgtttacatacaagtacacagtttttataataaggattcctgttaaaaagtcatgtaaagttgatgtctttcacccagatatatcacatgtgagtggaagaccagtgtgacttcattagatatgtttagtgtatttagaatgtgtaaatttgtgctttgaactgtagtttaataaatgtaaaattgcatcatagtatttgttgtatttgacctaatgtaacccttgtatgattgcaataaaactttgtgtagattttactgtttttcaggctaaaactttgggaaaggggctagctagcaaaggtagttttgaagtagttgtgtgtatggtctattttgagggttagttttctttatagcccatttcagtttggtttggctcaatacacttttagttatttaattagtaatttaagtaaaagtgttgggtaagtcattgtgaagttgagatttattatggagctgacgtgcagtaagcatgatgttttaacattttaacaccaaaaaatgttgaccctacataaatcagttgtgatgatgataggtgtttctgtgtagatggggggtgcatagagtactttaggaaatctttgtaaacactaaacactgacaatttggtggggaggggacgagactgcagaggactgcagaaccctaaccttacagaagggctatgtccgtttccagactcccgatgccccttccttcgcacatagttaattgtgagggctttggggtggtgaagcaccacacacttttcttcaattttctcacttgtaatggtatcaaattggaaggttgtttttttattattggtttgaacctagtcctttagtttcttgttatctcccatttgttcagccttgtaaaattctttttcgtactaaagcttgtttgatggggagggaactagcatcactaacctgacgctttggccaggaatttgctttgttcactgctagtgtgttagtcctgggtctcagaatcacagtagtaatgacaacttacaggggtcacttttcctcactctgtgttcacaagtggaatttctgtccccaagaagagacgtgacttcactttggtgccaatggacagaaaattctacctgtgctacataggagtggtttgggatgcacttaaatagctggtttttccacctcaattccaaggtggaaagaaattgatcatgaatctcttaatttcaatctcagccagtaggtgcttaatattttgatttgactattgcccatttgaatgtcatgggttctattaattataaaaagaaccaagaaccccagtccgttgtcatctagttaccctggacttttttccaaggtgtaataaggggttttattcaaaattccaagctaccatatgcattgctgtggtccagagatgccaaaactgtatttaaaaggatggcacaacttgagtccttggcttgactgtacaggcttgagctttgtggcatatcaattttgccatctgcataggagagcggttgtatgtaaaacagcccaaagttgcaaatctcacatgtgaatgataggtaaacttaagagtgtctgtattgtatttgaagactgtttgccataaatctaaagttaaacctatgtatttcaatttggaatgcttaagaatgattaatgtaaaatcttttttatatgatattgtaatctcagttcaaaatttaattgaaaatataaaacccaaatgatttctatatatagtaaattgaactgtaaaggtaacttgtgtgtgattctgaatacacagataaaatgtttttattcctcatgctttactttgatggcttctatcatgaaatagacgtgaaattttatgaattaattttgtgtatattgccacgttctttcagaatctattaaaagtaaagtgat

SEQ ID NO: 72 - DNA, 3984 bp, Cricetulus griseus
acacgatgtacccagggtcctctctcctagctatgaggctacagaaagaccccatgggatccccactgagagaaccaggaccttccaattgccagcagagaggtttcaccagcagcaccctcaggttattgatgtggatgaagtagaggaaacaggaattgtattcagctacaacataggttcccagcagacgtgtgccaacaatagacaccagtgctccgtgcatgcagagtgcagagactatgctactggcttctgctgcaggtgcgtggccaactacacgggcaacggcaggcagtgtgtagcagaaggttccccacagcgggtcaatggcaaggtgaagggaaggatcttcgtggggaacagccaggtgcccgtggtgtttgagaacactgacctacactcctatgtggtgatgaaccatggacgctcttacacagccatcagcaccattcctgaaactgttgggtattctctgcttcccctggcacccattggaggcatcattggatggatgtttgcagtggagcagaatgggttcaagaatgggtttagcatcactgggggcgagttcacccgacaagccgaggtgaccttcttggggcacccgggcaagctggtcctgaagcagcacttcagtggtattgacgaacacggacacctgaccatcaacacagaactagacggccgagtgccacagatcccctatggttcttcagtgcacattgagccctacacagagctgtatcactactccagctcagtgatcacttcctcctccacccgggagtacacggtgactgagcctgatccggacggcactgcaccctcacacacccatgtttaaccagtggcgtcagaccatcaccttccaggagtgtgtccatgatgactccaggccagccctgcccagtacccagcagctctccgtggacagtgtgtttgtcctgtacaaccaggaggaaaggatcttgcgctatgccctcagcaattccatcgggcctgtgagggagggctcccccgatgctcttcagaatccatgctacattggcactcacgggtgtgacagcaatgcagcctgtcgccctggccctggaacacagttcacctgcgaatgctccattggcttccgaggagatgggcagacttgctacgatattgatgaatgttcagagcaaccttccaggtgtggaaaccatgcaatctgcaacaattacccaggagcctaccgctgtgagtgcgtggagggctaccacttttcagacgggggaatatgcgtggctgacgtggaccagcggcccatcaactactgtgaaactggtctccacaactgtgatatcccccagcgggcccagtgcatctatatgggtggctcctcctacacctgctcctgtctgcctggcttctctggggatggcagagcctgccaagatgtggatgaatgccagctcagccgatgtcaccctgatgccttctgctacaacacaccaggatccttcacatgccaatgcaaacctggatatcagggggatggcttccaatgtgttcctggagaggtggggaaaacgcgatgtcaactggagcgagagcacattcttggagcatcaggcgtggcagatgcccaacagcccaggctgctggggatgtatgtaccccagtgtgatgagtatggacactatgaacccacccagtgccaccatggcactggctactgctggtgtgtggacagagatggtcgggaactggagggtacccgtacccagcctgggatgaggcccccatgtctgagtacagtggctccccctattcatcagagacctgtagtacctacagccgtcatccccctacccccagggactcacttactctttgcccagactgggaagattgaacgcctccctctggagggaaacaccatgaagaagacagaagccaaggcctttctccatatccctgcaaaagtcatcattggactggcctttgactgtgtggacaaggtggtttactggacagacatcagtgagccttccattgggagagccagcctacatggtggagagccaaccaccatcattcgacaagatcttggaagccctgaaggcattgcccttgaccatctcggccgcaacatcttctggacagactctcagctagatcggatagaagttgcaagaatggatggcacacagcgaagagtgctgtttgacacgggtttggtgaaccccagaggcattgtgacagactccgtaggagggaacctttattggacagattggaacagagaaaatcccaaaattgaaacttcttacatggatggcaccaaccggaggattctcgcacaggacaacttgggcctgcctaatggcctgacctttgatgcattctcgtctcagctctgctgggtggatgcaggcacccatagagcagaatgcctgaatccggctcagcccagcagtcgcaaggttctcgaagggctccagtatcctttcgctgtgacgagttatgggaagaatttgtactacacagattggaagacgaattcagtgattgccatggacctcgctatatccaaagagatggatgccttccaccccacaagcagacccggctatatggcatcaccattgccctgtcccaatgccctcaaggccacaactactgctcagtgaataatggtggctgtacccacctctgcttgcccactccagggagcagaacctgccgatgtcctgacaacaccctgggagttgactgcattgaacggaaatgatgaaaagaatgccttgctccctctccaagtatttcacagcaacactctacttgaaatgacttgatctagaccatgtgatcaaagcccaattgtatcctaggaattcacggtatttggtggatggtaataagcagctcctcccagattataaaatcctggtgtttcagcggtggccatttatagtcaagtgggcaagtcaaagaaatgtcctgtgagaggaatgtcaagatgtagagtgaggttaggggattattattttgatgtgtcttgaattgtagcaaattcttcctctttgccaaagtacctgtatttacatctagtctacgatggcatgtgagtctttagccccactgctggtactggtttccaagtattcttattggctagtcatctaagggcccaggctagggtagggcttgagcaaagtagtggcccatcatagtcccttaattttagaattgtatctttgtttcctcctctctctatgtttttttctggctagatgttcatctgaagacccaacctgggaagatctaactgggtatttctactagtggttcagacccttaattgctaactggtatagttcaagggatgttgctgccttccaagtatctgtctgtcatttgtgtcaaaaatgtcctctgaccatttgcataagtgggaatatggacggagaacaggaatggaaaactgaagaggaaattgtgggggaagggtttaaaggcagctaaaactaaaacccttaaataacttcggagaaaaatggcacattttgcaaaagaatgctagtccttgaagacatagaagaccttgcctgatgcttctcttggggaacagagccccctatctcttttccttctagcttcatcatactcagcctccaatcccatctcctcttacctccatctcaacctgcttacattggactgggaacctgaattgggagggagtctttacttaaacaatcagaatttatatcacaagatttaggggtcatgtgaatcttctgtgcagcctcataaggaggcctcagttgttttttagtcatataacttttaattcattttactaggttccttctaaaatgttttacatgataaaattcttcaactgtggaaaccactgaaggtgcttattaatggttctccagatgtacacaagtattggatgactccttgagtttacaactgtacaaatattagtacagaaaa

SEQ ID NO: 73 - DNA, 3972 bp, Cricetulus griseus
  modified_base (3965)..(3965): a, c, t, g, unknown or other
ggcaggtgcccgacatggcgagtgctgtgctgccgagcggatcccagtgtgcggcggcagcggctgtggcggcggcggcagcgcctcccgggctccggctccggcttctgctgttgctcctctcggctgcggcagtgatccccacaggtaatggacagaatctgtttactaaagacgtgacagtgatcgagggagaagtcgcaaccatcagctgccaagtcaataagagtgacgactccgtgattcaactactgaatcccaacaggcagaccatttacttcaaggacttcaggcctttgaaggacagcaggtttcagctgctgaatttttctagcagtgaactcaaagtgtcactgacaaacgtctcaatttcggatgaagggagatacttctgccaactctacactgaccccccacaggagagttacaccaccatcacagtcctggtccctccacgtaacttgatgatcgatatccagaaagacacagcagttgaaggggaagagattgaagtcaactgcactgccatggccagcaagccggccaccaccatcagatggttcaaagggaacaaggaactcaaaggcaaatcggaggtggaagagtggtcggacatgtacactgtgaccagtcaactgatgctgaaggtgcacaaggaagatgatggggtcccagtgatctgtcaggtggagcaccctgcagtcactggaaacctgcagacccagcggtatctagaagtgcagtataagccgcaagtgcatatccagatgacttaccctctacaaggcctaacccgggaaggagatgcgcttgagttaacatgtgaagccatcgggaagccccagcctgtgatggtaacttgggtgagagttgatgatgaaatgcctcaacacgccgtactatccgggccaaacctgttcatcaataacctgaacaaaacagataacggtacttaccgttgtgaggcttctaacatagtggggaaagctcattcggactatatgctgtatgtatacgattcccgagcaggtgaagagggcaccattggggcagtggaccatgcagtgattggcggcgtcgtagctgtggtcgtgtttgccatgctttgcttgctcatcattctgggccgctattttgccagacataaaggtacatacttcactcatgaagccaaaggagccgatgacgcagcagacgcagacacagctataatcaatgcagaaggaggacagaacaactccgaagaaaagaaagagtacttcatctagatcagcctttttgttccaatgaggtgtccaactggccctgtttagatgataaaagagacagtgatactggaacttgcgagacgctcgtgtgttttttttttgtgtttttatgagtgggtgggaagatgagaggctggggaaggcttgggatttgctatgtaaaaacaaaagaaaaaatgttctttgaaaagtacgctctgctgtttgacacctctttttatctggttttaatttgatttgggttttggttttggttttggttttgtttttttttaattttatttcttacctaagttcaaacttgggttttgttttttttgtgtttgacggtgactactttctgttccaaattcagttgcattaaaggaaaaccagcacagttttagattttcatagttcagaatttagtgtctccatgatgcattcttctctgttgtcgtaaagatttgggtgaaaaaaaaagaaaaaaaaaaaaaaaaaaaagaaaaaaaaaagaaaaacaaatgaaaactctttgctgctgcccatgtttcaatacttagagcagcgaagactagaaaagtagactgtgactctgaaactgttgtttgctgtggatcttcattactgtacagggttatctgcaagtgaggtgtgtcgcaatgagattgaatctgtctttaattctgtatctgtaggcggctcagtatagattaccccacgctgtgcagaaaggtttggggtggaaagtctcctccttcctcgttgccctaaacagacccaacaggtgaggtctgtccattttatgtcagtggacgaatttgagttgccacaggagaggaagcagggaggggctaagcagtcctgctctggttgtttctactccaaacaactccatccacctttcccaattggccttactgctcactagtgtgcaggagagagagcaagtccgtgcgttgtgtgaatgaggttttgtttgggggtttgtttttgtttttgtttttgtttttgttttgtgcttacttaggagggcagtaggatgtggcctgcatgtactgtatattacagacactgtcctgctgggactcctgtcctgctgggatttccaactccaatcctaagcagctctcattccttcagatttggcttgacaaaggcaggaggtacaaaagaaaggcctgtattgttctcgaaaggtcagagccgaggtgcaaacacagcatggagagattttcagttacttaatcaaaactcagatgtgtttttatctttctacctttcatacactagccttggcctctttcctcagccttaagaaccatctgccaaaaattcctcatctcgcatgatggcagccatagcgcatagctactaaaataagttaccttgaacatatcttagactggagcctgggggaagatagaggagtcaagttaccatttgcattctttaaagctaagtgggggtttgtcactaaagtgttgaggaaatccagaaggactaaaacctaagctcttaccctatgtgttggtaggctccagactccaaaaaacagtccctatggaaaggtggcatcagaaaatatagatctatctatatatataaatatataaatatatattatataacattttcagtcagtacttttggattttgcaaggtgcatttttactattgttacattatgtggaaaacttacgctgatttatttaaggggaaaaagtgtcgactctgttatttgaaagcgtatttctttttcttgtctttattttcacttctgatagaaccattgcaatatgggggccttttgggaacggactggtatgtaaaggaaaattcattatcgagcagtgttttgttgacccctctcctgtccctaggcacttaaccaagacaaaaagccacaaggaacatccctttttcaagaattttataatgtgcatctattccgagcccttagcacccatcctgaacatagtgtgaccatatcaaagggtgagaaccagttagcatgtcgttgaaaggatttttcagctgttctttttagaaaaaaaaatatacaaaaaatataaaaaaaaacaaaaaacaaacaaacaaaaaaaaactaccattgttcacagaattggcatctcattttcgggaccgcccatctttctgttttgacaagtgtacagtagtgcagtgttctgatgtaactttatggcttacaatgttgacatgtctcaggttcctgtgttttgattggtgtttttccgtctcaggtagattgcaaagtgtaggccccacacattggaaaaaaataataattataaataataataattataatgataataagacaaagcaaaaacaggaaattacggattttagttgtatattggtttatgtatttttcttaagtatacagtgcactgtttgaaatgtattgttgagtattactttgtacaggttgatcacttttagagtgaagaaagaacaaacttgtgttttttttgtgtttttttaaaggaatataaaataatgaaggatgtataattgatgccaaataagcttgttctttagtcacaacaacgtcttgtttttccctctaggccagttctgtttctaaggtgtacaaggaccatgttacagtgtaagaaactccacatccgtgtgttcccattcgcattttgtatcggttcatgtataccatttttacaaaaaaaaaaaaaaaanaaaaaag

SEQ ID NO: 74 - DNA, 3956 bp, Cricetulus griseus
aagaattacatgcagaggccctctacggagcagctttgaacacccttcataagggaccaaccgaatgaaaggcaggttcgaatccagctgaaggatcatatagatcggaccagaaagaagagaggggagaaagatgaaaccgagtatgagtacagtgggagtgaggaggaagaggaggaagtgcctgaacaggaaggagagccaagttccatcgtcaatgtgcctggagagtcaactctgcgacgggatttcctaagactgcagcaggagaacaaggaacgttggctctgcggaggcagcagcttctgcaggagcaacagctccgggagcaggaggagtataagaggcagctgttggcggagaggcagaaacggattgaacagcagaaagaacagaggaggcggctggaagagcaggagcaagccaagctatcatgctccagagcccaagcctcacttcgaccctgctgacagagctcgggaggtacagtggtcccacctggcatctctcaagaacaatgtttcccctgtctcgagatcccattccttcagtgacccttctcctcccaaattcgcacaccaccatcttcgttctcttcaggaacccatgtccaccttcccgcagtgaggtgctcagtcaaagctctgacttctaagtcagaggtacctgaccccacccaaaaggcttggtctagatcagacagtgacgaggtgcctccaagggttcctgtgagaacaacatctcgttcacctgtcttatcccgtcgggactccccactgcagggcagtggacagcaaaatagccaagcaggacagagaaactccaccaccagtattgagccccgactcctgtgggagagagtggaaaaactggtccccaggccaggcagtggcagctcctcagggtccagcaactcaggatcccagcctggttcccatcctgggtctcagagcggctccggtgaacgcttcagagtgagatcatcttctaagtctgaaggctctccatctcagcgccttgaaaatgtagccaaaaagcctgaagataaaaaagaagtatttcgacctctcaagcctgctggtgaagtggacttgactgcattggccaaagagcttcgagcagtggaagatgtacggccacctcacaaagtgacggactactcctcttccagtgaggagtctgggaccactgatgaggaggaagaggatgtggagcaggagggggctgatgattccacctcaggaccagaggacaccagagcagcgtcatctctgaatctaagcaatggtgaaacagaatctgtgaaaactatgattgttcatgatgatgtcgaaagtgagccagccatgaccccatccaaggagggcaccctgatcgtccgtcagactcaatccgctagtagcacactccagaaacacaaatcttcctcctcctttacaccttttatagaccccaggttactacagatttctccatctagtggaacaacagttacttctgtggtgggattttcctgtgacggaatgagaccagaagccataaggcaagatcctactcggaaaggctcagtggtcaatgtgaaccccaccaacactaggccacagagcgatacccctgagattcgtaaatacaagaagaggtttaactcggagatactatgcgctgccttgtggggagtgaatttgctagtcggcacagagagcggtctgatgctcttggacagaagtggccaagggaaagtgtatcctctgatcaaccgaagacggttccagcaaatggatgttctcgagggcttaaatgtcctggtgacaatatctggaaaaaaggataagttacgtgtctactatttatcctggttaagaaataaaattctacataatgatccagaagttgagaagaagcaagggtggaccactgtgggcgatttggaaggatgtgtacactataaagttgtaaaatatgaaagaataaaatttctggtaattgctttgaagagttctgtggaagtctatgcgtgggcaccgaagccatatcacaaatttatggcctttaagtcctttggagaactggtacataagccattactggtggatctcactgttgaggaaggccagaggttgaaagtgatctatggatcctgtgctggattccatgctgttgatgtggattcaggctcagtctatgacatttatctaccaacacacattcagtgtagcatcaaaccccatgcaatcattattctccccaacacggatggaatggagcttctggtgtgctatgaagatgagggggtttatgtaaacacgtatggaaggatcaccaaggatgtggttctgcagtggggagagatgccgacatctgtagcatatatccgatcgaatcagacaatgggctggggagagaaggcgatagaaatacgatctgtggaaactggtcacttggatggcgtatttatgcacaaaagggctcaaagactaaaattcttatgtgaacgaaatgacaaggtgttctttgcctccgttcggtctggtggcagcagtcaggtttatttcatgaccttaggcaggacttctcttctgagctggtagaggcaatgtgagctgggatcactgacccccggagtcgtcacgaccctgagaacttggaattccttgcaactggagctcagagctgcaccggtgcagccaggacagctgtatatgcaggcctcttgcgcctctcccctccttccttacactttttgtccagtttattcccattctctccttttccttactcaaaataaatgaaggctgcattgcagctggtgctgtttagactcctggcctgtgggtgtctgaaggttgtgatgagcacaccatcagatgttggcagtgggcacaaggaggtgaaaaatggcgtaagaagcagcttgctgaagcagagaacagatttaatatagtaacattaacaatgtatttaattgacatttcttttttttgtaatgtgacaatatgtggacaaagaagaaggtgcaggtttaagaagttaatatttataaaatgtgaaagacacagttactaggataactttttgtgggtggggcttaggatgggtggggtgggatatggggtcccattttgtttctttgaaattttttggaggggttgtcctggccaagaactcagtcattttttctgtgtaccaagttttgcctaaattgtgcagatggttctaaaaaaagaaagagaaaggaaaagaaaatgtgtgtgtcttatttgatggccagaactttgttgtgtgacagtattagcactgcctctgctaaaggtttaatttctgtttaagcctgtcaactttcctgtgggtattttgttgttgttttgttttttgcctacctcattgtttttaatgcattgagaggtgatttaccttttggatttggcagaaaacattaatgtttaatttaacctcaataccaaaagcatcctattaaagtttgactgactttgtcacaagtctaatcaggtacaagaaaaggactagcctcatggctggtgctgtctgctttcaggaagcagaacactgttttcaccaggttcacaattagtggttgttgggcagccttcaccagttgtgaacacatgagatgtcattgttctcaattgggatttggtagcaggcaggtgggcacatttgagtagtcacacaaactgttcattgtttcaggaaccttttcttgggggtgagggtatgtcccttttctaaaaaatgcaatgcactaaaactattttaagaatgtagttaattctacttattcataaagatggcatctccctgtgttttaggtgtaatattgaagccctggcttttcttgttttctcacttgctctcttgttctttttttttaaaactaatttttctttatgaatatgtctgtgacatttgtaataaatgtcttgtaataatttgcttca

SEQ ID NO: 75 - DNA, 3948 bp, Cricetulus griseus
aaaaaggagaggaaatcggagctaaatgacaggatgcaggcgacttgagacacaaaaagagacgcgcttctcgcggattcgggcattgcttcgccgctagccttccccgccaagacccgctgaggattttatggctcttaggcggacttaagagcgtttcggattgttaagattccggtttgctgggctttcgtccgcgcaatcgtgttctcccgcagctgccttgggactggctcgacgaaggaggatggagagggggctgccgttgctgtgcgctgcgctcgcccttgccctcgccctggccagcgctttccgcagcgaaaaatgtggcgggactataaaaaattgaaaacccggggtaccttacatctcccggttacccacattcttatcacccaagtgagaagtgtgaatggttgatccaagctccagaaccctaccagagaatcatgatcaacttcaacccgcacttcgatttggaggacagagactgcaagtatgactacgtggaggtgatcgaaccaactggtctgtagagcgctcccgcctaaactaccctgaaaatgggtggactcccggacaggactcctatcgggagtggatccaggtggatttgggcctcctgcgattcgtcactgctgttgggacacaaggtgccatttccaaggaaaccaagaagaaatattacgtcaagacttacagagtagatatcagctccaatggagaggactggatcaccctgaaagagggaaataaagccattatctttcagggaaacaccaaccccacagatgttgtcttaggagtgttccccaaaccattaataactcggtttgtccggatcaaacctgcatcctgggaaactggtatatctatgagatttgaagtttatggctgtaagataacagattacccctgctctggaatgctgggcatggtgtctggacttatctcagactcccagattacagcatccaaccaaggagacagaaactggatgccagaaaacatccgcctggtgaccagtcgctctggctgggcactgccaccctcacccccacccatacgtcaacgagtggctccaagtggacttgggggatgagaagatagtgaggggtgtcatcattcagggtgggaagcaccgagaaaacaaggtgttcatgaagaagttcaagatcgcctatagtaacaatggctccgactggaaaatgatcatggatgacagcaagcacaaggctaagactttcgaaggcaacaacaactatgacactcctgagctccggaccttttcacctctctccacacggttcgtcaggatcttccctgaaagagccacccatagtggacttgggctgaggatggagctcctgggctgtgaagtggaagcacctaccgctggaccaaccacacccaatgggaacccagtggacgagtgtgacgatgaccaggccaactgccacagtggcacaggtgatgacttccagctcacaggaggtaccactgtcctggccacagagaagccaaccattatcgacagcaccatccaatcagcttctggtatcacatgtccggctctcatgtcggtacactgagggtcaaacttcgttaccaaaagccagaggaatatgatcagctggtctggatggtggttggtcaccaaggagatcactggaaagaaggacgtgtcttgctacacaaatctctgaaactatatcaggtgatttttgaaggtgaaattgggaaaggaaaccttggtgggatcgctgtggatgacatcagtattaacaaccacatttctcaggaggattgtgcaaaaccaacagacctagataaaagaacacagaaattaaaattgtgtgactgacttcatggttcatcctctctttccccttttcctctctctccttaccctgtgatggattcttctcggaaactgcaaaatccaagatgctggcaccaggcattgttcagtgggcccttttgatggacatgtgatctggtagaaagaattagactattttgtctgcaaagtactgtggcctcagtacccatatagcgtgtcagctctgtttaccaagcaataccgacagattttcttgatgttttacagtgttgtaccgaatctcgtgtttgtgacctccattcagaataccataccatgcagccaccaaactgctggcacccgggtgtcccgctgatgaccaccacaaaagtcttcggcactggctagtcttcgtcctctcaagtgcctttttgtttgtactgattccttgtgtcccgtggatgacccactctgtttctggtgaaaacccttctcttcaatcagacctggtggcccactgactaagaagaaagtatattttagtgtgctacgccgaccccgggaaggcaagggctctgaagacctggcaatgtggcttaattgttctgcttttttctgaagttcagtgtcatgtctcttgaccctttgtataaagctgcaatgttctctctcattgttctttcctatggaatgtattttcagatgtaaactcttggctctttctctcttccctccgtcctttttttcctctttagaatcgaagcatttgccactgtccagaatgaaccttgcagctttaacctgctggcgatggcgaacaattttactagactttatgttttaagataattaaataaggggaaattcctaactttgtcctccaaagtctgactttgggtttcttgttaactggttaaagtgacagtatcttttttccttaagccatgtgtccatccattatgattagatcgatgtttaatatgaatgttttcgtctaacagaagtcataagatgaaagaaaaaaaatgccaactggctttcagatgagacccacaggaaacactgaataaaattcccaagtctaaaaggacgtgaaaattttacatccaaatatacaaaatgacccctgaaaaccttcctgttttgctattgggtcagaggaggggagggaaaagaacagctcattaaagaaataaacaataaacctgttgcctgaggcaaaactattttaagacccagcagaaaaggtacataaaatcaaaacaaatgtttagagcaagccattcagcagaaaccctgaaaaaataaattttaatgagtgcttctagaaacttccagtggctcatgaagagaaaaggcctaccttagggctggtaaggcgtaaccctcaacagcacaaaaaggtagatatcttaacccaaagcagtttccagctggtggagtctgtcttgcggagctgtacataagaactcccgactcttctccttccccatgtggctataggtctcagttatatttcctggagatcacgtctgcttcctggatgaatggttcattcaccttggtttaatgggattgagaatgtcttttttccaggaaagtattgatcacaaaaaaaaagactatgtttttattcccaggggcatctattcacttgttacaatcatactgggaggaaagcattaagtgagagtttgtttctaaggcaacagacttaacccgtgtcctcagccaaggaaaaaatgatactgcaactttaaattttaaagtaccttgcactgataaatatatttaaaagttatatgtttataaagttattaatttgtaaaggcagtgttacaaaatgttcagtttatattgttttagattgtttcgtaatttttaaaggtgtaaaataacatatttttctttattgaaatctataagaatttctgtagtaagatgtctcattttctggtatattattgcttcatgttttgtaccctcataaaattttgtgcaaattttttttacagaaatttttattttctatgatgatatgtatgacacttgtaaattgttgtttcaaaatgaacagcgaagccttaacttgaaatgacatttgtattctctgagtagcataaaaa

SEQ ID NO: 76 - DNA, 3941 bp, Cricetulus griseus
ggcggggtggacctcgccctgttagcagcagcattgaccccagtctcctcagcaccaagcagggaggccttacaccctccagactgaaggaaccttccaaggttgccagtggtcgtaccactccggctcctgtcaatcagacagatcgggaaaaggaaaggccaaagccaaaggctgtggccttggactcagacaacatctccttgaagagcattggctctccagaaagcactcctaagaaccaagcaagccacctccagccaccaagttagcagagctgccaccaacccctctcagggccacagctaaaagctttgtcaagccacccagtcggccacctcctagtctgacgactgccatccccctccactcaagtcctccacctccatcctctgtgggcactgaggtcaccgaggccctgctcattcggtcccccacactagactgttccaagccagtgaggaggaggagccagagaagaaggaggtatcggagctgcgctctgaactctgggagaaagaaatgaagcttacggatatccggttggaggccctgaactctgcccaccagctagaccagcttcgagagaccatgcacaatatgcagctggaggtggacctcctgaaagcggagaatgaccgactgaaggttgcccccggcccctcctcaggctccactccggggcaggtccctggatcctctgctctgtcctcccctcgacgttccctgggcctcgctctcagccaccccttcagtcccagtcttgcagatacagatctgtcacccatggatggcatcagcacctgtggtccgaaggaagaggtgaccctgcgggtggtggtgcgaatgccgccccagcacatcatcaaaggggacttaaagcagcaggagttcttcttgggatgcagcaaggtcagtggcaaggtggactggaagatgctggatgaagctgttttccaggtgttcaaggactatatttctaaaatggacccagcttccaccctgggactaagcaccgagtccatacatggctatagcctcagccatgtgaaacgagtgttggatgctgagcctccagagatgccgccttgccgccgaggcgtcaataacatctcagtctccctcaagggtctgaaggagaagtgtgtcgacagcctggtgttcgagacgctcatccccaagcccatgatgcagcactacataagcctcctgctcaagcaccggcgcctcgtgctctccggccccagcggcactggcaagacctacttgaccaatcggctggccgagtatttggtggagcgctcgggccgggaggtcaccgatggcatcgtcagcactttcaacatgcaccagcagtcttgcaaggatctgcaactgtacctctccaacctggccaaccagatagaccgggaaacaggaattggggatgtgcccttggtgatcctattggatgacttgagtgaagcaggctccatcagtgagctggttaatgggggctgaccttctctaacaacgtggagccagccaatggctttctggtccgttacctgcggaggaagttggtagagtcagacagtgacatcaatgctaacaaggaagagctgcttcgggtgctggactgggtgccaaagctgtggtatcacctccacaccttcctagagaagcacagcacctccgacttcctcattggcccttgcttctttctgtcctgccccattggcattgaggacttccggacctggttcattgacctgtggaacaattctatcattccctatctacaagaaggagccaaggatgggatcaaggtacatggacagaaagctgcgtgggaagatccagtggagtgggtccgggacactcttccctggccgtcagcccaacaagaccaatcaaagctatgccacttgcccccgccctctgtgggtcctcacagcattgcctcacctccagaggacaggacagtcaaagacagcaccccaagctccctggactcagaccctctgatggccatgctgctgaaacttcaagaggctgccaactatattgagtcaccagaccgagagactatcctggaccccaacctccaggccacactctgagggcccagcagtcactgtcaccctggacagcagaaggctggcttcagcttcattagtctcctctcccctcttcttttggagctctggctcaccggcctcaccaggaagaagaggaactgcagcagttgctagctggttctcacaaacacttctgagatagtcgccctacagggaaatctaggggaggcaggaaactccacagattttcttgcaaacccttcctaattctatcaccactgccaacagccatccccccagagatctggctagagcccagaaaagagaagcaatgtggtttaacaaaaaaaaaaaacaaaacaaaacaaacaaaaaaatgtagtaaatcaacctataagaagtcaaaaggcgatggaaaagatgaagctggagagagggacccagttgccaagatggaaagagagctgctggatcttgccttctgggtgacaataggggacattgacaagatgacttgcaatctaagatgtcaccaaatacaaaaataacatccaaaagcttctatattcacctcggtaggtcccacgggatggcagggtcctctattctggagactattattgctgttgctgctaattccgtgagctgtgaagatccctaaccaactcagctgcaaaatatgcaattctgtattgggaagaggctgtttgtccaaggatggtgctgaaatcactgccttaaggtctctgctgtgcagaatgagaaggccccagagctgggtgttccaacttagaaggaaggggagactggataggcctactttggacataggtctcttctgaaccctagccaaagctccagtgccatggcaaggctcagactttcgctgacatcctcatgcttgagcccttcattctcttttctggtgctgctcagccagtgccttctgaaatggatgttactggctactttaaaaagaagggaagtaggaaatgccttcttccattccagctgcctcagactgcagagggattgtctctgtgataaccatggaaaccatcgtgaattttatttgggtctgcagcaagttgactctggaggcctctcatactataacttcgtttctattcctggaatccaccaccaccttctctctcagttgactgctgcatttagttcaggcctccaatggctgttctccaggaagtatgttcccatctagtgaagtgctcttgaagcctctacattccttctggagactgggaccctgtttacagttgcacatctgggcccctcacagtaggatcaaccatctcataaaaaagggatcatggttctgtggcagttgcggaaggttgagcctcctcatggtgctaataaccccttgggatgctcatccagacttctaagaagcaaaaaagcctgagcacccgctcactgcccaagaattcctggcaaaagagcaaacccacagcattctttccaacctacacacttgcttcttggttgagactaaaaacaaaaacaaaacaaaccaaaaaccaaaaaaaaaaaaaaaaaaaaaaaaaaaagcaaaataaattctctaaaaaaaacaaaacatgttttttcagaaagatcttcatatatttccaaacccataaactagctgttatagccctggaagaattgaggctgtttagaagtggttttgttcaaatttgtcagttttccccttatgggagcccttttgtgtagagcattaaaaatcactggtaccaggtctcctgagctcagggactaacttggaaggaaggactaaagcccaaggaaaacaagtgtaaaacaattgcactaaagtcacccctaaccatccagccagctcctgtcgtatcatcctgc

SEQ ID NO: 77 - DNA, 3940 bp, Cricetulus griseus
gggatgttgttcctcttacagcatgccgcatctacaagtgcttgtttactggctccgtgagctcactactgacactgccactagacatgctgtcaacggaaaatttgttggcggattgcttgcagggctgttttgtggtgacatgcacactttgtgcattcatcagcctggtgtggttacgagagcagatagtccatggaggggcaccaatatggctcgagcatgctgctccacccttcaatgctgctggacaccaccaaaatgaggctcctgtaggaggaaatggtgcagaaaacgctgctgctgatcaaccagctcacccagcgggtgagaacgcagtgctgggtgagaaccctgatgcccaggatggtcaagcagaagaggaggaggaggacaatgaggaggaagacgatgcaggtgtggaggatgctgctgatgccaacaatgggagcccgtttgaggaacatgtccaagcatctcattttgaaggtctaataacgacgattgttggatatatacttttagcaatcacactgataatttgtcatgccttggcaactcttgttaagttccataggtctcgacgcttgctgggagtctgctatattgtggttaaggtttctttgttagttgtggtagaaattggagtgttccctctcatttgtggctggtggctggatatttgttctctggaaatgtttgatgctactctgaaggatcgagaactgagctttcagtcggctccaggaactaccatgtttctgcactggctggtaggaatggtgtatgtgttctactttgcctccttcatcctgttgctgagagaggtacttcgacctggtgtcttatggtttctaaggaatttgaatgatccagtaatttaatccagtacaggaaatgatccacttgcccatttaagctgctcctactgcaggtcgttcttgccagcattgctagaacaggggcacacgaggcagtggttgaagggcttgtgcgtgcgtggactgttactgctggatatttactggaccttcattcctacttactgggagaccaggaggaaaacgagaacagtgcaaatcagcaggccaacaataaccagcctgctcgaaacaacaatgctgttcctgctggggagggtctgcatgcagcccaccaagccatactccagcagggaggccctgttggctttcagccttaccgtcggcctttcaatttcccactcaggatatttctgctgattgtcttcatgtgcataacattactaattgccagcctcatctgccttactttaccagtatttgctggccgttggttaatgtcattttggacggggaccgccaaaatccatgagctgtacacagctgcttgtggtctgtatgtatgttggctaaccataagggcggtgacggtgctggtagcctggatgccccagggacgcagagtgattttccagaaggtgaaagagtggtccctcatgataatgaagactctgatagttgctgtgctgctggccggggttgtcccactgctcctgggcctcctgtttgagctggtgattgtagctcctctgagggtccctcttgaccagactcccctcttctacccttggcaggactgggcactgggagtgctgcatgccaaaatcatcgcagccataactctgatgggtcctcagtggtggttgaaaactgtcatcgaacaggtttatgcaaatggcattcggaacatcgacctgcattatatcatccgtaagctggcagctccagtgatctccgtgctcttactttccctgtgtgtaccgtatgtcatagcttctggtgtggttcctttattaggtgttactgccgaaatgcagaacttggttcaccggcggatttacccgtttttactgatggttgttgtattgatggggatactgtccttccaggtccgccagtttaagcgcctttatgagcacattaaaaatgacaagtaccttgtggggcagcgcctggtgaactatgagcgcaaatctggcaagcaaggcccgtccacaccacctccacagtcgtcccaagaataaagtgcttgtctcagctccttgaccttctccttgcctttccgtgtccttctttgtggactctcactctggagattctccagcgcttgtttttaagttaaatgtacttgacttgtgtcctcagcgttcagagggcagcgcatccggctctgctgctcctcactgcatctgccgacatcactgctgtctgagatctgtacatgtgtaaataggagttcctcgatgccctaaaaccttggattaaacagaatgtgcattgtatggacagagtgcctcacaaacagttgtgtttggaagttattccatgtaacaccaaagctgttgtacattttctactgcccgattgtcttcatgtgtccgtgtttgtaatattgtatagtatgttgcgctagatgaggaaattatttttaattttgataatttaatattcctagtggtcagaatcgggagttggggttttctgcttgctaggggcatgtttatacttagaaagatacactagcaatgaaggctttcattagtctcctccctttccatacagctcttcctcctgtcagcaggggccaaagtgtcatgccagctgtgagaaatcttaggggataacatcatgtgttttgtcctgtggctctcagttagatacatcctcataagattttattgtacataacagttgctagggtggcatacagggtttattcaccaataccctaaacaattaaagccctcagttcaggaactgcgtttgtgtttgcttcccgttcttacagtggttttaaagagctctgcatcattttgaattggactaacccagtcttcaaggaagctcactaggacagacctttgtgctttatgacttgtaattggaagacaaatcaccatttgggattagttttatatgaccagttatcagacagacagtttgaaatgtgtagtagttcattactaacaaattacggattgatttttaaactacaaagtactaatagttgagatgaaaactgaagaaaatgccaatgtaaaattcgtgtatggctagccttaaagttatgtgtttatagttgtggtattaaagtatattcttaagtttaggttgaactgatgaatttttaagacaaacactaaagattcatttggacatttctacactgttgtgtctgcagacacaggacctggtgcccttatgcaagaactctggcacttgtcacggtgctactaagtagctccttcctttcctctcccggatggggactttccagctagttacttcgatgcctcgattttacatgtgatgacgctcaaagttcttgtttaaaacaatcctagcatcctaactgttcagtcattatctagggaaaagatgaacgcagagtaccactgaagtgttactgaagacctcatttatgaagggtttctaagctctttgcttaagctgccctgtgtacccaaacacttagtttgccctgtcagtcagatgtttgttttcagcgtatcgctgctgtgtcaaatctttaaacagctgtcatgagtaagggcttctttcaaatactctccaacaatagctctggcattagtataaaggtagacagtgtacatggatatgtgtgtttccattcctgtctgtttgtatgagtgcctcattttgtaatcacgacagtcctgttgtaccttaggtggagatgaacgactaaagtctgggagtgtctgctgtaggagtgaaatagaacactttgtgatgtggacatcagttttctattgccgtaaacacctatacagatcaattttatgtatatatattcaaaaatgctcccttttttatgtggtcatttgttgccttctgagttaagagaacagaattgaataaagtgaatgttagttgta

SEQ ID NO: 78 - DNA, 3935 bp, Cricetulus griseus
cgcgggctccgcaaccgggtctgaggacatgacatcacacctgctgctgtcagcgccacagagtgaggagcccagatagccgccacccgagggtcgcggagcctcactgccacccacctgatgctggcagtggaggtcaccatggatggggacttcccttcgcatgagctcccgccccccggaggtggcgtccagctgcagaatcgactcatgcactgtcccctggtggagcagttttttcaccgggcctcatatcctaccttctccagtgaaaaccaacagttcgttggttccaccccattccttggtggccagtccctgccccgacaccagcctaccccaccacagctactgtctccagcttcttctctaaaggagcagcgactttcctcagggttcagtgcctccaatgacctcaagtatgatgcagaacgggacctgagagacattgaggccccaggcatcgcagtgcacgcactgagcaagatcaagtatggtgacaacactacctcagagggtgtcctctttgccacctactctgccctgattggagaaagccaggcaggtgggcagcaccgcacacgcctccgtcagatcctgcagtggtgcggcgagggctttgatggtgtgattgtgtttgacgagtgccacaaagccaagaatgccagctccaccaagatgggcaaggccgtgctggacctgcagagccagctgccccaggccagggtggtgtatgccagcgccacaggtgcctccgagccccgcaacatgatctacatgagccgcctgggtatctggggtgagggcacacccttccggacctttgaggagttcctgcatgccattgagaagaggtgtacattgcacgccagctcagctttcagggtcacctccgcattgaggagatcccgctgtccccgccttcgagcaggtctataatcgggcggcccgactgtgggccgaagccctgagcttgttccagcaggcagctgactggattggcctggagtctcgaaagtccctgtggggtcagttctggtcagcacaccagcgcttcttcaagtacctgtgcattgcagcaaaggtgcagcggctggtggagctggccaagcaggagctgagccaggacaagtgtgtggtcatcgggctgcagtccacaggggaggcgcgcacccgcgaggtactggacgagaatgagggccgcctggactgctttgtctctgctgcagaaggtgtcttccctgtccctgattcagaagcacttcccttccaccaggaagaggcgtgaccggggaggcgggaagaggaaaaggcgggcctcggggtcgtggcatcaaggctcccagactggcactggaggcatcgggagttatccgaatcagtgacggcagcagcacagactcggatgctggcctggatagtgacttcaattcatccccagagtcgctgctagatgacgatgtggtcatcgtggatgcccccatgctccccacagatgaccgaggtcccctgtacccacttcagagagacctgcagggccctggtgtccttgaacgggtggaacggctgaaacagggcctactggccaaggtgcgcacacttggccgggaactgcctgtgaacacgttggaccagctcatccaccagcttgggggtcccgagtgtgtggctgagatgactggcaggaaaggccgtgtggtatccaggcctgatgggtcagtggtctttgagtccagagcagaacagggcctgtccatcgaccatgtgaacctcagggaaaaacagcgcttcatgagcggcgagaagcttgtagccatcatctctgaggcctccagctcaggagtctccctccaagccgaccgcagggtccagaatcagcgacgccgggtacacatgactctggagctgccttggagcgcagaccgcgccattcagcagtttggccgcacccacaggtccaaccaggtctcagcgcccgagtatgtcttcctcatctcagagctggctggggagcgcaggttcgcttccatcgtggccaagcggctggagagcctgggtgccctgacccatggagatcgccgggccaccgagtcccgagacctgagcaagtacaacttcgagaataagtacggcacccgtgctctcagccgtgtccttagcacgatcctgggccagacggacaacagggtgcctctgccccagggctacccgggaggagatgccgccttcttccgggatatgaaacagggtctgctgtctgtgggcattggcggccgggagtctcgcactggctgcttggatgtggagaaggactgctccatcaccaagttcctgaaccgcatcctggggctggaggtgcacaagcagaacgccctgttccagtatttctccgatactttcgaccacctcattgaaatagacaagaaggaaggcagatatgacatgggcattctggacctggcccctggcatcaacgagatccatgaagaaagccagcaggtgttccttgcacctgggcatccacaggatgggcaggtggtcttctacaagattagcgtggaccgtggtatgaaatgggaagaagcattcaccaggtctctggagctgaaaggtccctatgacggcttctacctctcctacaaggtacgaggcagcaagacgagctgcctcctggcagaacagagccgcggcgagtatttcactgtgtacaagccgaacatcggccgccagagccaactggagaccctggacagcctgtgccgcaagttccaccgggtcactgcggatgaggcccgggagccctgggagagcagctatgccctgtcgctggagcattgtagccacaccacctggaaccagcgctgccgactggcacaggagggcaagggctgcgcccagggcctgcgcctccgccatcactatatgctgtgcggggcgctgctgcgcgtgtggggccgcatcgccgccgtcatggcggatgtcagcagcagcagctacctacagatcgtgcgcctcaagaccaaggacaagaagaagcaagtgggcatcaagatccccgagggctgcgttcaccgcgtactgcaggagctgcagctgatggatgccgaggtgaagcgccgcagcaaccaggggctggcggcgcgcccacccactccacgcgcgatcgcgcttccctgcggtcctggtgaggtgctggacttgacctacagtcccccagccgaggctttcccgccgcctccacgcttcgccttcccttcgctgccgctcccagaccccagctctctgatgctgggtgccagagacccctcaaccacccccgcggagctagcgcaccagggctgtgacatcaatttcagggaagtgttggaggacatgctgcgctccctacgcgcggggcccactgagccccccgcgcctctggtgggcatgggaggcgggggcacagagcggcaaagcgtcatccacttcagcccgcccttcccgaactcgtaggcagccacagtggtccctggattacaactgcccggtgggcagcaaggcccaccggctcctctgccatcagagaggtccccacaactactgagggcacccggcggcagtgccttccccgacaaccagccttgtgtgggtcctgtgtgcctcccccgcgctgctccagccacccatggggtttggtagccccagagagctggtaactcaggaaatcaggtgctgaggccccgctgtctatgggggttccacggggcagaccccgttaatatatgcaatcccctgctccctaaattattgcacccgccccttccctgccccggaatccgtgggtaaccggcgggccctggtttctatgtatttataatgaactctggtgtacatatgtaaaggtcttttttaaaataaaaaaaaaaaaaaaaaaaaaaaaaaaaaaaaaaaaaaaa

SEQ ID NO: 79 - DNA, 3914 bp, Cricetulus griseus
  modified_base (178)..(178): a, c, t, g, unknown or other
  modified_base (194)..(194): a, c, t, g, unknown or other
  modified_base (324)..(324): a, c, t, g, unknown or other
  modified_base (331)..(331): a, c, t, g, unknown or other
  modified_base (3778)..(3778): a, c, t, g, unknown or other
  modified_base (3905)..(3905): a, c, t, g, unknown or other
gactactctgagaatcgcctgctggcctgtggcagcctctaccagggtgtttgcaagctcctgcggctggacgacctcttcatcctggtggaaccatcccacaagaaggagcactacttgtccagtgtcaataagacgggcaccatgtatggcgtgattgtgcgctctgagggggaanacggcaagctttttancggcactgctgtggacggcaagcaggattacttccctaccttgtccagccgcaagctaccccgagatcctgagtcttcagccatgctggactatgagctccacagtgactttgctcctccctcatcaagntcccctntgaccaccctagccctggtctctcactttgacatcttctacatatatggcttgccagtggggtttgtctacttcctcactgtccagccaactgacactatacaccaccagcagggaccgcctaacgtctgtggcctcctatgtgtacaatggctacagtgtggtttgtggactaagagtggcaagctgaagaagacagcgcctttcgctgccattggtgcaagtaccgaaacctctgtacacatgaccccaccacctgttccttccaggaaggcagaatcaatgtttctgaggactgtccccagcttgtgcccacggaggagattctgatccccgttggagaagtaaaaccaatcaccctcaaggcccggaaccttccccagccccagtctggccagcggggctatgagtgtgtgcttaacatccagggggctgtccaccgagtccctgctctgcgcttcaacagttccagtgtgcagtgtcaaaacagctcgtaccagtatgatgggatggacatcagcaacctagcagtggactttgctgtggtgtggaatggcaacttcatcattgacaaccctcaggacctgaaagtacatctctacaagtgtgcagcccagcgggaaagctgtggcctctgcctcaaagctgaccacaagttcgagtgtggctggtgcagtgatgagcacagatgtaccctccaccaacactgccccagcacttctagcccctggcttgactggtccagccacaatgtcaaatgctccaacgccccaaatcacagagtcactgtgtctgagacagcacgtggagaaagctctgaaactcttcgcccagcttatcaacaacaaggtgttcctgctgacgttcatccgcacactggaactgcagcgcagcttctccatgcgggatcgtggcaatgtggcttctctcatcatgaccggccttcagggccgcctggagtatgccacagatgtcctcaagcagctactgtctgatctcattgacaagaacctggagaacaagaaccaccccaaacttcttctccgcaggactgagtctgtggctgagaagatgctgaccaactggtttgctttccttctacacaagttcctgaaggagtgtgccggggaacctctcttcatgctgtactgtgcaatcaagcagcagatggagaaaggacccattgatgctatcactggtgaggcccgctactccctgagtgaggacaaactcatccggcagcagatcgagtacaagaccctgatcctgaactgcgtcaaccctgacaatgagaacagcccagaaatcccagtgaaagttctaaactgtgacaccatcactcaagtcaaggagaagatcctcgatgcagtgtataagaacgttccctattcccagcggccaagggctgtggacatggacctggagtggcgacaaggccggattgccagagtggtgttgcaggatgaagacattactaccaagatagagggtgactggaagcggctgaacacactgatgcattaccaggtgtcagacaggtcagtggtggctctggtacccaagcagacatcctcctacaacatccctgcctcagccagcatctcccggacatccattagcagatatgactcttccttcaggtacacaggcagcccagacagcctccggtccagggtccccatgatcaccccagacctggagagtggtgttaaggtgtggcatctggtgaagaaccatgaccatggtgaccagaaggagggtgaccggggcagcaaaatggtatctgagatctacttgacccggcttctagccaccaagggtaccctgcagaaatttgtggacgacttgtttgagaccttgttcagcactgtgcaccggggtagcgctctccccttagccatcaagtacatgtttgatttcctggatgagcaggcagacagacacagtatccacgacacagatgtgcggcacacctggaaaagcaactgcctccctctgcgtttctgggtgaatgtcatcaagaaccctcagtttgtatttgacatccacaagggcagcatcacagatgcctgcctctccgtggtagcccagaccttcatggactcctgctccacatcagagcaccggctgggcaaggactcaccttccaataagttgctctatgccaaggatatccccagttacaagaactgggtagaaagatactatgcagatattgccaagctcccagccattagtgaccaagatatgaatgcctacctcgcagagcagtcccgcctacatgccacagagttcaatatgctgagtgccctcaacgagatctactcctatgtcagcaagtacagtgaggagctcatcggggcactagagcaggatgagcaggcccggcggcaacgactggcctacaaggtggagcatctcatcaatgccatgtccattgagagctgaaaggaggacctcctgttcctggaagagggacccatacaagctatcacactggtgtctcaaaaggaaggactggacgagagaagggtatcaggccccagagctggctgcccgctgaaacctcaagacgggagagggaaaggctcctctctcaatgccagcgtgtttcgtcacagccagtccctgtcaggagaactgtgaacaccacccatcacagtgtgagctcagaacaccacagacaaaggagaaggtggtagcccttcaagctgagaggcttgaacctgatggttctgcctctgtgactgctgctttgcatgaaactcatttgatgtatattgggaaataatgagaactttattttaattttttaaagtaaaaagggaaaaacaagaaaataaaaacaaaaacaataaattttgtttaaaaagaaaaaaaaagttaaattctgttggcactttctaactagtccagggaatgtcctgagagatgatcaaggcctgtcggacaggcctcaatacaataagcaaactagacattctcctgccttgcacagactcaaaactcactctcctccccataccatctctccagactgagctgcctcctccctgcctctgtgctgcctgcaccatagggccccaatggaggaagtgagaagcttcttctagaactcagtccatgtcatcactttgacattcttggtctccattttggcatccaggcataaggaagtgtggtccccaccaaacaggaccaaagttcctgaatgtatgggagagaaagggacaagctctttatacaggcacatgaggaccctgatcccagatgcctctcctcatcccctcctcctactcaaatccctccccgtgacacactggaatctgtattatatctaattttaagaaagtacaatgctgattgtctgatattgtagtttttacaggtgttaagaaataataataaaatgaagtatttaaaatgttaccaataaagcggggttttntatctaatatattatcatgtacctattgtaaatatgaaactcctatttgcaagccaaggacacaatttgtactgttgttatatataaataaagattactaggaataaaataaaaaaaaaaaaaaaanaaaaaaaaa

SEQ ID NO: 80 - DNA, 3911 bp, Cricetulus griseus
tccatgggtttaatacacagagatgtgaagcctgataacatgctcttggataaacatggacaactaaaactagcagattttggcacatgtatgaaaatggatgaaacaggcatggtgcattgcgatacagcagttggaactcctgattacatatcacctgaggttctgaaatcccaaggtggcgatggttactatgggcgagaatgtgattggtggtctgtaggtgttttcctttttgagatgctagtgggggatactccattttatgcggattcacttgtaggaacctacagcaaaattatggatcataaaaattcactgtgtttccctgaagatacagaaatttctaaacatgctaagaatctcatctgtgccttcttaacagacagggaggtacgacttggaagaaatggggtagaagaaatcaaacagcatcctttctttaagaatgaccagtggaattgggaaaacataagagagacggcagctccagtggtgcctgagctcagcagtgacatagacagcagcaactttgatgacattgaggacgacaaaggagatgtagagaccttcccaattccaaaagcttttgtgggaaatcagctgccttttataggatttacctactttagagagaatttgttcgttccattgctgaggaacaatactctgatttggaaaagagaagatcatgaaagagctagagataaaagagatgatggccagacataaacaagaacttactgaaaaggatgccacaattgcatctctcgaggaaacaaatagaacactaactagtgatgttgcgaatcttgcaaacgagaaagaagaactaaacaacaagctgaaagacactcaagagcaactcttaaagttgaaagatgaagagattagtgcagcagctattaaagctcagtttgagaagcagctgttgaccgagaggacactcaagactcaagctgtgaataagttggcagagatcatgaatcgaaaagaacctgtcaagcgtggtagtgacacagatgttcggagaaaagagaaagagaacagaaaattacatatggagcttaagtctgaacgtgaaaaattgactcaacagatgatcaaataccagaaagaactgaatgaaatgcaggctcaaatagctgaagagagccagattagaattgaactccagatgaccctggacagtaaagacagtgacattgaacagctgcggtcacagctccaggccttgcatattggtatggacagttccagtataggcagtggaccaggggatgttgagcctgatgatggatttccagagtcaagattagaaggatggttgtcgttgcctgtgcgaaacaacactaagaagtttggatgggttaaaaagtatgtgattgtaagcagtaagaagattctcttctatgacagtgaacaagataaagagcagtctaatccttacatggttctggatatagacaagctgtttcatgtccgacctgttacgcagacagatgtataatctaattatatttgccacaaaggacatgagtttatccctacactttatcacttcccaactaactgtgaggcatgtatgaagccattgtggcacatgtttaagccccctcctgctctggaatgccgtcggtgccacattaaaatgtcataaagatcacatggacaagaaggaagagatcatagcaccctgcaaagtttattatgatatatcaacggcaaagaatctattgttattagcaaattcaacagaagaacagcagaaatgggttagcaggttggtgaaaaagataccgaagaagcctccagctccggacccttttgcccgatcatctcctagggcctcaatgaaaatacaacagaaccagtccatccggcggcccagtcgacagcttgctccaaacaaaccaagctaactgccttctatgaaagcagttattcaggtgattgcattcttctagctgcaagactgaaatacgatgtctcaaaacttttgcgagtggatctcactacagtgatgctgtctgcatctttaagaagtgaccatgatgttgtgtttatgtatgtatgtatgtacatatgagttgagcctcatatatatacacacacaccacacaattaaaaaaaacacattgtactgtaatactgcaagaaggtattttaacttaccattttaatttttatacacattaatcagatatcattacttcagttgcaactatgcacttgtataaagccataatgttggaatttatatccttcattcatgtacctgttttaaatgtatttggtcatagaagcaatagcggattatattgaaactaatgtgtgtgatgtacatctgttgtttttttcatccctttttatagacttcagctcatctgtgactacaaaatatttccttttctttgaacttgctggttaccctagatgtgtttttatttatagtaaaggcaatttttcacattttcattcaagattcaaatcaaatataaaaaaatacttaacacatgtactgtagatatattttaaatatttaaaatgtgatcctgaaacaaacagctgtatagtagtatatcagctttgatatctgggaagaggcagcctcagaagcgcttactttgattcttgttgctcaatgctgctgaggttagagaacaggcgggacctatcctgcatcaggctctgtacattggtaaagttcaatatgatactgaaatatttgcctagacatttagacatttgtcattgcttccctccggggtcagtgtagagatgttgtaaaaagtttgattctctttatagattctattgtggaaatagtggcctttggcctactggtatactaaatcccaattctgtgaccttcagatggcccagttgcatctttcattccatctgttaagactagatgtgcatgccatttccctggaagcagctgtgctcttccttccttccttccttccttccttccttccttcctgatttaaaaatgaaaatatataaaatttatatagaagaactatttccattcattagagttgtttaaaaggagactgaattaatattttatataaagattttgttacattatgggaggttctatcctattctgaattggagagtatatatatatatatatttttaataaactttattaaggtgaaatgtcaagtttacacatgaataattgaagtatttgagtaaaaaaggcaaaagttaaaatttggatgctgtgcgtgtatatatgtattagaatttggagaatcatggtgtgattcagcaactgtccatgacacttaatgtgaaggattcaggggaataaaacattctgaggggtgaaaaaaatccatggagcttcttcacatatggtttaacatagggatttattaggtcatttgtccaactaacagaatttgaagtaaaactgctgccctcagtctgttaggattcccagggtgccgtggagaaactcagacactaaccaacctcatagggatgctctgagcggctgaaccccacgtaaaacaaagcttccgagttcgctctcaggccctctgactgctactgactctccttgcctgcctgaaggtggcatcagctcccctggctcgtggaggtgccacgccagcttaaagcactttgacaggcactgtgtgacagtgctgagtgtttgccctgtggcctcgccctgttcccttccctgtggtgatttttatttggaactataataagttataaacggcatgatttaaagagtcatcctagatcacctgtccccctgaacattaaaaaatcataccctcttgattttttgttttgtttcatctttgtagtaatgtaattgtatttttatgcctgctttttgtttaagaaaaataaataaaaagaacctaagatgtaag

SEQ ID NO: 81 - DNA, 3902 bp, Cricetulus griseus
  modified_base (3865)..(3865): a, c, t, g, unknown or other
cccgagaccatccgagaagccgaggccggccgacacccgcccgagaccctccgaaggccgaggccaccgacagccgcccgagacccccccgagaggcggaacgcggcggaacccgggccgcacgcgtgccgggcggacgctgcggaaagatgaatttgcaactggttttctggattggattcatcagcttgatttgttctgtatttggccaaacagataaaaatagatgtttaaaagcaaatgccaaatcttgtggagattgtatacaagcagggccaaattgtgggtggtgtacaaatacgacatttttgcaagaaggaatgcctacttctgcacgttgtgatgatttagaagctttaaaaaagaagggctgccagccaagtgacatagaaaacccaagaggctcccaaactataacgaagaataaaaatgtcaccaaccgcagcaaaggaatggcagagaagctccggccagaggacataactcaaatccaaccacaacagctacttctgaagttgcgatcaggagagccacagaagtttacattaaaattcaagagggctgaagactaccccattgatctgtactaccttatggacctctcctactccatgaaagatgatctggagaatgtgaagagtctcgggacagatctgatgaatgaaatgaggaggattacttcagacttccgaattggctttggctcatttgtggagaagactgtgatgccatacattagtacaaccccagcaaagctcagaaacccttgcacaagtgaacaaaaactgcaccagtccctttagctacaaaaatgtgctcagtcttactgacagaggagagtttttcaatgaacttgttggtcaacagcgcatttctggaaacttggactccccagaaggtggttttgatgcaatcatgcaagttgcagtttgtggatcgctgattggctggaggaatgtaacacgactgctggtgttttccacggatgctgggtttcactttgctggagatgggaaacttggtggtattgttttaccaaacgatggacagtgtcacctagaaaataatgtatacacaatgagccattactatgattatccctcaattgcccaccttgtccagaaactaagtgaaaataacattcagacaatttttgcggttactgaagagtttcagcctgtttacaaggaattgaagaatttgattcctaagtcagcagtgggcacactgtctggaaactctagtaatgtgatccagctgatcattgatgcctacaattccctttcttcagaagtcattctggaaaacagcaaattgccagaaggagtaacaataaattacaagtcctactgcaagaatggggtaaatgggacaggagaaaatggacgaaaatgttccaacatttccattggagatgaggttcaatttgaaataagcataactgcaaataaatgtccaaagaaagacaatgaaacgattaaaattaagcccctgggcttcactgaagaagtagaggtcactcttcagttcatctgtaaatgcgagtgccaaacatatggcatcgcagcaagtcccaagtgccacgagggaaatgggacatttgagtgtggagcctgcaggtgcaatgaagggcgtgttgggaggcactgtgaatgtagcacggatgaagtgaacagtgaagacatggacgcttactgcaggaaagagaacagctcagaaatctgcagtaacaatggagaatgtgtctgcggacagtgtgtgtgtaggaagagagataatacaaatgaaatttactctggcaaattctgcgagtgtgataacttcaactgtgataggtccaatggcttaatctgtggaggaaatggtgtttgcaggtgtcgtgtgtgtgaatgctatcccaattacactggcagtgcatgtgactgttctctggacactgctccatgtatagcatcaaatggtcagatctgcaatggccggggtgtctgtgagtgtggtgcctgtaagtgcacagaccccaagtttcaagggccaacctgtgagacatgtcagacctgccttggtgtctgtgcagagcacaaagaatgtgttcagtgcagagccttcaataaaggagaaaagaaagacacatgtgcacaggagtgctcccacttcaacctcactaaagtggaaagcagggacaagttgcctcagccggtgcaggtcgatccggtgacccactgcaaagagaaggacattgatgactgctggttctacttcacctactcagtgaatggcaacaatgaagccatcgtgcatgttgtggagactccagactgtcctactggtcccgacatcattccaattgtagctggtgtggttgctgggattgttctcattggcctcgccttgctgcttatttggaagcttttaatgataatccatgacagaagggaatttgctaaatttgaaaaggagaaaatgaatgccaagtgggacacgggtgaaaatcccatttacaagagtgccgtgacaactgtggtcaatccaaagtacgagggaaaatgagtccctactcaggccgattttgcaacaccaagctcacagcagcatcgtcttagtcacgtagggtagctttggggctctgtggccaggggtttattcacatgcaggtttgggaaatgtacaatatgtataatttttaatttttattattttgaaaataatgttataatccatgccagggactgacagaagacttgagaaaggatctttatccttgtcaactgaggtcacagtgtgcctttttaacccttcctcctggatcaatggaatcaagctcttattggattaagtgacattcattagagtgaatgcagggcagagttggagcagcagcatcacgagcttctgcattgccactgattctccgagttacaaggaggccagggctgcttacagagtccggctgcaggctcggtgcctgtgtcagcctgctggctgatcactgggcatgcttgatgatgcatctgaaagacaagtgtgctgatcatttccaattaaaataattttgacacagttgatttacaaaggccattgggaaaattcagagaggtggaaggaaaaacttagctttaaaacctgtgtgccattgtgagttacttgatcccgtaactcttgacgccttctctttataaatccaagcttggataccagtcctgggaacttctctgctaaagagtccctgactattcacataaaggccataattttcataccatttgctgagcaggaacctttttgatgagtttattttactgtttttgttgttgttgttgtttgtttaattcctggtgctctattgtcacctcctctgaccttttaatgtgtctgttgcagtttggggttaagactttttatcattactttttcatttacttggctgtacatttgcttttttcacaaacacctaagctgccctgctgcttgcagggctacagggcctgggcaggctcccctcagcagcgattcaaccacttgtgcgccttccctaccgtgcttgctctgtctcacactagtcacaatcttgttttaagtgtccttttaattttgacaatgctattaactgaagttatttattaaaataaaaaggcctaaatacttaagtggtttgttttggctctaaattttttgttagttttgtattcttatagtaagcagaactttttatggatgccatcttatactactacatgctggagagctaatatttaggagaggggttgatatttttgttcatatagttagaactaaggaaatcttaccttcatttggttttagtttatttttatgtaaaactgtatttccataaaacacttgtgtaagntttaaaagaacttgggttggcaagatggcttagtggg

SEQ ID NO: 82 - DNA, 3894 bp, Cricetulus griseus
tatcaagataacattcacagccctatccagtgagaagagagagaagcaagaagcgccagagtcgccagttaagcctgtgcaaccgcacatctgcccctgaccatcaacattccagacactatggcccatctcatcagccccttccctctcccacgggaaccatcagcacatcactaagaactacccatattacaggactgtcggacaagggctggcagaattcaattcgccacaatctctctctgaaccgttatttcatcaaagtgccacgttcccaggaagaaccaggcaaaggctccttctggaggatagatcctgcctccgagagcaagctggtagagcaggcttttaggaagagacggcctaggggcgtgccttgctttagaacccccctgggaccgctctcctctaggagtgccccagcctctcccaaccatgcaggagtgttgtctgctcactccagtggcgcccagacccctgagagcctgtcgagggagggctctccagcccccgtggagcctgagcctggtgccgcacagcccaaacttgccgtcatccaggaggcgcggtttgcccagagtgcaccagggtcacctctctctagtcagcccgtcttaatcactgtccaacggcagctacccccggccattaagcctgtcacctacactgttgcaaccccagtgaccacatccacctctcagccacctgtggtgcagacggtacacgttgtccatcagataccagcagtgtcagtcactagtgtggctggactggccccagcaaacacatacacagttgctggacaagctgtggtcactcaggctgcggtgctggctcctcctaaggcagaaccgcaagagaatggcgaccacagagaagtcaaagtgaaagtagagcctgtccctgcaattagcccagccacactaggcgctgccagccgaatcatccagacatcacagggagcccctgttcagacggtgaccatagtacaacaggcacctttaggtcaacaccagcttccaataaaaactgtaacgcaaaatggaactcatgtggtaccaacgcctacagcagtgcacagccaggtgaacaacgttgcgagtcctctccatatgttggcaacccatgcatcagcatcagcatccctgcccacaaagcgccagaatggcgaccaggcagagcagccggagctcaagcgaattaaagcagaagatggcgagagcattgtcattgccctgagcatggatgcaccaccagcagctatgagagaaaaggggatccagaactagctgctgggagaccttttcttcagacgtcaactttgtggtgccaaaaggagatgctgcctcttactgaagcagggagcgctcttactgaagcagggagcgtatcctcagtgggtaaagggccctgcggttggacttcacctcttagcactgaaaacacgaacccaggtggccttaaaactccttaatttaaagacaagttacacttgaacagacccacaacagcaaccctggttccagaggtggtgtctcctacagagcactcgctgggctgtgggctcagcttttactacaagcaagaactccaggtcacaaaggactgaatctcttgtgtggatgcagcacctgttgcaagtggatctctctggctttccttaggggacagagccacagccacctgctgccctcataggacctgctggctgcgactgagagacaagacagtattttgttgtccacatgtggaattagagtacttggagatgtcctttcttaactaaataatggggtctttgacatttcatttcactccatttctactctggaaatttgagattcatttgggggaaagaatgtcattctgtttgtttctgtggtttgttttcagcccatgggatggtttgctctagtctttcctgcctgtgtttgggtggcactctcttaggacacctacttgcccatttctgttcagagcagttactgatgaatttgacctgccctgtgccctgtagagggtgggtggactgaggctgcacttgtgggttttgttgtctgtttctttatgttgactttgtccttggcgtaatttcccacgctagtaaaatgagtctcctacatattgtgtatgcttaaagcaacagatccctttgtccctcccttgggaaacagatccaggcttttgtcacaccttttcagaccaaggtcatagatctctcccagaacctggggagtcttaggggtcagctctggcttctgactggttatctgcatggcacactcatggcaagagctgtcgagatgttgccagttaactgagggtctggaagacccacagccaagtatcaagcatccaggccatttttctgattctcaagaggtttttctggcttttcagaatgaagtcccacactaagtctgacttatatcatatagtaagtaaagtttaagagggaagggtgaggagaggtgggaggccagcagcccagcccacactcaggatcaccgctcacctttccagagcattctggacttaagagctgagcagcaggcagagggcgttagcctcattgtgagtttttgtttttgggaaaaccctgtattttcctggtagaatgaaatggctcagaatggtatatttaggcaatttaaaacattatttacataaagaccaaatatgataagtctgttctaagtattgcttcacccacagtatggagctgtcacaatgctattgcagatgatgcgtgttgacgttatggacacacaagctggatttatataactcagccacttaaacaataaaggtgagacatcacatgagtgagaacatgtgtgtacccacagcagtctgcctgggcctcagttcatgtggtactctagcaggagaccaccctggtggggtgggctcaggtactaccaactgaacacactgtgtgtctggagacatgtgtgtgtagcatgcttgaccaggacttgttccctatgtgagtgaagtctgcagactcgttacctctgagctccaaacagaccttctgagtctgcaggggtttcttttagcggatcatagaaaaattttgaagatggaaggaggatttcttttttaaggccacactctcagtttcaagtgagtgaagtgagcctgtgcagccacaggcacacactcctcttttctccttgctgctgtatcggccttgctgctgctttggtgcataggaatgtaagctgtcaaggagagggcagaagctgtgttgaaggcactgctttagtttatgttcatcttgagtttccagaaggccctctgcacaccagggctggactcatgtgctttagcccccaacagttgtctcatgtggggacatatatgaccctgatactataagtagcttgcagcagttcccaggttcactgtggcatctcagtgttgaatgcttaaggagtctctctttgacctttaccaaacttctgagctccctcagggactagataacttcagtagctttggcttgaaccacacagaacacaaagggaaacttacctgtgtcctgggtacagtgcattccagaatgtgtgtggcgtgctttgtgtagatattccccacactacagaatgtgtgcacagacagcagctggtttccgtaaataccccaccctaattccttgtcctctgctgggggctggtcacagagtagcttcagtagttcagaaggggttggggagcatcaggacttgggttttctatgccatgtgacacaaggagagaactgacaatcgtaagtccaagcatctgctgttccagagtaagcagaagtggtgatctgtgtgcaaagatttggaatttttaacaagtaccaagttcctgaaattcaataaaatatttttattaattttaa

SEQ ID NO: 83 - DNA, 3881 bp, Cricetulus griseus
  modified_base (1998)..(1998): a, c, t, g, unknown or other
ctttactgataatgtcaagttcaggttaccctcccaaccaaggagctttcagcacagagcaaagtcgttatccttcacattctgttcagtatacttttcccagcaccagacaccagcaggagtttgcagtccctgactatcgctcttctcatattgaagttagtcaggcgtcccagcttttgcagcaacagcagcagcagcagcagcagcttcgaagacgaccttccttgctttcagaatttcatccaggttctgacaggcctcaagaaagaagaactggatatgaacagtttcactcaggtccctcaccagtggatcatgattccttggagtccaagcggccacgcctggagccagtttctgatgcccatttccagcgtgttagtgctgcggttttacctttagttcacacgctgccagaagggttgaggtcatctgcagatgctaagaaggaccctgcatttggaggcaaacatgaagctccatcttctccactggctgggcaaacatgtggagatgatcaaattcaccttcaaagctttcaaaggaagagttaatacagagtatggaccgggtagatcgagagattgcaaaagtagagcagcagatccttaaactgaaaaaagaagacaacaacagactggaagaagaagcaagctaaaaccccctgagccagagaagcctagtgtcccctcctcctgtggagcagaaacaccgtagtattgtccaaattatttatgatgagaatcggaaaaaagcagaagaagctcataaaatttttgaaggtcttggcccaaaagttgaactgccactctataaccagccatcagataccaaggtgtaccatgagaacatcaagacaaaccaggtgatgaggaaaaaaactcatttattttttaaaagaagaaatcatgcaagaaaacaaagggaacaaaaaatctgccagcgttatgatcagctcatggaggcatgggagaaaaaagtggacagaatagaaaataatccccggaggaaagcaaaggaaagcaaaacaagggaatactatgagaagcagtttccagaaattcgaacacaaagagaacagcaagaaagatttcaacgtgttggtcagaggggagctggtctttcagccaccattgctaggagtgagcatgagatttctgaaattattgatggtctttctgagcaggagaataatgatgcagaacaaagaagggcaagttcatcaatatgaatgggcttatggaggatcctatgaaagtttataaagatagacagttatgaatgtttggactgaccatgaaaaggagatctttaaggacaaatttatccagcatccaaaaaactttggactaattgcatcctacttggaaaggaagagtgtgcctgattgtgttttattattactatttaaccaagaaaaatgaaaattataaagccctagtgagaagaaattatggaaaacggagaggcagaaatcagcagcagattccccgtccctcacaagaagaaaaactagaagaaaaagaagaggataaagcagaaaaaacagaaaaaaaagtggcaagccccagcctcatgcctcagtagtgtattctgaggctgggaaagataaagggcctcctccaaaatccagatatgaggaagagctaaggacccgagggaagactaccattactgcagctaacttcatagacgtgatcatcacccggcaaattgcctcggacaaggatgcgagggaacgtggctctcaaagttcagactcttctagtagcttgtcttctcacaggtatgaagcacctagtgatgctattgaggtgataagtcctgccagctccccaggaccaccccaggacaaaccacaggcctatcagtcagagatggctaaggcaaatcaagcagaaaatgagcccactcggcagtatgaaggaccattgcatcactatcggtcccagcaggagtcaccatctccacagcagcagccaccaccgcccccancctcacaggccagaaggaatggggcaggtcccaggacccatcgactgatcacacttgctgatcacatctgtcaaattatcacacaagattttgctagaaatcaagtttcctcgcagcctcctacttcaacattccaaacttcaccatctgctttagcatctacacctgtaagaactaaaacatcaagtcgctacagcccagagtcccagtctcagactgtcctgcatccaagaccaggttctagagtctctccagaacatcttgtggataaatcccggggaaggcctggaaaatctccagagagaagtcacatcccatcagagccctatgagcccatctccccacccccagttcctgctgtgcatgagaagcaggacagcttattgctcttgtcacaaaggggagtggagcctgtggagcagaggactgattctcgatctccaggaagtataagctacttgccttccttcttcaccaagctcgaaagcacatcgcccatggttaaatcaaagaagcaggaaatttttcgtaagttgaactcctctggtggaggtgactctgatatggcagctgcacagccaggaactgagatcttcaatctgccagcagttactacatcaggtgcagttagctcaagaagccattcttttgctgatcctgccagtaatcttggtctagaagacatcatcagaaaggctctaatgggaagttttgatgataaagttgaagatcatggtgttgtcatgcctcaacctgtaggagttgtgcctggtagtgccagcacctcagttgtgaccagcagtgacacacggagagatgaaggggacccttcacctcatccaggagtatgcaaaccaaagctgatcaacaaatcaaacagccggaagtctaaatctcctattcctgggcaaagctacttaggaactgaacggccttcttcagtctcctctgtacattcggaaggtgattaccataggcagacaccaggatgggcctgggaagacaggccctcttcaacaggctctactcagttcccttacaaccctctgaccatgaggatgctcagcagtacaccaccaacaccgatcgcatgtgccccttcggccatcaaccaagcagctccccatcaacagaaccgcatttgggagagggaacctgcccccctgctctcagcgcagtacgagaccctatctgatagtgacgactgatctgtgcacagaagggaactctgactttggttttaatttcagattaaaaaaaaaattctgtcctcctatgatttgtgcccagagacttctcaggagagccagggccacagatgaagaaaaaccatgatgtctttaaatcactcttctgtaaatagacgacctttttgcagtgtatccccttgctgtagtatctggtgtacttaaatttaaatcagcacatcaacattgggggtaattttttaaattctttgtctatctttttaaccccagccttctaaacaacctcacgcggcacagttacacagtactggctgccatgggcattgtacttgtgtttcctctaaattcaactttccaggtgatgtttaggtttttaactacataccctgtcataaagcctgaatgaggtcaaagggcaggagcaacagaactgtcatattgtgagtttccagagcgggctttattttctcattagtggcactgaaaaaaaaaaattactgcatgggtatgttgtagttcagttttacagtttaaaggcttatttgaggtatacctcagtgtttatgcacactggtaatttaaccttgcccttaattattcttctgcatttgatgcagcccaaccaagcttttttgttctgaaataaatttgactatccggtccatagctacagta

SEQ ID NO: 84 - DNA, 3881 bp, Cricetulus griseus
aagccctcgaggatgacctcacagatgctgagaacggtaatattcagctacaggcacatcgggcattcaccaccaggcggcagatatcagaggaggtggatagtgctgacaaccgagagtcccctgagaattgggaaattgtacgagatgatgacaacactgagtatagcggtcaggctgtccagtcacctccatcgggtcacatagatgtgcaggttcgccttgcagaagagttagataccagactcgctgtgtatggaaatccagccaccggccagccagtcaccagctcaaatcattccggcagaagcggcagtgtgcaaacctgtatctttgaggaacagcccgcacttcctgtgcttttgcctacttcatctggattgccaccaggttgggaagaaaaacaagatgaaaaaggacggtcatactacgtagaccacaattctagaacaaccacatgggccaagcccaccatgcaggaagacccaagatcgaagatccctgctcatctgagagcaaagacaccagtggacaatgacctgggacctttacctcctggatgggaagaaagaacccacacagatggaagagtcttctatataaatcacaatacaaaaaagacacagtgggaagatcctcgcactcagaacgtggcaacaactggaccagcagtgccctactccagggattacaaaaggaagtacgagttcttccgaagaaagctgaagaaacagaacgacattccaaacaaatttgaaatgaagcttcgccgtgcaaatattctggaggactcttaccggagaattatgggtgtcaagaaagccgacttcctcaaggctcgactctggattgagttcgatggtgaaaagggacttgattatggaggagttgctcgagaatggttcttcctcatttcaaaggaaatgtttaacccttattacgggctctttgaatattctgctacggataattacaccctccagataaatccaaactcgggcctgtgtaatgaagatcacctctcttacttcaagttcattggtcgtgtggctggaatggctgtttatcatggcaagctgctggacggctttttcatccgccccttttacaagatgatgcttcagaagctgataaccctgcatgacatggagtctgtggatagtgaatattacagttcactgcgatggattcttgaaaatgacccgacagagctggacctgagatttatcatagatgaagaactttttggacagacacatcaacatgaactgaaaactggtggatcagagatcgttgtcaccaataagaacaagaaggagtatatttaccttgtgatacaatggcgttttgtgaaccgaatccagaagcaaatggctgctttcaaagagggattctttgaactgataccacaggacctcatcaagatattcgatgaaaatgaactggagcttctcatgtgtggtctgggagatgtggatgttagtgactggaaggagcatacaaagtataaaaatggctacagcgtaaaccaccaggtcatccattggttctggaaggctgttttaatgatggatgcagaaaaaagaatacgcttgcttcaatttgttaccggcacatcccgtgtgcctatgaatggatttgctgaactctatggctcgaatggaccacagtccttcacagttgaacagtggggcacccctgataagctgccaagagcacatacctgctttaatcgcctggacctgccaccctacgaatcgtttgacgaactctgggataaacttcagatggcgattgaaaacactcagggctttgatggggtcgattagattacaagtaacaagctgtggtgtcttaaacaccatagtttttaagcaaaagcaaaaacaaaattgcatcttaacattttccagagtacttctataagatagtcactggctcttccccgagagaccagagtacacagttcatccaaggtttcagccaccaccatactgaagtgttcatttgtccagttactttgtccttttcattggggtttcacacgacagggcatttaagtcctgtgtgcctggctgtatctcatcttactaggcacatcgttctgaaactactgagattccaactgtgaaatatctgtaatgagtatatggtgggaaaaaattgacgattttttgagatgaaatttggacaaaaagtctttaatactgagtaactgcgacacacttagtgctacttgtcgctttgtattctgtagaacttgcctagtgtaccttattgcctagatctttggaacaactttggaagatgtgtcacttacatttttagtcacttgagtcactagaaccaaaaaaaaaaatatactcttcactcgggatgtatttcacgtttgttagcatgcagcttgagcctacaggccattgagaagacgagtggaggagcaagcttttatttgcaatgtgtagaaagttttaggcctccctctgccctgtgtaccctcaagcctacagttattatgtgttagtgtgtttagaatgccttcaaacactaaacagtctccacaaaacagtgtttctacgcatgccgtgaagaatcaagttacatgtatgacttgccctaccagccactcttcacgcttgcagtcacgtagtacatacgtgtttacggagttcattatgtttacagatcaagcgaatttctgtagttgcatttttatatttttagtatcacattagtataaaagaatttgtttaaaataaccaaagagtagttcaatgcataatttgtataaatttgttaccaggtttcttatgctttctaaaaaatactgtttactatgaaaattatgttttattcaaagtcaaaaacccttgaggcacatgctacaggtggaatcccaccgaaaccacattgaagtataggaagagaccccgtgcatgaatcagcacacatagacagtgccagctatgtaccagggcctgagataaaattgtcagcagtgacatccagctccatcttcatcctcaatgtggtatgtataaattaatgtactcgtgtgttaactttctggggtgcgtataaatgccccatgggagctgtcagaagtacgtggggtcactggttttagtttgttggctctaacaagacaagtgcctgtcagcccatggtagggattccaatgacagtagcagaaacactttccgtgggccacatcattgtgtgggtcagggaaagtgaccccaggccagtgcatgcttcccagctgtctttactgagtcagccagccatgacacctgtacagtcttgattctatcattggccatctgagccttcactacaaggctccagtttcttcatctgtcaggtgtgaatagctatgcccacccttttgtcttttgaggttatggtaagttctccccactctaccccaggtgtggaccaatggtctggaggaacctggatagatcaccacagctcctcgtgccagtctgcatggaaatgtctcagcgacattcgactgctggggagttgtggagccaatttcacaaagcaaaggctttgtacttttctaggaaagtatgttagccttcattttctctaattctcctcccctgacaaatgaaacacaaaattacgttacaaatgcagacccaaatggtaatttgttttcgctttttatttataacacccaagttattccttaaaaatatcaagttaaacacaattggttttggtgataagctattcgacattgtttttaaattctttcttatatggtaaatgtatatccagattaatgtatcaaaaattatcgcataaactataaaatcattttcaaaatctcaattccacaaataaagttctattctaattttaaaaac

SEQ ID NO: 85 - DNA, 3860 bp, Cricetulus griseus
gtgtttcttcatcatctgaaaattcagatgaacctctgaatttgacttttatcaagaaggagttttcaaattcaaataatctggacaacaaaagcactaacccggtgttcggcatgaacccatttagtgccaagcctttatacacagctcttccaccacaaagcgcttttccccctgccactttcatgccaccagtccagaccagcatccccgggctacgaccatacccagggctggatcagatgagcttcctaccacatatggcctatacctacccaacgggagcagctacctttgctgacatgcagcaaaggaggaaataccagcggaaacaaggctttcagggagaattgcttgatggagcacaagactacatgtcaggcctagacgacatgacagactccgattcctgtctgtctcgaaagaagataaagaagacagaaagtggcatgtatgcatgtgacttatgtgacaagacattccagaaaagcagttcccttctgcgacataaatatgaacacacaggaaagagaccacaccagtgtcagatttgtaagaaagcattcaaacacaaacaccaccttatcgagcactcgaggctgcactcgggcgagaagccctatcagtgtgacaaatgtggcaagcgcttctcacactcgggctcctactcgcagcacatgaatcacaggtactcctactgcaagcgggaggcggaggagcgggaagcggccgagcgcgaggcgcgagagaaagggcacttggaacccaccgagctgctgatgaaccgagcttacttgcagagcatcacccctcaggggtactctgactcggaggagagggagagcatgccgagggatggcgagagcgagaaggagcacgagaaggagggcgaggagggttatgggaagctgcgaagaagggacggcgacgaggaggaagaggaggaagaggaagaaagtgaaaataaaagtatggatacggatcccgaaacgatacgggatgaggaggagactggggatcactccatggacgacagttcagaggatgggaaaatggaaaccaaatcagaccatgaggaagacaatatggaagatggcatgtaataaactaactgcattttaagcttcctatttttttttttccagttagtattgttacctgcttgaaacactgctgtgttaagctgttcatgcacgtgcctgacgcttccaggaagctgtagagagggacagaaggggcagttcagccaagacagatttagatggagttggagctgggtattgttaaaaactgcattatgcaaaaattttgtacagtgttaaggcctaaaaactgtgtggttcagagactaattcctgtgtttaatagcatttatactttaagcaacaactagaaaattctaagaattgcactctacgtatgtatcactaacaaacttaaaaaaaaaactatagtactaatttatattaatacatttaaaaggtgcccgcactaccatacatcagtattttattattattattattgttattccctgtttaatttaatgtgcccgcactacagtgcatcaatatttcgattcctctacacttttcctttcgctattcataaaattcccattgttttacagcctaagtaaccacacactttttaggcctcgattttttttttttttttttctgtgaaggaacttgaagtgatgcatgtgtgaatttaagataccgaagtcttaaaatgacctggacgtgaaggaaaaagtaagctgagaagtaaagaaagcctttgtaaggtggttttaaaagccttatatgcaaacctttgaatctgtgtctctgcaagtgccattccttgtacagttgttgagagggtaacttgggttacctttgcaccagcttcagtgttaagctcaccctgttctttgaagcatccgtgtcagtattagacgaataggcagcagttccttagtttacatatgtttgtgcaattattttctgtactttttgttcattaattttgtcagtattacaccaaactttttttgcaacaaaaaaaaatttttttccattcatttaattttaggtcaaataacattttatttatgtggctcattttatatttcctaattttatttatttcatactgtagtgtacagtattatagttcttcaatatatagatatattttagtaaaaaaggaacatgacgttgatcatttgggcaaattttacgtaaagagaagagcatttattgtgttttggaacattaattgtgagatgggatttttcaattttattattttattttgttttgttttccaattcctggaaattccaaatttgggaactttgatacgatcttgtgaaaacactgtatttagcatgaattgaacttgcagtggaatgggaggggcttgaaggaaggaggagagaagggactatattgaataggtattaataaatttattagatacttttcacaatcagataactttaaaatgttatttttatctttctaaggacatacgccttaacaacatcaaaatttagtcataaatttgaagatattgcccaataagtttatatatataatatatatatatttgaataaaaaaaaattgttagccatgtgtttttttgctccaggatgtgtggccattccaggctgtgggccctggatatgcacacaaaacaaatgtgtgtgctctgaagcccccgcacattgtaataaacacagctgcatttatttgagtatgtgctcccatgtacatgtaaaacacattcaaaacaaacacactcagcagatttatttgatgtgcaatggggcaattattcaaataaacatgctcaatacaattatttgaatcttacattgcatgttcatcactcacagcactaatactagaagagggggaaacaccaaagaatttacatgggggaaaatatatgtgaaaacaatgttattgtagatgttataaggaagctaaagctgtggctcccttcctaactgaaatacaatgactttgtactcagtggcatttgtttctaatgatgattaattatttcactgacttgatcattacatcagaatgactgcaatatttggattcatataatagcaaactttacaaatctgaagcagatagggatgtgacatctctatatttcaaaagcataatagttctttccagataccttacatcaaagggacactggtaaattattatggcttacatacataactataaatttaaaactttatacatatagaaaaacattcctacatcttaaaacattaaaaagtcacagatgacttgtgatcattttatatattaataaatattacaatatatatgaacacatcacagatcatattggtgaaccaagaggctgctaatgcctctcctcagtataccgacataacctaatatactaaaatgggaaggggcttttagtcactgaatatgcatcgtcaaagaaagatgaagaccatacatggcttgtgcccatcatgaaaaagattcatactgaaggcttagctttggtttttattcaattaaattgtcaaactgtgcacagtgtaactttttttttagaacttgagacatttgtgatgttggctgtttaaatctttgttaccttcgctgtgaattgaaattgtacatatttagtaaatcatgcaaacaaaacaaactttttagacaatatttttattggagagttttcttttcctgtatccatagttaaaaaaaaaaagacctcctttcccaaaataaaaatgtcaatactaaatttaaagaagtataaaggaatgattgcttcctttagagcaaaatatttaaataaacatggagagaattggcaa

SEQ ID NO: 86 - DNA, 3860 bp, Cricetulus griseus
atgtttttggtatattgtgcactggagaaagaacctgtgccaatgtccttgcctccagccttggtgccaccttctaagagaaaaacgtgggttgtaacccctgtagaaaaggctaaatatgatgaaatcttcctaaaaattgataaggatatggacggatatgtatctgggatggaggtccgtgaaaccttcctgaaaacaggtttaccttctgccttactagcccacatttgggcactgtgtgacacaaagggctgtgggaagctttcaaaagaccagtttgccttggcttttcacttaatcaatcaaaagttaataaagggcattgatcctcctcatattctcactcctgagatgatcccaccatcagacaggtctagtgtacaaaagccatcacaggatcaagtcctgttgcagatttctctgctattaaggaactagataaagcccagctggaagagcagctcaaggaagtcaggaaaagtgtgctgaggaggcccagctgatctcttccttgaaagatgaaataactagtcaagaatctcagatctccacttacgaggaagagctgtcaaaagctagagaagaactaagtcgcctacaagaagaaacagcacaactggaagaaagtgtggagtcaggaaaggctcagctggaacctcttcagcagcatctacaggaatcacaacaggaaatcagttcaatgcaaatgagactgatggaaatgaaagatttggaaaatcataatgaccaatcaaattggtgcagtagcccacaaagcattcttgtaaatggcgctacagattattgtagcctcagcaccagtagcagtgaaacagccaacctcaatgaacatgctgaaggacagaacaatccagaatctgaacccatacaccaggagtcatcagtgagaagtagtcctgaaatagcagcttctgatgtgactgatgaaaacgaagttgtgactgcagctggtaatgaaaaagttagtcccagatttgatgatgacaagcattcaaaagaggaagatccatttaatgtagaatcaagttcactgacagatccagttgcagatgcgaacttggattttttccagtccgatccttttgttggcagtgatcctttcaaggatgatccttttggaaaaattgatccttttggtggtgatcctttcaaaggttcagatccatttgcatctgactgcttctttaagcagtcttctactgacccttttaccacttcaagcactgaccctttcagtgcatccagcaatagcagcaatacatcgatagaaatttggaagcacaatgacccatttgctcctggtggaacagttgttgttgcagctagtgattcagccacagacccttttgcttctgtttttggaaatgaatcatttggggatggatttgctgacttcagcacattgtcaaaggtcaacaatgaagatccttttaatcctaccatatcaagttcttccagcaatgtggtcgttccaaaaactgtgttagaggaaacatccaccaagagtgaggatgtacctccagcactgccacccaagattggaactccaacaagaccctgcccgccaccccctgggaaaagacccatcaacaaattggattcttctgatccctttaaactgaatgatccatttcagcctttcccaggcaatgatagtcccaaagaaaaagatcctgatatgttttgtgatccattcacttctactgccactaccaataaagaggctgacccaagcaattttgctaacttcagtgcttatccctctgaagaagatatgattgaatgggcgaagagggaaagtgagaaagaagaggagcagaggcttgccagactcaaccagcaggaacaagaagacctggagcttgccattgcactaagcaaatcggagatatcagaagcatgaagagatacctatcctttgtcagcaggacagtgctcttcttggatgctgcagctatttaccatgtgcatcaaacttcctatgagcatgggatacaaaaagtttgagattcctataaatgtgacagaagtggagcttgtggtttcttttttggggggggagctatttcaaatgtgtcttttattttttcttccaaaaacagtaccctagttagacagcgtcccctagacccctgttctggtgtgcatttacagtgagctcttgcctgcttatactattccctgaaaagctagagcaccacgcctctgccctctggaacctagcagatgtagtttcgtgctgttctgccccttgttctgtagttcctatgacagcaactggagttctgaaagtgtgcaggtattctccctgagctgagaggtggaagagaggaaagggaaagagcatcctgtttcttttttcagtacaatagccagttaaaagtgcatcatatgtacttctggagaaaatacaacttgttatctagagacaaggcaacatattctgtaaagatcagctccactaaagataaattaatttaaactattattgctccaggctcaagtaattcataaataaaagcattaaagccttgtatgtgaaacatctttagctagaattggaaggtacttggtttttcattatatgttttgtttctttagtgacggcccagctattttcagtgatacaaatgaaagaagtaacatatattccctcgctttttgtctgtctttgtagtttaaattatttcatttattttactttttttcaccttgtaaaattagcaagctaccccacccccaaaaaattcctggtttttaaattgggagaaaaataaacagacttgtcaaattatcagagccctgcttttgttacacccatcttttgctagactgtcctgacagacagctggatttaaaatgaactgtgaagtggactataaattggatctttttttttaacatgagttactaatttggtgttttcaataccaagataaagaaaatgcacctacaaactaataaaaattctctagggtcaccaagttaaggtggtattgaactgtgttaaccagagtaacttactacctggcctataaataaaccccacagtacctaatcagtccatcttgaaatggtgcttttttgttgttttgttgttgtttccacacactattggatggctggaatttaaagcaaactaccaccttcttcttgcactgcttttttctacttttgtaaatgaatatttcagcataaaagtcatatatacgacataagggctgaatcataaccacaaggctttaattgtgataactaatccagtggcctaagtatttgttgcaaacagtgactgagaaggtcatgttgctgtttgttcccctccccctctctcttcaggagaaaggtaagttgacttgaataaccttcttttgcactgagaaaagtgaaaaatgtttgaaatgctttaaaactttttaattaaaaaatactctggaaatattaaaaatctgtaacttaataaacagcaacttctgatgtgtagtaagtgtgccctaatcttcagtgcacttagctgggtcatatagactcatccttagttaagatgtgtatactcagtgggccagtgttgtactaaactgtgtatatattatataaacatatctatatctccatgcttgattgtataggacaaatgtcttaaagagtcatttgtgatgtcttatggtgttgaccctggctccagagcctgcgcttgaaacaaagagttttaaccatctttcttttacctatttgttcagctttatttgagctctcttcacagaatttttctcatgtttcaaacttataaattacagttagtaattatgagaataataaactttaagaaataaaaa

SEQ ID NO: 87 - DNA, 3855 bp, Cricetulus griseus
  modified_base (1530)..(1530): a, c, t, g, unknown or other
atctgcaatgtcaaacactcctacccacagtatcgctgcttctatttcccaacctcagactccaactccaagtcccatcatctctccttcagccatgctacctatctaccctgccattgatattgatgcacagactgagagtaatcatgatactgcactaacgcttgcctgtgctggtggccatgaggaactggtacaaacactactcgaaagaggagctagtattgaacaccgagacaagaaaggttttactccactcatcttggcggctacagctggtcatgttggtgttgtagaaatattgctggataatggtgcagacattgaagcccaatcagaaagaaccaaggacacaccactgtccttggcttgttcagggggcagacaggaggtggtggagttgttgttagcgtcggggtgcaaataaagaacacaggaatgtttctgattacacacctctgagcctggctggttgaacacagagctaagactggcctcacaccactaatggaagcagcctctggtgggtatgcagaagtgggccgagttcttttggataaaggtgctgatgttaatgcccctccagtgccctcctcaagagatacagctttaaccatagctgcagataaagggcattataaattttgtgaacttctcattggcaggggagctcatatcgatgtgcggaacaagaaggggaacactccgctgtggctagcagcaaatggtggacacctagatgtggttcagctactggtgcaagcaggcgcagatgtagatgcagcagataaccgcaagataacacctctcatggctgcatttagaaagggtcatgtgaaggtggtacgctaacttggtcaaagaagtcaatcagtttccatcagactctgaatgcatgcggtatattgcaaccatcacagataaggagatgctaaaaaagtgtcatctttgtatggagtcaatagtacaagccaaagacagacaagctgctgaagcaaataagaatgctagcatactgctggaggagctagacctggaaaagttaagggaagaaagtcgaagactggctttggctgccaaaagagaaaagcgaaaagagaagagaaggaagaaaaaggaagaacaaagaagaaaattagaagaaattgaagccaaaaataaggagaactttgaactccaagctgcccaaagaaaaagaaaaacttaaagttgaagaagaacctgaagtcttgacagagcctccaagtgccactaccaccactaccataggaatatctgctacctggactactttggcaggttcccataggtaaaaagaaataatgccataactacaaccagttacaaacatcaggtcattccacgcagcagcagcctccgggatctgtttctcaggagccaagaccctctcttcagcagtctcaggttccttccccggatgtgagaatgactgttcctcctacagcaacaagttctgctccagtggtggtgccttctactgcgcctgtgacataccctatgcctcaaacncagatgggatgtccccagcctcatccagcaaataagcctgttgtctcccaacttcagtgctcctttaccatttgggccctttagcacattgtttgaaaacaaccctacgaatgctcatgccttctggggaggatctgttgtttcatctcagtctactccagaatccatgctgtccggaaaatcctcgtatttgccaaattcagatcctttacatcagtctgatacttccaaagcaccaggttttaggccgccattacaaaagacctgctccaagtccctcaggtattgtcaacatggactcaccatatggttctgtaacaccttcttctacacatttgggaaactttgcctcaagtctttcaggaggtcaaatgtatgggcctggagcacctcttggaggagcacctcttggaggagcacctgcagctgctaactttaacagacagcatttttccccacttagtttgttgactccatgttcatcagcatcaaatgagtctcccgcacagtcggtatcctctggcgttcgtgcaccgtctcctgcctcatcatcagtacctttagggtccgaaaagcccagcaatgtctctcaggacaggaaagttccagtccctattgggactgaacgttctgcacgtatcaggcaaactggaacttccgctccatctgttattgggagtaatttgtctacatcagtaggacatagtggcatctggtcctttgaagggattggtggcaatcaagataaagtggactggtgtaaccctgggatgggaaatcccatgattcacaggccaatgtctgacccaggagtgttttcacagcatcaagcaatggagcgagatagtacaggaattgtaactccttctggtacattccatcagcatgttcctgcaggatacatggactttcctaaagttgggggtatgcctttttctgtgtatgggaatgcaatgattcctccagtagcacctctccctgatggtgctggaggacccatgtttaatggccctcatgctgcagacccttcttggaattcactgataaagatggtttcaagttccacagaaaataatggtcctcaaacggtgtggaccggaccctgggcacctcacatgaacagtgtgcacatgaaccagcttggctgatgaggataaacctgttagcctgcagattcctttcattcagaggaaatcacaagtggccgagaaacattttttatgctcccaaatcattctactgatgtgcttgactgaagtgtgtaggcttttgcagaagaacttactaactgacctattttctgtgaacatttgtgactgcccattctccattgtcatccgtttttaccttagttagcatttttcttatcattttcttctttcttcccctcttctcctttggacataactttctgttgaagctgttctttggctggttggttttagtactgtaaactgcttctgagcaaacacggaaatttagcaaaattatgtaaacttgatcctgaagttttagaatggcaaataaatgtacaattgtttacataacagaaaaggctaagcagaaagtaaatttcaatatgtcagtatagaggctctactttatgtagacttaaattaatgtgagatatgtaccttcatattcagcaatctggatgtttccttcatacattaaactattaataagcataacttttctacttgtgtaatttaagcataaagtaaaatgatgggcattatcggtggatgtttccctctgttagctcttaaaacatccatcttgctcccttttgggtttgtttgtagcaaggcatatagaagaaatttctgatttttccatgtctttattacatttgtcacaccttcaaactattacacacatctctcttcagtttgaactctgtctttgccactattactagtaagattctcttgctcagtagtgaaaataccctgtaaggctttttaccatagcagctactacacaaaggtggagcatcttcagtggcatcagtggtttcttctggccagaaaacttgagactttggagaaacttaaaagccaccacagttctcagtcagcatatactgtttatttttaaacaattcggcatattttatattggataatattgattcttaacattggcttcttgatcataaagagtcaacacaaaattttccttttccaagcatcttatgtcttaggttgaaaggctccttgctctctgcacttgttgtagcaatgaaaaggatgaacagctaacttgggccaagtcaaaaggagtgtttgggtttttattaatttaaacaataaaaaaaaagtt

SEQ ID NO: 88 - DNA, 3852 bp, Cricetulus griseus
ttatacttcctgttgttgtgggctcttggtggtatcggtcaatacgatatagtggagaccagattctaatacgtacaacgcagatttatacatacttagtttataaaactcgaaatatggatatgaaacgtctcatcatggttttagctggagcttctgaatttgatcctcaatataataaagatgctacaagcaggccaacagataatattttaataccacagctaatcagagaaattggcagcataaatttaaagaagaatgagcctccacttacctgtccatatagcctgaaggccagagttcttttactgtctcatcttgctagaatgaaaattcctgagaccctggaagaagatcaacagttcatgctgaaaaaatgtcctgctctgcttcaagaaatggttaatgtaatctgccagctaataatcatggccaggagccgtgaagaaagggagtttcgtgctccaactttggcatccttagaaaactgtatgaagctttcccagatggctgtccaaggcctccagcagtttaagtctccccttctgcagctccctcacatagaggaggacaatcttaggagagtttcgaaccataaaaagtacaaaattaaaactatccaggatttggtcagtttaaaagaatcagatcgtcatagtctgttgcacttccttgaagatgataaatatgaagaggtcatggcggtccttgggagttttccatatgtgaccatggacattaagtcacaggtattggatgatgaggacagcaacaacatcacagtaggatccctagttacggtcttggttaaattgacgaggcagacaatggctgaagtatttgaaaaggaacagtccatctgcgctgctgaggaacagcctgtggaagatgggcagagtgatgccaacaagaacaagacaaaaggaggatggcaacagaagagcaaaggtcccaagaaaatgcccaagtccaagaaaaagaagcctttaaaaaaaaagcccactgctgtgcccttacctcaggcaaaacaacagaagcagaagcaggcaaacggagttgttgggagtgaaactgcagtaaaggaggaagaagatgacatttctgacaaaggcagtgattctgaagaggaagaaaccaatagagattcgcagagtgaaaaagatgatggtagtgacagagaatctgatagagaacaagatgaaaaacaaaacaaagacgatgaagcagagtggcaagaattacaacaaagcatacagagaaaagagagagctcttttggaaaccaagtcaaagataacacaccctgtgtatagtctttactttcctgaggaaaaacaagagtggtggtggctttatattgcagataggaaagaacaaacattaatatccatgccatatcatgtatgtacactgaaggatacagaagaggtagaactgaagtttcctgcgccaggcaaacctggaaattatcagtatacagtgttcctgagatcagattcctatatgggtttggatcagattaaaccactgaagttggaagttcatgaggccaagcctgtgccagaaaaccacccacagtgggatacagcaatagaaggtgatgaagaccaggaagacagtgaggggtttgaagatagctttgaggaagaagaggaggaagaggaaggtgatgactaaccagtgtatgtgtggaccacagcgtttgcacatatctgcaaacatctgctgctttgtaaattgtaacaaaacagaagcagtggagaactgatgtggagggaaggaaatgttggcatctttactagaaatggatacataaaataggcagttggtggtgccatggtacagtctgaaaaggggttatttaaagcctttcaggtatggggtggtgcgtttatatcatctgcaaatgataataaatcctttgttgttaacaactgtccagaagtgtgggctgtgcattacctgatcagtttatggtctcagtcagagtcaaggtacatgacttctttgttcagctttagttttagtaaacatttaaaatatgataaacatcacaaatatgttttaagtaacatctgctcaagtttttaatctgttaataagctctgttgttcatttatcaatattttacaaatggtaaagttgtaacagttccacacataagttcaaaccttcatctatcttggccataacttagcattctcacacattccacacaatacagagggctacattttggaattttccgttcttaattgcccagagtcagcaaacattacaaaagtggctttcaatggcctaaggcctcttaaagcctctgttggtgtctcatcgccagatctcattcttctgataagctcagggcggaaagtgattgtgggaccatgtgttctctgatgcctgagtcatgttattcagtcttttgaaaagggtcactatagaagctggacaacattcttagcttttaatctacctgactatcagaagccttctaaagaaataaatacagcatacaaaggaggcattttttgtattcatttttgactcctgttaataaaatagaagtttgattcattttatgtaattgtgtttgtctttttactcctagagaaagggcataaatagggtaatcctttatttttcaactaaaagtttaatattgtacctcactgtggaagtgactgctatctctgtgtactcttggacaacccaggaggaagagctatttttctctcatttagtacaacctcaagggtagtgctcaacatagagtaaatgtgtatgtgatgagtcactgaggtgagagtatttttattactagatatggaggacacacaagtctacaattctataagactgattgcaataatcctatcaaactctccataggccaaagtactgttgcaatactaacttacaaccttgtttatttaaaaggttagtctactcttccgtgcagaattatcactggtatttgttactatagtagttggaaataaaatttagtaagaattaccaaaaagagcctcactatatagcctaggctggccttgaactcaacagtgtagcccaggtcgtggaccttgtgatcctccagtctcagcctcttgagtgagtgataggattacaggcaagagccaccacacctggtgttgaacacatttactacatttattcaggtatctgctccagctagctcctaccatacactggagtgttgtttagtaataatttgtatttcaaatgcactcttttcactaggcagaggaattattattattttaggaactagctattgagttagttggcctttgtccacccccttatcctctttggataaagcaagactcgtcctttgtttttaaatgcttcttttttgaagcattttctcaactctatgattcccctatttagtctgccttaaagtgaaacagctatctgtgaactggagcatgacattttatcagtgcagtgattagttcaaatgtgtcccaagatgttagcatcatcatactcttaaacttgacactagggctatttacagaccttcagaaacaaaacaaacatgatcttgtacgttttcctgtaactgagctaaaaatccaaatagcgttcatgggcatgctttaggactggtttcaggcaggtgtgtacatcccaggggtatgcagataataagtccattgagaaaatgttaaaataatgattctttgtatttaatctcattcttttaaatttcttatttttggtgtgttttataatgtacataatatattgtacagttgtacacttatataattataaataaataatacatttattggtgcattaaaaaaaaaaaaaaaaaaaa

SEQ ID NO: 89 - DNA, 3846 bp, Cricetulus griseus
gcgaagaggtctgtgtctgaggccggtgtgaggacgcgcgctccgttcccggaccctcgtccccgaggaatcctgtgtgtgcgcgcgtgtgcgcagggttcccgctggggcgggtgcccagggagtgcccggactcgcggggcagcgccctcgggaacgtgattgcttctgttttcctgtatgaagcggttggcaccacttaagtgaccgaatgagagactctacaggagcaggtaactcactggtccacaagcggtctcctttacgtcgaaaccaaaagaccccagcatccttgaacaagctgtctttacaggatggacataaagccaaaaagccagcatgtaaattcgaagagggtcaggatgtcctagctagatggtcagatggcttgttttatcttggaactatcaaaaagataaacatactgaaacagagctgcttcatcatatttgaggacagttctaaatcctgggttctctggaaggacatccaaacaggagccactgggagtggggaaatggtctgtacaatatgtcaagaagagtattcagaagctcccaatgaaatggttatatgcgataagtgtggtcaaggctatcatcaattgtgtcacacacctcatattgattcgagtgtgattgattcagatgaaaaatggctctgtcgacagtgtgtttttgcaacaacaacaaagaggggtggtgcgcttaagaaaggaccgaatgccaaagcattgcaagtcatgaagcagacattaccctatagtgtggcggaccttgagtgggatgcaggtcataaaaccaacgtccagcagtgttactgctattgtggaggccctggagactggtatttaaagatgctgcagtgttgcaaatgtaaacagtggtttcatgaggcttgtgtgcaatgccttcaaaagccaatgctgtttggagacaggttttacacatttatttgctctgtctgcagttctggaccagaatacctcaaacgtctaccattacaatgggtagatatagctcacctatgcctttacaacctaagtgttattcacaagaagaaatactttgactctgaacttgagcttatgacatacattaatgaaaactgggatagattgcaccctggagagctggcagacacacccaaatctgaaagatatgagcatgttttggaggcattaaatgattacaagaccatgtttatgtctgggaaagaaataaagaagaagaagcatttgtttgggttgcgaattcgtgttcctcctgtgccaccaaatgtggctttcaaagcagagaaagaacctgaaggaacatcccatgaatttaaaattaaaggcagaaaggcatccaaacctctatctgactcaagggaagtaagcaatgggatagaaaaaaaaggaaagaaaaaatctgtaggtcgtcctcctggcccatatacaagaaaaatgattcaaaaaactgctgagccacctttgggtaaggaatcagtgtcagagaatcctgcgttggatttaccttgttctatagggagaactgagggaattgcacattcatccaatacctcagatgtggacctcacgggtgcttccagtgcaaaagaaactacctcatctagcatttccaggcattatggattatctgactctaggaaaagaactcgcacaggaagatcttggcctgctgcaataccacatttgcggagaagaagaggtcgccttccaagaagaacactccagactcagaactcagaagttgtaaaagatgatgaaggcaaagaagattatcagtttgaagaaattaacacagaaatcctgaataacttagccgatcaggagctgcaactcaatcacctgaaaaactctatcactagttactttggtgctgcaggtagaatagcatgtggtgagaagtaccgagttttggctcgtcgggtgacccttgatggaaaggtgcagtacctcgtggaatgggaaggagccactgcatcctgaccgcaggactgaacataatgttcactgcactcagagtgtgggctttactatctttcttaaaaaaacaaacaagcagaaaactcaaaaaaattcacagaaggagatgatactagccttaacatgtacttgtcaatgttatggatgttgtcataaaaagatatcttttaaaaatcagaggagagacttaattttttaaatcttaagatttgtagaatgtttctaggataggatattaaacatgattcaaacccatgcatggtgttagatactttttctaattattccattgagtccatttttgtgattagtggttaccagagcaaacagatcatgtagatagcacaagtatttggagaaatattgtgtgttttgttaccaaaatgttggaaaaatttatttcgataccctttagatttcataaagtgcagtgtatataatgtctactgaaagactgtaaaatattgaaattcctttcaagcaaaatgtaaaaaatatattgagcctgtaaattgctctgtgactagacttcattgtcgtcttaatatattctttgcatgtacatgtatatacacatatgtgtatatatgtgtgtgtgattatgtgacctatgcaatacaaattatgggaatgggcagctttggagtatatatcccataattcttatttcaggaatagttgcagtatttacacagcagcatttcttctcaggcttttattgggtgctgttgcttgctatgtatgaagagaaatgtgtcaaacaggtttagtgtgtactggagaagggtgtgaacaacagtgttcatgggcttttagaatgcttttcagtccttgtaactcagctgttcagtacctaaaacaaattcaagtgatacctacatttcctattagaagtgacattttcaatttctcgtggcacattatgattgtaaatgtctcagttttaacagtaagtctgtaggagcccggtgaagactcctgaaatgtctgtagtaattgttagttatgtttgaataagcgtagtatgaacaaagtatttattgcacagggttaacaaacagtatgttgctagctgaagctaactgctgttttatcttagccaaagagtaaaatggaaaaatattgtttaggtagctcttttattttttaaacgattggtagattttagactaaaaattggggaaatttctgccaaaatgaaaagtctgtgaagtgtattgatgacagaacggtaaaactgtgggttagtacttatttattccattaattgattatttgactgtttttaaagaaacatgttttatttctttagcatcttcaaaagatgtgtcacgtaatagccaaaagaagcagagaacttcattgtcctgcatttggttcctggttgaccaggtataaatgagctttacaaagtgcaaattacaaactgtcgcttctgttcacctccaccaaaacttgatttcccctagctattaatttaaagttgcctttcctgcagctgcaataattttgtaataacacacagagattgtattgatttttgtaatgtttgtttatatctagggtaatggaaatgtaattcccgtgtgacctcccttactctagctgtatcattatttcatttaaccctaaaccttttacttctaactgaacaccagcagtgtttctagtaaccctctaagatgcccagaagacaattatcaagctgaaccgtctttaggcgtgatcattgtgaatgtctgttttcttttatcatggtggctcacatggctctgatgttcagttttgttattttttgaaattgctttacttagaattaaaacagaccaacattaaatgtgtgttaattttttaaa

SEQ ID NO: 90 - DNA, 3845 bp, Cricetulus griseus
gccaaggcatgatcaaacgaaatgaaactgaaaagttacatttgtatgttttcattgatggacaaagttcctaatgggatagagccaatgttgaaggatttggaggagcatatcattagtgctggcctagctgacatggtggctgctgctgaaaccatcactactgattctgagaagtatgtggagcaattacttactctgtttaatagattcagtaaactggtcaaagaagcttttcaagatgatcctcgtttccttactgcaagagataaggcgtataaagcagttgttaatgatgctaccatatttaaacttgaattacctttgaagcagaaaggagtggggttgaaaactcagcctgaatcgaaatgccctgagttgcttgccaattactgtgatatgctattaaggaaaacaccgttaagcaaaaaactaacctctgaagagattgaagcaaagcttaaagaagtgctcttggtacttaaatatgtacaaaataaagatgtttttatgaggtatcataaagctcatcttacccgacgccttatattggacatctctgctgacagtgagattgaagaaaacatggtagagtggctgagagaagttggtatgccagcagattatgtgaacaagcttgccagaatgtttcaggacataaaagtatctgaagacttgaaccaagcttttaaggaaatgcacaaaaataataagttggcattaccagctgattcagttaatataaagattctgaatgctggcgcctggtctagaagctctgagaaagtgtttgtctcacttcctactgaactggaggacttgatacctgaggtagaagaattttacaaaaaaaatcatagtggtagaaaattacattggcaccatctcatgtcaaatggaattataacatttaagaatgaagtaggtcagtatgacttggaagtaaccacgtttcagttggctgtgttgtttgcatggaaccaaaggcccagagagaaaatcagctttgaaaatctaaaacttgcaacagaactccctgatgccgaacttagaagaactttatggtctttagtagcttttcccaagctcaaacgccaagttttgttatacgaacctcaagtcaactcacccaaagacttcacagaagggaccctcttctctgtgaaccaggagttcagcctaataaaaaatgcaaaagttcagaaaaggggaaaaatcaatttgattggacgtttgcagctcactacagaaagaatgagagaagaagaaaatgaagggatagttcagctaagaatattaagaacccaggaagccatcatacaaataatgaaaatgagaaagaaaattagcaatgctcaactgcagactgagttagtagagattttgaaaaacatgttcttaccacagaagaaaatgataaaagagcaaatcgagtggctgatagagcacaagtacatcaggagagatgaggccgacatcaacacgttcatctacatggcgtagccctgggcagaaagttgtcccggtttgagctggaggaaggtttatttggactttgattacataaatattaaactctctgccttaccttacaaacgactatattttgccagtcacattagttagcatgatggcattcccttcatgttgcacactcttaacagcatgctgttttgtggagaaaattgcattcatgaagagcccattatgaacttcaaagtcagttcaatttttacccaccaagagaaataacattttggaagggtgagggtggggttcttgttgcttcttttacccccttctcctctttaaaggaatatacttgcacaaggaaggatgctcagatattcatgcactgaaaaatgctgtttttttttttttaaaattgcaattaaaggtagaggtagcactcttagcttcttttaatgaaaagagtgaagttgtcaacaccatattgggaaagggcaggtgtacttgagaagatgaggatgccatagtatcaagttgtttgttaaacactgcttttagtttaataactggattttgatgatgacctgaaaatggtattaaatatttctaccttacaaatcctgattgtcgttaagcaggagactgctgttttagttgtttgttgttaaatggtaaggatttggggtttcctttataagtcttgtatcgttggagagcttgttttgaaaacatgaagtttataatgaatgttgcttcggttgttaaatttatgggtataggtaagtcattgattgcagaatcagaatcacaaagcaaacgtgttaagtgtgttactaatacacttaattcatatacacttaatatttattatgccatgtcaaaatttattgaaaacaatgcagaaaaatactctgatacagtacaatgagagaattgcttttctaaaacctgtagcatagaattatttggtgttttgaaataataattccctgtcacctaggaggaagagagatgagattacagcctgagatctgagaagctttcagagttgttggccgtaacatgagtagtaaccttgccaaatatgtatatatatatatatatatatttaaaaataagcatttttaaaatgttcagagggcaacacttagcttgctctctcagttaatccggagcagtgactcaggacttcacaatgcagtaagaaatttagaaattgagggcttgagcaactgaagagagaatgattccccatcaggaaaaatggctccatgtgtatttttactcattgtggtgcacatttcaagttttcttgcaaattgttttataatctttgatgttaagtaatattttgaagtatggctttgaaattaacagaaaatggagtgttgagaagcatacagtattatctgtttaatagttttggtgttggcaaattttcctgtcccagtaccagaatgccaaaggaggaaacaatcaagggaaaaattttaggccatttcttaatgtttaagatttgtcattttaaaccataatttttcttagaacatctttgaaatttctaatcactttggtcatttaagaatgagagctgtgatgttttgatttataaaggcaaacttaatgcaaagtgggtaacgctaaatccatagcaaagtttttattaaattttataaatttttactagttaattatgtcctaattgtattttggggaatgaacagcagtcaataccacagacttaacagttttcatcattttttaaaatatatatacaaaagtgtaagtgctttttggtgttaatcaaactgtttagttgacaaggtgcctattgcctataccattgttgagattttctttaagtattttatcaatagatttgctaaattatattaaagtctccaaaaaatgaaatgtttattcttattcttatttttactcttcattaaattttatgtgatatcattagccctgctccaagggcaaatttttcaaattcaatctgggtgaaatatttgctagtttacaaaagatttgctatcataaactcaagctggctcttctgttttcatgtaaacgactggggtgctgtcacaagttctcccaagtcacagttatggaagaaacattgtttgagagcgttcctgtcatctactctctgtgtggtctggagttcctaaggtgtagtctatcctcatggtctgtacagttttgaatgtgcaccactacatactgaaatgatactgtacagttttacacgggagcagtttctgtatgcagtaggctgaaatattttgatgatttttgggattttaatttttaagttgtataatttattttcttgctaaaataaaagtgtaatataaaagctttca

SEQ ID NO: 91 - DNA, 3840 bp, Cricetulus griseus
ggtctctgggctgctccggcgcggaggggtggccccgagggccgcgaggcggcctgcggcgctgtggtgcctgggtcggcttgcagtcgagccccggggcgcaggaagccgctcttcctctccagcccccgccctccccgctcggcgcacacctcctccctgacgcatttttgccgcacaggctgtaatatggcggcagcgacggcggccttggctcccgggagctaggttcgtttcggatgctttcaaaccgtgagaccgagcgctgctgcgcggagcaaaaggattggctcagttgtccttggtggatttttgggttttttgtttccaccaatttaaagactgaagtgttggaaccatgggaataaaggtccagcgtcctcggtgtttttttgacattgccattaataatcaacctgctggaagagttgtctttgaattattttccgatgtatgtcccaaaacgtgtgagaactttcgttgtctttgtacaggtgaaaaggggacagggaaatcaacacagaagccattacattacaagagctgtctttttcacagagttgtcaaggatttcatggttcagggtggtgacttcagtgaagggaatggaagaggaggagaatctatttatggaggattctttgaagatgaaagttttgctgttaaacacaacaaagaatttctcttatcaatggccaacagggggaaggatacaaatggctcccagttcttcataacaacaaaaccaactcctcatttagatgggcatcatgttgtttttgggcaagtaatctctggtcaagaagttgtgagagagattgaaaaccagaaaacagatgctgctagcaaaccgtttgctgaggtgcggatactcagttgtggagagctaattccaaaatctaaagttaagaaagaagaaaagaaaaggcataagtcatcgtcttcatcatcatccagtgattctgatagctcaagtgattctcagtcctcctctgattcttctgattctgaaagcgcttctgaagaaaaatccagaaaaagaaaaaagaaacataggaaaaactcccgaaaacataagaaggaaaagaagaagcgaaagaaaagcaagaagagtccatctagtgaaagtgaagcagaaaatcttgatgcacagccccagtctactgtccgtccagaagagatccctcctatacctgaaaatagattcctgatgagaaaaagtcctcctaaagctgatgacaaagaaaggaaaaacagagagagagaacgagaaagagagtgtaatccacctaattctcagcctgcttcataccaacgacggttcttagttactaggtctggcaggaaaattaaaggaagaggaccaaggcgttatcgaactccttccagatccagatcaagggatcgttttagacgaagtgagacccctccacattggagacaagaaatgcagagagctcaaagaatgagggtgtcaagtggtgaaagatggatcaaaggggataagagtgagttaaatgaaataaaagaaaatcaaaggagcccagttagagtaaaagagaaaaaataaccgatcacagacacatgtctgagagtccaaacagaaaaatagaaaaggaaaagaaagttaaagaccataaatctgaaagcaaagagagagacatcagaagaaattcagaaaaggatgataaatataataaaaacaaagtgaagaaaaggggcaaatccaaaagtaggagtaagagcaaagagagatccaaaagtaaggaaagagaatcaaagcataacaaacacgaagacaagaggatgaggtcaagaagtaaagacagggatcatgagactattaaagaaaaagaaaaacaggtggattctaaagggaaagatcaggaaaggagtagaagcaaagagaattctaaacaggtagaatcaaaaagtgatgagcatgatcatagcaaaagtaaagaaaaggatagacgtgcacagtctaggagtagagaacgtgatctaactaaaagtaaacacagttacaacagtagaacaagggagcgaagcagaagcagggacaggagcagaagagtgcgctctagaagccatgacagagatcgcagcagaagcaaggagtaccacaggtacagagaacaggagtataggagaagaggaaggtcacggagccgggatcgaagaactccaggacgatcaagaagtaaagacaggaggagaagaaggagagattcccggagctcagaaagagaagaaagtcaaagtcgaaacaaagagaaatatagaagccaagaaagtaagagttcacacagaaaagaaaattctgagggagaaaaaagaatgtactctaaaaatcgtgatcataatagctcaagtaataacagggaaaaaaaggctgatagagatcaaagtccagtagtgttgaaaccaaaacagagcagtcaggacaatgaaaaagtcaggaggacgagaagaccagatccccagtggaaaaagaaaaccaaaaatcaaagggtcaagaaaatgaccatgtacatgacaaaaataaaaaatgcgatcatgagtcaagccccggaacagatgaagacaaaagtggatgagtgagttgtgtacacttatttccttcctgtctcaaattttaagttttcgagacttactgttgaatctcttttttgttgttctcattgttttggggttgttttatgtttgtctcccccccccttttttttttaaatgtggacttcattgagttgatcttttgataatctgctacctggataatttgtactgctaaagttttaataaacttgaaatgaaaaaaaaaacaagagctataaaaaacgagatgaatgctgtttttgctttatgtgccagttgagcttgagttgctgttatacagcatttgataaaaattataccttggaagatcagactataatttttaattatttgttgcttttgatgtgaaggactgaaattgttgctttttagaacattacccttttctacaatttaaaaaatatatttctcattaaaacatactacttgtgtaggtacttcttaagctagggattctaaaaagcgttagtattggaaataagatttccctattttggcttttagcctgtgtcacattgagtgttaattctgcatggtttggattttggttttttgtttgtttgtttgtttgtttaaacttggactaacttctctaattctcatagctgtgaatatgaaatgtcaagaagatgcatctttctatatatgtactatgataggctgcagcatgtttgtgactctggtttctttctgttcagatgggctttagaccagtttattgttaacattattttaacttggcatgtataacattgccatatagagtagaatagaaagttgcaaaatatgataccttacagagttaaacactaaacatatgattattatgctaagatatattggctatgtagctggtacagaatgaagggtgcagtgatttttaaactgtttggaatatcctaaaatacccatggtgtattctttacaaaattgttttccttgatgagaaaagttagtatatatatatgacctgttacatgtcttaaaacaagttgattatgtcttagattcagtgaattgtgttttaaaatatatcctaaactatctgatctttaagaaagaaatttctacgaacattttaaaaatccacactaagtaaaatactttttttcccctctggtcctagagcttttatctgttagcatatatataaacaaggactttccagttctttaagaaagtaggcatggaagaaaattagtaatgtctgtaatatcctcc

SEQ ID NO: 92 - DNA, 3839 bp, Cricetulus griseus
  modified_base (2931)..(2931): a, c, t, g, unknown or other
  modified_base (2940)..(2940): a, c, t, g, unknown or other
  modified_base (2943)..(2943): a, c, t, g, unknown or other
ccagatttctctgaagaccctacctcctcaggagccgtctctcaggtgctggacagcctggaagagattcacgcacttacagactgcagtgaaaaggacctagattttctacacagtgttttccaggatcagcatcttcacacactgctagatctgtacgacaaaattaacacaaagtcttcaccacaaatcaggaatcctccaagcgatgcagtacagagagccaaagaggtgttggaagaaatttcatgttaccctgagaataatgacgcaaaggaactaaagcgtattttaacacaacctcatttcatggccttacttcagactcacgacgtagtggcacatgaagtttacagtgatgaagcactaagggtcacacctcccccgacctctccctattttaaaatggtgattctccagaaagcgccaacggagacatggacatggagaatgtgaccagagttcggctggtacagttccaaaagaacacagatgaaccaatgggaatcactttgaaaatgaatgagctaaatcattgtattgttgcaagaatcatgcatgggggtatgattcacaggcaaggtactcttcatgtcggtgatgaaattcgagaaatcaatggcatcagtgtcgctaatcaaacagtggaacagctacaaaaaatgcttagggaaatgcgggggagtattaccttcaagattgtgccaagctaccgcactcagtcttcatcctgtgaggacttgccgtcaaccacccaaccaaaaggacgacagatctatgtaagagcacaatttgaatatgatccagccaaggatgacctcatcccctgcaaagaagctggcatccgattccgagttggtgatatcattcagattattagtaaggatgaccacaactggtggcagggtaaactggaaaactccaaaaatggaactgcaggtctcattccttctcctgaacttcaggaatggcgagtagcttgcattgccatggagaagaccaaacaagagcagcaggccagctgtacttggtttggcaagaaaaagaagcagtacaaagacaaatatttggcaaagcacaatgcagtgtttgatcaattagatcttgtcacatatgaagaagtagtcaaactgccagcattcaaaaggaaaacactggtcttattaggtgcacatggtgttgggagaagacacataaaaaacaccctcatcacaaagcacccggaccggtttgcgtaccctattccacatacaaccagacctccaaagaaagatgaagaaaatggcaagaattattactttgtatctcatgaccaaatgatgcaagacatctcaaataatgagtacttggagtatggcagccacgaggatgcaatgtacgggacaaaactggagaccattcggaaaatccacgagcaggggctgattgcaatactggacgtggagcctcaggcactgaaggtcctgagaactgctgagttcgctcctttcgttgtctttattgcggcgccaaccatcactccaggtttaactgaggatgaatctctccagcgcctgcagaaggagtccgatgtcttacagagaacatatgcacactacttcgatctcacaattatcaacaatgaaattgatgagacaatcagacatctggaggaagccgttgagctcgtgtgcacagccccacagtgggtcccagtctcctgggtctattaggcttctccctggctatctgagtataaaactgggagcggcctcctatgtggaaaagcctctttgttatcggccttgtgtcagcaggtcgtggtccctagagactacctagttgtagtgtgacctacatttataattattgtcatgtccgaatagataggaggagaaaaacaattacacactaatttaaagagacagtatcttttttaatcagttctcctaaactttaataaaatgtatctttaaatgtatgtattattcaatcctttggaatgttatatttttggaaatcatagctttttatttccaaggcccctaaaaactgcacaaaatagatgctgctttctataatctattttaataataataaacaatgattctgttaccttgactgggggtggaacactacattctttttagagtctgattttatggattggaatatctttctttcctttatttatttgaaataattagtctagtgattacaaaacagtcataaatttttaaaagccttttttctctctttttttgaagtcctttatgtaacacccagatactgtgatactgtctctttgaagcaccctgtaaaccttttagagatttgaagttgggtcttgactcttaatgcatgtggacagtcgcgagcgtttatgctgtcggtgtgtctgtgttggacaaaacaatctgtaattacagcaaagtacattccgttcacggggcacacccaggggaataagaataaattgctattatgactaagttgtaaacctatgcacatcccttgcatttcgggcaactttataaaacagaaaaaaaaaaaactgatttttattaataataatcacgtagtgaaatgtgtttgtaattttgtctcaatttaatttgttgtaaggtgggagggggtattgctggtttcgccatttcagatctgtgttgtctaagagtattaacgttttaattaagcaaagaaatgcggatttttaatctgtatggaattgttttaagctcccatttaaagagaatatactgtgcaatgaagaaaccagtttaggcatttgctataaactgaattattccaaaagaataatctataacagctctgtaaattcctttaaaatgataactaacaggacagtctgacctattttttttaaatatacttcattgtatgtgttcaaataataaaatttttttttttttttttttttttttttttttntttttttgnganaaagttaattgccttaatcttgtgggaagtctcagattgcccagcttacagagtgaagttcagctatcacatccatccaggaagtaggggaaaagagggacagtgtcccaaccttcccatttgcacttcctgtgggtgcccctggccccacagcagcagcatctgtatagggagagagcagcagcatccctggggcaggcatccccaagtcttagctgttagagggatgggagagaacagcctgacttcccaccatgtgtcacctgaccctccattaactcccttgattgaacctgtgcaaatggaccaagcaaaaagaaatggaaggagatgtttgcagccacaatttttcatttggcagagaccaagaattgggggttggggttgatttccagtcttaatgtcgcctgggatgtcctctgcaggcaggtggtgctgagaccacagcatcgtgtttcagtgcagtgtaggtgcattgccattcagactcggttctggggtggttttgcttaaagctttgccaacgtgttctttctttctgtatgtattattgcctttttataaaaggttttgaagtattgtctcagtgataaaaagagagagatgttaatggttgttgtatatttcaccgtatccgattgtaagtattcgcagggtacagcaaagccttagcttgcaagaggagctgaaggggttggaaaggttcggattctttgtaaatgtcctgcttttctttctctctgtgtgtatctatttacatgccttagcacacgccctcccatcccaatccctttgccctgtcacctgaaccaaccacagtgctggtggcagtgccagcacagtacaagtcgaaaccctaatcagttatctcgtgtgacagggggaagaaagagaaa

SEQ ID NO: 93 - DNA, 3839 bp, Cricetulus griseus
aaccccaattgtttagttggaattggcgaacatgtttggttaggagaaatagatgagaatagttttcataacattgatgatcccaactgtgagaggaggaaaaagaattcgtttgtgggcctgactaacctgggagctacctgttatgtcaacacctttctccaagtgtggtttctcaacttagagcttcgacaggcactgtacttatgcccaagcacctgcagtgactacacaatgggcgatggtgtccgtggaggaaaagattatgaacctcagacaatttgtgaacatctacagtacttgtttgctttactgcaaaacagtaacaggagatacattgatccttcaggatttgttaaagccttgggcttggataccggacagcagcaggatgctcaagagttttccaagctctttatgtcactgttggaagacactttgtctaaacagaagaacccagatgttcggaacatcgtgcagcagcagttctgtggggagtatgcctatgtgactgtttgtaatcagtgtggccgagaatctaagcttttatcaaagttctatgaattggagttaaacatccaaggccataagcagctaacagactgcatctctgaattcctgaaggaagaaaaattagaaggagacaatcgatatttctgtgaaaactgccaaagcaaacagaatgctgatatggagccttatgtggagcataaaggtgggtcctttgtgtatgaactcagcgcggtcctcatccacagaggagtaagtgcttattctggccactacatcgcccacgtgaaagaccctcagtctggagaatggtataagttcaatgatgaggacatagagaagatggattgaggaagatctagcagagccttctaaatcccagacccgtaaacccaagtgtgggaaaggaactcactgttctcgcaatgcatacatgttggtttatagactgcaaacccgggaaaagaaccacacaatggttcaagtcccagcctttcttcaagagctggtagatcgagacaatttgaaatttgaggagtggtgtgttgaaatggcggagatgcgcagacagagtgtggacaaaggcaaagcgaaacacgaggaggtgaaggagctgtaccaaaggttgcctgctggagctgagccctatgaatttgtctctcttgaatggctgcaaaagtggttggatgaatcaacacccacgaaacccattgataatcatgcttgcctatgttcccatgccaagcttcatccagataaaataccaattatgaagagaatttcggaatacgcagctgacattttctacagccgatatggaggaggtcccagactaactgtgaaagccctttgtaaggactgcgttgtagaacgctgtcgtgtacttcggctgaagaaccaattgaacgaagattacaaaaccgtcaacaatttgctgaaagcagcaatgaagggcgatgatggattttgggtgggaaagtcttccttgcgcagctggcgccagctggcgcttgaacaactagatgagcaagatggtgaggcggagcaaagcaacgggaagataaacgggaccccttcaataaagatgaatcaaaagaagaaaaaaaagaagaggaggatgaattaaattttaatgaagacatcctgtgtcctcatggggggttaagcatatcagaaaatgaaaggaggcttgtttctcaagaagcttggaacaaactgcggcagtatttcccaaaggcccctgagttcccaagttacaaagagtgctgttcccagtgcaagatactggaacgagaaggggaagaaaatgaagccttacataaaatgatcgcaaatgaacaaaagacttcacttccaaatttgttccaggacaaaaatagaccgtgtctcagtaactggccagaggatacggactgtctctatattgtgtcacacttctttttagacgaatggcgcaaatttgttagaaagcctacaaggtctactcctgtgtcgtcaattggaaacgctgctcttctgtgtccacatggaggactcatgtttacattcccttccctcaccaaagaagactctaaactctgtcaacctttagagagaagagaaggaggctggcccactgcagcacataataatatagctctcatatggcccagcgagtggcagatgattcaaaagctctttgtcgtggataaagtaatcaaaatcacgagaattgcagtcggagatgcgggcccttctgaagtacagtatatttctgagcctaaactctgtccagattgcagagaaggcctgctgtgccagcagcagcgggacctacgagagtatacccaagccaccatctatgtccacaaagttgtggacaacaaaaaggtgatgaaggactcagctccagagttgaatgtgagtagttctgagacagaagaggacaaggaggaaactaagccagatggagagaaagaccctgactttaatcaaagcaatggaggtaccaagcgtcagaagacctcccagcagggctacgtggcgtaccagaagcaggtcatccggcggagcacaaggcacagaaaggtccgaggagagaaggcgctgctggtgtcggccaatcaaacattaaaagaactgaagattcagatcatgcatgcggttttcagtagccccctttgatcagaacctgtcgattgatggaaagattctaaatgatgactgtgccactcttggtaccctcggcgtcattcccgagtctgtcatcttactaaaggctgatgaaccaattgcagactatgctgcaatggatgatgtcatgcaagtttgtatgccggaagaggggtttaaaggtacgggtctgcttggacattaatctctgaccacttgctgactgccaaggaataaccagaaaggaagaggaatttgaaatgttagggcattaaagaaaaagtggatttaaaaattaaactattacccggctcttccaaaaggcaaaaatccattcaaagagactgtcccaattgccttatgtcaataaagcagattgcactgatggacatgagacttgaaggaaatgtttcagatgattttctatttaagtggtggtggggagggagcgggcgatgaagcagagtagcagtaagagtaaatcatgtttacacaacaaggccattcccaagcagcttaagatccccgggctgtggcttcctcacagcttgaagtagacaaattttggagatgataccttgagctttatagttgccatgttcctgctcattaatatgtgctgtttggttgtcttctgagatgggatggccttaaagcataggctcgctgttctgctgggttatagcgctgccttcagaaacggcattaaaccagattatgacactctgggctcctcctttgtatgtttcctgtttctttcccagacagggtctcctgtaactcagggtggcctcagactcactgtgtaaccaggataaccttgaacttctgatcttcctactttctcccaggtgctgggattgcaggctcggggcccactgtgacaggtttccatgtgctgaggtcaaagcacagggcataatgcaggctagacaaacattctgcttagtgacctacatccccaactctcccttttatatttctgatcactctttaatcccatgcaaatatgtagagtcgcctgtgctgaaacagttaccacacatgtaggctatcatttgatgtcttcattccttgagagagcgagcgctttcttttctgtatttatggactttattgttgagaatcactgttaacctttctgccaaattaaagacacttagtgtctctgtttccac

SEQ ID NO: 94 - DNA, 3835 bp, Cricetulus griseus
  modified_base (218)..(218): a, c, t, g, unknown or other
  modified_base (264)..(264): a, c, t, g, unknown or other
ctggatatgagagcaagcactcttgatgaaatagcagatatggtgttagacaacatgatagcctctggccagttagatgactcctgcctgtatgtctcctgtaatcacttttggagggctgcttggagaagctacagaaggcagaataagtgcaatagagtctctttttggagcatcattaactgggattgcctattcattgtttgctgggcaacctntaacaatactggggagcacaggttccagtcctagtgtttgaaaagnttttatttaaattctgtagagattatcagctttccccagtattggtctgtggacttctttcttggtgcattgtattggttgcaacagatgcaagcagccttgtgtgttacattactcggtttacagaagaagcttttgcggctctcatttgtatcatattcatctatgaagctttggagaaactcttttcatttaggggaaatatatgcatttaatatgcacaacaacttggatgaactgactagttacacatgtatatgtgctgagccgtctaaccctagcaatgaaactatagaactgtggaaaagaaagaatgtgacagcagacagtattctctggggaaacctcactgtatccgagtgtaaggccttccatggaatgtttgtgggatcagcctgtggtcctcatgggccttatgttcctgatgtgctcttctggttgtgttgtcctttttttctacgtacgttctttctgtcttcatttctcaagcagttcaagaccaagcgttattttcctaccaaggtacgatcaacaatcagtgactttgctgtgtttctcacaatagtaataatggttgcaattgactaccttgtaggaattccatctcctaaacttaacgttcctgaaaagtttgagcctactgatccaagtaggggctggatcataagccccctgggagataacccttggtggacattactaattgcagctgttccagctctcctttgtaccattctcatcttatggatcaacagattacagctgtaatcatcaatagaaaagaacacaaactcaagaaaggagctggctatcaccttgacttgctcatggttggtgtcatgttgggagtctgctctatcatgggcctgccatggtttgtggctgcgacagtgttgtctataagtcatgtcaacagcttaaaagtagagtccgaatgttctgctccaggggaacagcccaagtttctggggattcgtgaacagcgggttacagggctgatgatttttatcctgatgggcctctctgtgttcatgacttcagttctaaagtttatcccaatgccagttctatatggtgttttcctttatatgggagtttcatcattgaaaggaattcagttttttgaccgtatcaaactatttggaatgcctgccaagcaccagccagacctgatctacctccgctatgtccctctgtggaaggtgcacgtgttcactgtcatccagctgacctgcctcgtcctactgtgggtaatcaaagcctctgctgctgcagtagttttccccatgatggttcttgcactagtctttgtgcgtaagcttatggatctgtgtttcacaaagagagaactcagttggcttgatgatctcatgccagaaagtaagaaaaagaaagaagatgacaaaactaaagtacagtattgacccttcagttgttaacatatcagatgaaatggccaaaactgcccagtggaaggcactttccatgaataactgagaatgccaaagtaaaccaagacctaacacgagccctgaaaagacctgtgagtgtgacaataaatttacgtaagaatgaacctggagactttctaggtaggaacgttatgtcttaggagttacttttaaagtttaaaacttatctgggcttccattctgatggacaaataaacaaaatatatgtgacttctaatttaacacccacaccattcataatgttttgagttttagaagctataaagttcccatttgtagtagttaaattttgttacctttgtagcaaggcttttccagtattcatacttttctagaaacccagagtcccactgttccctgtctttgctgtcttttactaaaggggtctagtgacatcaggttcagatatctttctgttgtaagtagtaataaagagtcagctttgcatctaagtgtttctactgtggttttggttattaatggcttctcctttcttttgactacttgacttacaaagtgatctgatatgactactcctctgaagagcagagggaattaactgcttctttcagatggttacattacacatgctatttttggaaataacaatcatgaataacactcattgcaagacagcaagagagataatttactatatatatatatatatatatgtgtgtgttatatatatatagatacttaaatgctgccttaaataggtgtatatgagcagtagtaattgctgtgtactgatttacctcaaggtgcaaaataattaaacttgtacatatccattcaacaaaataaattcagagaaaagtcctgcactttcttagatgccttgattttcatagtagagcttagtgctactgaacaccatggccatggagccacctcaggatactcttccctccaccatattttatttatttatagatgtgtgtttacagagactataataaatcctggtgttacctatctgaaatttacttcctttttattgctgtttcaatctaaagtaggagcttttgagaaaacagtcaactagcttcatgatgctaaaggggtgattctatatatataagtccaaggtctttaaacattgtgttgagttttcgtgtatgtgtatgaaaacactcttaactctcaactttttttaaacttgtggcgtacataccaatgttcagacttgccaagctttctataagacatgtaggatgtaaatgttttttgtgtgctaatgcatgtatttataatgatttgtttactgctgagaatcactatctcttgtttctccattccccaaagtgtttgtttcttccatacactgaaagttgtggcctgagtatataagcgttctggctttccttttacaaaggcaggttcacagttctgcagaaagaatggtctctgacagtgcggtgtcacaccagagcttcctgatgtctgaaatttattcatgtaggtttcaacattcgtttcatttgtagtgcaaacatgtgaactgtctttgtttagtccaacaattatttatttttagaaagtaaatttaaagactaaactatgctcaaattttcaaatcacaagatctgatcattttaattgtaaggtctcttttaactttctggaaagtaaattttcaaataaaatcatgtaaagagtattttaaatttttaacctatacttagagtttaagccccagttctgtggtttttaatcatattttttgtcacattgattgcttctgtgttagtctttttctttttgttccttttgttttggctttgtaggggtaaggtgtcttccattgtttactatattaggcttaaattaaaattaagatttattgtccgtttatataatatttgataccttggtgtgatttcccaatacagttacaattttttatggtgtttataattgcaatggtattttcttttgtaataaaatccaaagtcaattaaaacaaaattgtagacttgatatttttcatttacctgaagtacaagtctcatccagagtctataatgtgaaccttcctgcctttcactattttgtttcctaattattagagaaaactatttttatagatgttattg

SEQ ID NO: 95 - DNA, 3832 bp, Cricetulus griseus
attctctaattttatggcctggagtgaagtgactgatcctgagaaaggatttatagacgatgataagtcacctttgaagttttgttcaggcggatgctcccatggagttgcgtgggactcaaagaagcatacgggctatgtcggcttaaagaatcagggagctacatgttacatgaatagcttgctgcagactttgttcttcacaaatcaactacgaaaaggctgtgtacatgatgccaacagagggcgatgattcatctaaaagcgtccctttagcattacaaagagtgttctatgaattacagcacagcgataagcctgtaggaacaaaaaagctcacaaagtcatttgggtgggaaactttagatagcttcatgcaacatgatgttcaagagctttgtcgagtgttgcttgataatgtggaaaataagatgaaaggcacatgtgtagaaggcaccattccaaaattattcagaggcggcctgcaggaagcagagaaaggtgtgaaattcctaacattgccaccagtgttacacctgcaactaatgaggtttatgtatgaccctcagacggaccaaaacatcaagatcaacgataggtttgagtttccagaacaattaccacttgatgaatttttgcaaaaaacagacccctaaggacccccgcaaaattatattctccatgcagtcctggttcacagtggagataatcatggtggacattacgtggtttatctaaaccccaaaggggatggcaaatggtgtaatttgatgatgacgtcgtatccaggtgtactaaagaagaagctattgagcacaattatgggggtcatgatgatgacctatctgttcgacactgcacaaatgcctatatgttagtgtacatcagggaatcaaagctaagtgaagtgttacaagctgttaccgaccatgatattcctcagcagttggtggaacgattgcaagaagagaaaaggatcgaggctcagaagcggaaagagcggcaggaagcccatctctacatgcaagtgcagatagtcgcagaggaccagttttgtggccaccaaggaaatgacatgtacgatgaggagaaagtaaagtacaccgtgttcaaggttctgaagaactcctccctggcagagtttgttcagagcctctcccagacaatggggtttccacaagatcaaattcgattatggcctatgcaagcaaggagtaatggaacaaagcggccagcaatgttagataatgaagctgacggcaataaaacaatgattgaactgagtgataatgaaaacccttggacaatattcctggaaacagttgatcctgaactggctgctagtggagcaacattgcccaagtttgataaagatcatgatgtaatgttatttttgaagatgtatgatcctaaaacacggagcttgaattactgtggacatatctacacacccatatcctgtaaaatacgtgacttactcccagttatgtgtgacagagcaggatttatccaggatactagccttatcctctatgaggaagttaagccgaacttaacagagagaattcaggactacgatgtgtctctcgataaagccctcgatgagctgatggatggcgacattatagtgtttcagaaggatgaccctgaaaatgataacagtgaattacccactgcaaaagaatatttcagagatctctaccaccgagttgacgtcatcttctgtgataaaacaatccccaatgaccctgggtttgtggttacattatcaaataggatgaattattttcaggttgcaaagacagttgcacagaggctcaacacagaccccatgctgctgcagtttttcaagtctcaaggttatagggatggcccaggtaatcctcttagacataattatgaaggtactttaagagatcttctacaattcttcaagccaagacaacctaagaaactttactatcagcagcttaagatgaaaatcacagactttgagaacaggagaagttttaagtgtatatggttaaacagccaatttagggaagaggaaataacactatacccagacaagcatggctgtgttcgggacctgttagaagaatgtaaaaaggctgtggagcttggtgacaaagcgtcagggagacttaggctgctagaaattgtgagctacaaaattattggtgtgcatcaagaagatgaactattagaatgtttatctcctgcaacaagtcgaacttttcgaatagaggaaatacctttggaccaggtagacatagataaggagaatgagatgttaatcacggtggcgcatttccacaaagaggtgtttgggacttttggaattccatttttgctgaggatacaccagggcgagcatttcagagaagtgatgaagcgaattcagagcctgctggatatccaggaaaaggagtttgaaaagtttaaatttgcaattgtcatgatgggccggcaccagtacatcaatgaagatgagtatgaagtgaatttgaaggactttgagccacagcctggtaacatgtctcatcctcggccttggctagggctcgaccacttcaacaaagccccaaagaggagtcgctacacttaccttgaaaaggcaattaaaatccacaactgacttcctgccttcccgtgtccaaggcgagggacagctcgtgggtgtgtgccctttttaacagccgtagaactttggtacacgtgcactctagccgaagtctccagcaagaggatttgctgctgatgttttattttgttgaggctgttcagtttggcttctctgtatctattgactgccctttttgagcaaaatgaaggtgtttttataaagcttggatgccaatgagagttattttatggtaaccacaatgcaaggcaaccatcagcatcatggggagaagaggttcctgggatgcgagtcctggcagaggtgtctggttggtgcgggcagtctggccccttgcttgggtcctgcacaaccctgcagctagagctagtcaggccagtgtgtaggcttgtccaacttcttccttcagttagactttcagtgacctgtgtgcatctaaaggcaaaccagagaaacaaccctactcaaaagtgctctctccttcactgtgtgcgtcgctggcccttcctggggtttctgtccttggctgctggggctgtttaataataaatgtctcacttcgtcagccagtactgttcggcagcccatttgcaaagtggacacactgaatccagtgctgacagttaggggtctttttatacactgagaacattgtcagatacaattaaggtttactctgttgcctcttggcaaatgcaatgatctgagcaggtgaaagaatcactctaggttcctgtgaggatggagtgggcgagcgacaaaggagagagccttttagcaagagcgcatgctcgctagtggttagtaagctgttgactttgtaaaaaagataaaataaaaaaggaaaaaaggaaaatgaaattgtatatttaatgaatgaaagctgtacactttgcccctgggaggaggtcattttctgttgggtgagtgcaagtgaacttggccaacttggacactctgtgcgtagctttatttgagtcctctcctcgtttccctttatttgaagctaatgccagctgcgtgtctagttttgagtgcaaatagaatcagcaagccacacttcttttccctccctccccagtacttctgtttgtttctgtagcagcagtgtacaccaactctcctgtatattgcctttttgctggaaaatgttgtatgttgaataaaattttctataaaaattataat

SEQ ID NO: 96 - DNA, 3795 bp, Cricetulus griseus
  modified_base (635)..(635): a, c, t, g, unknown or other
aacccagagaactgctgccaacggtcaggtgtgcagatgccaactcccccaccaagtgggtacaatgcctgggacacgcttccttccccaagaactccaaggactactcgctcttctgtcacctctccagatgaaatcagtctgtctcctggggacttagatgcctagtttgtgtgactatttgtatgtgcagtatctctgttatttgaagatccagtggacatcgccctgtggacatgatttttgtcgaggatgttgggaatcgtttttaaatctgaaaattcaagaaggtgaagcccataatatttctgccctgcatatgagtgctttcaacttgtgcctgtagatattatagaaagtgtagtttctaaggagatggacaaacgctactacagtttgatattaaggcactaactcgaagccttgtgcgaactgtaagtctccaatacagaagaatgaaggttgcaatcatatgcagtgtgccaagtgcaagtatgacttctgctggatctgcctagaagaatggaagaaacacagttcttccactggcggctattacagatgtactcgctatgaagtcattcagcatgtggaggagcaatccaaggaatgacaggtgaggctgagaagaaacntaaacggtttcaggaacttgacagatttatgcattattacacaagatataaaaccatagagcatagttatcagttagaacaacgccttcttaaaacagccaaagaaaagaatggaacaattgagtagagctctcaaagaaactgaaggcggctgtccagataccactttcatcgaagatgcagtgcacgttctcctaaaaactcgacgcatcctcaagtgttcttatccatatgattcttcttagaacctaaaagcacaaagaaagaaatattttgaactaatgcaaggtcactgaagaccttgcccaaaaagtcaataggccttatctccgtaccccccgccacaagatcatcagagcagcgtgccttgtgcagcagaaaaggcaggaattcctggcgtctgtagctccttggatgaagacgaccccaatatacttcttgccatacagttgtcacttcaagagtctgggctatccatggatgaagaaaccagagacttccttaataacgaagcatccctaggagccataggcacttctttaccttctcggctggactctgtacccaggagcacagacagtcctcgggctgcgctgagcagctctgagctgctggaacttggtgatagcctcatgagactaggagcagacagtgacccattttcaactgagactttgagttcacgacctctcagtgagacacgaagtgatttctgtccctcttccagtgaccttgactcagctggccaggaccccagtgccaatgacaatcttcttggcaatattatggcttggtttcatgacatgaaccctcagagcattgccctgattcctccagcagcagccacggaaatgagtgcagagcctcagcttccctgtgttggagctgccccagaaggtgtgaggggcgtgggactggtgccaccaggagaccccagtgtccaaagacactgctgtccatgagggtgaaagaacccagatggaagaaaaccctctggaagagagtattctggccagggaagagttgtctcaagctggtgacagtagtaatgaggcagacagcagaggggacgggccagatgctgccagtccaagccctcagacctcaactgactggctcgagcaagtccatctagtgtgaactgcacatatgtgctctccaggtgaatcgcagtacaggggttatgttaggtggagtatctttatagagacttagatccacttaatttgaactcggttctaaaccactgatgttaggattgagtgcaaaggtgttccctccgacgatagcttcagtgtcaattttacccttacagagaatttcttttgtgtttttccctttttagtgacaaagaggagcaggagaaaagagtggaataaatgggttgatgtccacattctgagagaatgcagtgctctgtctagccgagagttggcagtaaggtgagcagcatcccagtgtgctccagggcagtgtcagcgttgtcgggagtaaaaggtgccactcggtagcaatgatgttccagaatttaatgggcttttgttgccatggagactgcatttaaataaatgtagcctgtagcttaagtaaactaaagctaatgctgctgttaaaacagtttattttaatattaaaatacagttgattagcaacagcggtgctgtatttaagagacactttattggaagtgcaatcatagttctttgttttcacaattttacagtgcattctaattactaacgggtgcaattacttttaatggtgttttataacatagaaaaactggagttttcatgagttacagtaaatcccacagttattaaaaaattcaatacaacatcctacgcaacatgttaccgtgcctttgcctaacctaaatggatagttgccagttaagtaagtcagtaactcaaatttcaatgtctcttctgaagtaactatgctatgaattgcaaagacctccataaaaccacccatggccttgcctttacagtaactatgacaactaagtgttcagtttgtttgcctagatagcaaatgctgctgtgtttgttctcttgtgcaatactcatctgctatgtgatcactgtttagtactgaaaactcaacctcctagttatcagtgtcctgctgtgaagaaatactggtcttagttgtaattaagatacaatggtacagtgtgtaattaaaactagagtaaactgttggaatggctcttttacttactattattaaagctaatataacataagcaaaatagatccaaggagcactccatgtaagtgctttgccactattaccagaaaccagaatgtctatgctgaagtgatatcaagagtccctaatagttttaatttcttccgggtatcacaacattgatatgaatccctttaaagtttagtgggggaaatactaactttgtctacagtgtattactatatattaaactgaaatagtcaaaggatttttttttaaattttggatttaataatatgaacaccataaagtttctagaccagggtgaacttttccagtagaaaacacttgcatccctagaggaattttgcacagccacagtgaggagaggaagggtgccctgaggggaggaggggtgtcctgtggagacccatgtgagctgggttcctgtttccttgccttgtgcggtacctgttgtgatgtgctgggctcctgagtgtgaaaaatctatcattttccagtttgtatttccttggtacatatttaaaaacaacacagtcatgactttccaattcagtaataaagtttggcaaagcctattttgtaaacaagttaattttataatgtaaaaaaaaaagttaatactaaccttgacttgttatttgcactttcatagtctatacttgatacattcccactttatatacagtaggagtctacagacctgtagatgtttggccaaatgaatgctgttaataatatgtaaaattctttgattaaacatttattacttaaactatttccattttgtctcattaaatcatacacttcattttaaactaactaggaagcaaattttgctttatattaaataccctccaggtgatggtattaattggttctgccatttaattgatttagtgcctatatttttatagtagcccatttgctgaatgttgtatac

SEQ ID NO: 97 - DNA, 3792 bp, Cricetulus griseus
atgatgtagttaagattgtgaatctagcatgcaaatataacctttgtatcataccaattggtggaggaacaagtgtatcatatggcttgatgtgtcctgcagatgagacaagaacaataatttctttggacacttcacaaatgaaccggattctctgggttgatgagaacaatctgacagctcacgtagaggctgggataacaggacaagagttggaaagacagcttaaagaaagtggttattgtacaggtcatgaaccagactccctggaattcagcactgtgggaggatggatatcgactcgagcatcaggcatgaagaaaaatatctatggcaatattgaggacctggtggttcatatgaaaatggtaacacctagaggagtaatagagaaaagctcccaaggacctcgtatgtcaacaggccctgatatccatcacttcatcatgggatctgaaggaactcttggtgtaataacagaagctacaataaaaatcagaccaacgcccccaataccaaaagtatggctcggtagctttccctaattttgaacaaggagtagcctgtttaagagaaattgcaaagcagagatgtgctcctgcatctatccgcctcatggacaaccagcagtttcagtttggtcatgctcaggtgcatgtatctacttctattttgcctttaactacaggggaattagtgacccactgactgtgtttgaacaaaccgaggcagctgctagagatgaaatccttgccaatggagggagcctgtcacatcaccatggagtgggcaagttacgaaagcagtggctaaaggagagcatctctgatgtcggctttgggatgctaaagtctgtcaaggaatatgtggaccccagtaacatctttggaaacagaaaccttttgtaactccatggatagcattatgaaaaatgttacctttttaaagtcatcagctatggttataccagtaatcaaatatatcaaggactgtacatttgtttgttggtttcaaaattaagttggtttttgtttcttgttgtcttttgtttcttacatctatagattgacagatggcgttcctaggtctctctctattgtagatgttacccgtttatagtccaactaactggttgtctatttcagattttagttcaggcagcacaaggctgtccgttatctgaagaagatgctgccagctgttttatgtgctcctctaggtgagccgaggcagatggtgtcatctgctgctcatctagcctctcctctgttgtgtcctttcttaaacatttctctaaagcagatatctagcaaagattctgctggggagagatatttgtgtgttgttaaaattgtcctttcctgggagtaggccattgagggagaggacactcaggccagagccagcagtctgttactagcatgccttcatctgtataaggtgctcagcctaagctttgcttgaagtgaatacacaattacaaacttaaattgccaacatacaaattactctgtgagcagacacatttttgtcctcatgtctgtttctagtaggtgtgagttgtatttgtgtcactgtgagtaacctgttgttgtgtcctacaccatccgtagcatgctttgtaagaaaagctgccttagcacaggcgatgggcaggtttaccatgaattgaaggctattgtccgtcccccagtccgcatgtcatgctgtctcatgcttgttgccaagctgcacaggcagctgcagcatggacaaaaggaaggctcctgaacctgctgtctccagtttaaagaattatttggctaaagaaacagtcgtcagttgactcaaagcctctataatttcaatgacaacaatcttttttctctaattagccacaaatagcctgataaattttcatggaaaattagtttcaattcagttcttaataatggtttaatgactttttgaattactggtttaacctaaattttaaaaatgtattactgcatatgccataatcacaagtttgaaatatcctatttcttaaataaaagagactattaatcacatttagcagacatttttacactcacaactggatattgaaataagtggaacaattcttaatgcaatatctaacttttgataattttttaaatatttaatcagataatgtaagtcaaactgcaaacgatcctttaaaaggacacattgtttgtctatgtagccacagctccaaatatattggggcagtttgataccttttatatctgaagtagccttaaacagaacagtgaaaatttaaaattgacaaaatgatatttttaagacttcaaaatgataagtaatttttaactattaaaattggcctcaaactaacaaatttaaatctgtaggaaaaatcaatattaagcattaggttcaatcaatgtttattttttggaagctgcctctttattgatgatttattttcaattataaaatttacatcatatctttgattaaagattttgatggtttgaaatagctggacactcaaggaaatagcctttagaactataagattctttataaaatgcatctcttcatgaaggtgattctctaattggtgattgatatgtaacatttagtaagattccaacatctcactggaagtgtatacatgtttccaagtaattatttttaataaatttattagcatatccatttccttgcatgtgattgttaaaaccttttctccaaggagttcagatttccacagccttggcaatctgtgctgtaagtgtaactttcaacagggatcattttgagacacaagaacattcactagtactgtttcactctggctgtaaatcaggaagccttgccacccacttctgggaggtgcctccaggtagactgtgtctttggaggaacatgagtttatgaatatgcacaaagcacttattaaaccttgcctctttcagaagtgtctgcacgtggcttcatgaagctaaacctaggagaatattgttacccaaagcatcttaactcataggttagtttctttaaaagcctgtttgatattcagaagcacctaacactgacctatccttagattagttatatgtgtgatattttgcttaatgcttacatattgtaggaatattgatctaacattatttatgaatctgaaagccttctagtattcatatttgtgttattagtttattttggaaaacaaaagttcaataaaagacaagcttccatcagtgtgtatattatattagatataaacacatgcaagaaccctccctttttccccctccagaatattgtaaccaagtactagtttgcatatttgaaaaagcctttctgcatgttagtcccagagattttcctttgtcatattctttcgtaccaacagcttctaactatagctgatcagagaagctctgaagtgctgacatgaagtgtgctgctccaaatggagctgggtttggtatcactgtcagaacacagtgatgtagagggacccttcacaccgtgggtgacaatgcctgagcagccacagatgctgcctatggaaggtttatctccagtttgaggagctctgagaaatctagaaagtataaaagttttcttcaactgttgaagtgtgtgtctgacatgaaggatgtaacccagctttctgttcttaagccaaatagtgtttgtcttcagtgtgaaacttaactgtaaaaactgcttgtataatgttaacagattatagaaacattattaataaaatggacatggcctatgattttttaaatcaaaaaaaaaaaaaaa

SEQ ID NO: 98 - DNA, 3777 bp, Cricetulus griseus
  modified_base (2421)..(2421): a, c, t, g, unknown or other
  modified_base (2432)..(2432): a, c, t, g, unknown or other
gagctgaccatcaggaacgtggacaaaaacgatgaggctcgagtaccgtctgcattgctgagaacaaggctggcgagcaggatgcatccatccatctcaaggtctttgcaaagcccaaaatcacctatgtagagaatcaacagccatggaactagaggaacaagttactcttacttgtgaagcctcaggagaccccatcccctctatcacctggagaactcaccgaaacatcagcagtgagaaaagactctggatgggcacatggtggtacgcagccatgctcgtgtgtcctccctgaccctgaagagcatccagtacacagatgctggagaatacatctgcactgccagcaacaccatcggccaggactcccagtccatgtaccttgaagttcaatatgcgcccaagctccagggcccagtggctgtgtacacatgggaggggaaccaggtgaacatcacctgtgaggtctttgcctacccaagtgccacaatctcctggttccgagatggtcagttgctgccaagctccaactacagcaatatcaagatctacaacaccccatctgctagctacctggaggtaacccctgactcagaaaatgactttggaaactacaactgtacggcagtgaaccgcattggacaggagtccttggaattcatccttgttcaagcagacacaccgtcttctccatccatcgaccgggtggaaccatactccagcacagcacaggtgcagtttgatgagccagaagccacaggtggagtgcccatcctcaaatacaaggctgagtggaagtcactgagtgaagaagcatggcatttcaagtggtatgatgccaaagaagccaacatggaaggcattgtcaccatcatgggcctgaagcctgagacaaggtatacagtacgactggcggccctcaacggcaaggggctgggcgagataagtgcagccactgagttcaagacacagccagtccaagggaacccagtgcacccaagctggaagggcagatgggagaggatgggaactccatcaaggtgaacctgatcaagcaggatgacggaggctccccaatcagacactatctggtcaagtaccgagcgaagcttgcctctgagtggaaaccagaaatccggctcccttccggcagtgaccacgtcatgctcaagtccctggactggaacgccgagtatgaagtatctgtggtagctgagaatcagcaaggaaaatccaaggcagctcactttgtgttcaagaccttagcccagcccacagccatcccagccaatggcagccctaccccaggcctgagcaccggcgccatcgtgggcatcctcattgtcatcttcgtcctgctcctggtggtcatggacatcacctgctacttcttgaacaagtgtggcctgctcatgtgcatcgctgtcaacctgtgtggcaaagctgggcctggagccaagggaaaagacatggaggagggcaaggctgctttctcgaaagatgagtccaaagaacccatcgtggaggtccgaacagaggaggaacggactccaaaccatgacggagggaagcacacagagcccaacgagaccacaccgctgacagagccagagaagggtccagtagaagcaaagtcggagtcccaggagtcagaagcaaagccagcaccaactgaagtcaagacggtcccaacgatgccacacaaacaaaagagaatgagagcaaagcatgatgggtacctagcaacaagcaaagatcaaaataaagtgacacagcggcttcaccagagcatccccaaatctctctctctcttacacacacacacacacacacacacacacacacacacacacacacacacacacacacacacacacacacactcattcctctagtgtcttgcctttaaaacaaacagataaacatgggatcgcctttttgtaggtttctagaaagggctccttttgttgcacactcctaaaaaaaaaatgagacaaaaaggttaaacccacagccaaactaggacactccgttccctgaaaccatttaaaaatcaaacaaaaggaccccaaattaagaatctaggaagctcagaaaagaaaaaaaaattttttccttttgagcagcaagtaccccctagaggcaggcagaatcctcccaggttgcttttagcacatggcgaaggttacaaaagatgattgtttacagtgggtctaccttccacccccacacccctccaattctgattcatttgcagtttttacctgtgtcaaaatggggtgaaagccctccccttgtggaatgatttttgcctttttctttcctgtttggttctgttgcttattattttcttaggggggagagggggatgttagaccactttcagattagctgccacctgcctactttttttttttnttttttttttnttttttttttcctttttttttttttttttttacccctaaactaccccctttttttgtagaaagccaaataaaatatatacgtaccatttccttttgagcccagaatctagatttgagcggaagagcatgtgtgcttcagggaagtagtgtctccttttggaaatctgttgaagtaaagtgacatcggccttctgttcacttaggcaacatttgtaaaaaaacaaatactgtctggaattataatacaactttcctggattggaaaccaaggtggggggaaaaatacagaaactttcaggggaatgggaggggggagaagggaaaagccagccctttgtatagaaattttgcttttgtttttcattctactttagaaccgcaagcttgtacactgtggatgcgtgaatattttagtgtgaaacgtgtttttgtcatagtattgaaataaaacttcaacatagtttggttgtggaaggtatagcagatagttcaagaaaaaaaaaaaaaaaaaggaatcgaagcctttcaacaaagaaaatgaaatacaggtgatgctgatgaagaggaccctaaagccaacagatgtccatcagacagcacaggttcctttcccaagtacaaagcaacaagaggttagggtggcagatggtctcgtgtccactttgtgggccacacaccccaatgttctgacacttctgcagtgtgatcagtggcgatgctagattataatttcaaactgtgaaaaataatggtcttgtcatttactcaatgtggggttattttgcattttctcagctcctggggatggaaatggaggattccagaacattcagcctggcccttctcatcccagggcctgcacagatcttgtttggttggtttttttttaagtttttggtaaggagggatggactcgaccagtttcattgtcgatatgtcgtatgtctatgtggcatacatatgtatcacataaagaccagcatggccaagttctgtgggaaggccacccaggtgccatgagtggggtctcccaatcctgaagggccaaggtgtattcaataggactctatgttctcacttttctatggaacctcccacatcccagggtgtcaccctcagctgtccgtctggatggtggtgatcacacctccattaccatccttaccctagcattccgtacttcggggcccttctctcttgtttataaaactttttaacttgagtgaaacatcaacaccacctttgttttcctattctcactgctgtaaatactgagtactaactgagaattttgtactttgcattctgtcagaatacttgtgttcaataaaattgaaagaaaaaa

SEQ ID NO: 99 - DNA, 3776 bp, Cricetulus griseus
tggaaggaccacttgttaccagtgactcctgataacatcaggaatggcaagctctacatttaccacctgtcacccactggaggcaccgacatcaatggcgctctccagatggccatcaaattgctcaacaattatgtggcccagaatgacattgaagatcggagtgtgtccctcattgtcttccttacggatgggaaacccacctttggggagaccaataccctcaagattctcagcaataccaaggaagccactggaggtcagatctgcatctttaccattggcatcggcaatgacgtggacttcaagctgttagagaaactttcgctggagaactgtggtctgacacggcacgttcatgaggaggagaaggcaggagaacagcttatcgggttctatgatgaaatccgaaacccgccttctttccgacatccgcatagattaccctcctgatgtagtagagcatgccaccaaaaccctgttccccaactacttcaacggttctgagatcgtcattgccggcaagatggtagataggaagtttgatcagttccacgtggaggtcactgccagcaacagtaagaaatttgtcatcctgaagaaagacatccctgtggagtcccagaagctggggaatgatgtcacagccacccccgggcctgtccctgatggtgggaaggaccccaaccacatcgagcgtctttggagctacctcactgtgaaggaactgctgagctcctggcggcagagcagcagtgaacaagagaaggagcagctgaggcagaaggtccaggcgttagccttgaactaccacttcctcacccccttcacctccatgaagctgaagaagccaggtcttcgcacagatgggctggaggacacccgcggcatgtctgcagccacaggacctgagacggtggtgcagagcgttcgaggagctgacatgcagccaggacctgctctcaagaaaccatacagcccaagaattaaaatctctaaaacatcagtggatggtgatccccattttgttgtggatttccccttaagcaatctcactgtctgctttaacattgatggagaacctggggacatcctacggttggtctctgatcacctggactctggtgtgactgtgaatggagagcttattggagccccagcacctccaaatggtcacaagaaacagcgcacatacttccggaccatcaccatcctcatcaaccggccagagagatcttaccttgagatcacaccaaacagggtcatcctggatggaggagacaggctggtccttccttgcaaccagagtgtggtggtagggagtcggggacttgaggtgtcagtgtctgccaatgccaatgtcactgtcaccatccagggaaccattgcctttgtcatcctcattcacctctacaaaaatccagcacccttccagcgaaaccaccttggattctatattgccaacagcaaaggcctttccaacaattgccatggcctgttaggtcagttcctgaatcaggatgccaaactcatagaagcccctgcagtgtacaacaagaatcttagtggtcagtcatttgctcagacagaagggattcctgaggctgtccttaaggtgaaaggacgccgagttccagtggtctggaagcaaaggaagatttataatgggcaagagcaggtagactgctggtttgacagaaacaatgccgccaagctgattgacggggtgtataagaactacctggcatcccatccatttgacacggagaacatactgggcctgaggatgtccaggaaagctgagactggcagccttcatgaggagagtgtctaacagggaatcgactttgggtctactatggatgcagcttttcttgttacctgcgcctgccttgtctcttgctatgagctgcactgtgtagcctgccccctggtggagtggaggttcaatatgtgttaaggtaatgagtcagggcaggaagctgtcaatcttccagatacttgatctcttcctaattgactttccaggtcacttgaccttgctggtggatgctttccaatttgttctaataacctaagtgctttttaataaacaggaaaactccctgtggatggcctttactggcctgtcttggtgctggagagccagctagttgaaagataaatcttctactcagagcatttcagcttgtgctgtaagttcaacaccttttgtctgtgcctttggatgtccaggaaatgtaaattatatgagactagcactggcataacagagagccccaagcctaagagtagctgctcagcctacctgtgggaagaatcaactttcacatcctctgaaaggaagtgggaaacaggtgagcgggaagtgatgggaacgaacaacagagaaaggaagggaacatgcttgagggaaaacagtattttgatgtggacctgagtgaaaagactctgcgctgtccctgcataatgtttcttccatcgggcaccatgccaaggcgacctctgcagtgagacaggaaggctgcttggcacttagagagaaattggcatcaagaaaattgctgtccttcctgtgggaagcatttgagcagcacaatgacatccacatgttcttcctgtctgaccccccagcagcctcaagagccagctagggttgcgtgagtttctttctctctgttccacgaacccaccaggccacagccggtcagctgtgctatttatctgactccctgtgtttccagactcatctgtccgttctcaggccaggagtgcaaagatgagcaacccgtatggctgccagatgtttccatctttttaggcttagagaaagagaggatctcagccaggcctaaccgatgctggctccaaggcgtgttccagggaccttcctattacataaatcccagctggagagacaactctggagcgatgatatgggtgtgttgttcttgatgctggctttaccccaacagaagaatatcattaggcaagagcagtttctactgctattgtctaagagcagaagcccatgggagatgccaggtgtgtgtgtgtgtgtgtgtgtgtgtatgtgtgtgtgtgtgtctgtctgtctgtctgtctgtctgtctgtctggaatagaaaccaaggttatcttctgcccttcacaggtgcatgaagaggcatgaagctgcttctcattgttatgtaaaaatataacacaaagctggccgtgcagaagccagcaaccagacaccagatctgtgcattgatctaaatcttctcagtctcccaacctgcaagtaataaattcttttttgtttgaaccatgcaatttatagtatttttcgtatggcagcccagactcactaagacaataaagcattgaaaatacaattttcacctttattcaggctacccagaatgtacacaaggaatgctgttgttaaaatctgaaagactcctggaaacatgaggacatgatccagctaaaataaacagcaattacaataacacagctaaccaaatacttagagatgcaatgttaaatatttattttatcctgttttaaataagtagggtacagattgttcgcatctcaagaggctttgtttcttaaaagcttgtaagaaaaaaaataatgtctaaaaacaaacagcatagtatgtttatttctaagggaaaatggaatcggggctactgagaataaaatttgataattctaacctcactgcttgtttgtagaaatttctgcactacagtccctaacataagtattcttgtgtcaatgatg

SEQ ID NO: 100 - DNA, 3768 bp, Cricetulus griseus
gcatctggacctcagatagtgatatgccaagtcgaacacgacctaaaagcccaagaaacacaattataggaatgaaagtactcgtgaaagcctttgtgattctcctcatcagaatctctcaagacctcttctagaaaacaagcttaaagcattcagcattggaaaaatgagcacagcgaagcgaactttaagtaagaaggagcaagaggaactaaagaaaaaggaggatgaaaaggcagctgctgaaatttatgaggaatttcttgctgcttttgaaggaagtgatggtaataaagtgaaaacatttgttcgaggcggggttgttaatgcagctaaagatgaacatgaaacagatgaaaaagaggtaaaatctataagccatcttcaagatttgcagatacaaaaaaatcctccaaatcagtcgtccaatgaaaggccaccctctcttcttgtgattgaaaacgaaaaaacctccactgaaggaaaggggaagaaaagaaaaaaacaaagaaagaactaaaacaaattacaggaagaacgtgacgagagacataaacaaaaggcaggttaagttcgatttgagcctccccagtcagattctgatggtcaacgacggtctatggatgtgccttcaagaagaaatcgatcatctgttcttgatgattatgcacctggctcacatgatgtaggagatccgagtactactaatttataccttggaaacattaatccacagatgaatgaagaaatgctgtgccaagaatttggaagatttggaccattagctagtgtaaaaattatgtggcctagaactgatgaagaaagagcaagagaaagaaattgtggctttgtggcttttatgaatagaagagatgctgaaagagctctaaaaaatttaaatggaaaaatgattatgtcttttgaaatgaagttagagaaatcaacaatcctatgttcaggttcttatttgaaaatcagacaccagcccatgtttactacaggtggaagctttattcaattctgcagggtgattctccaacaaagtggcggacagaagattttcgtatgttcaaaaatggatctttttggaggccaccaccgttaaatccataccttcatgggatgtcagaagagcaagaggcagaagcctttgtggaggagcctagtaaaaagggagcgctcaaggaagaacagcgggataaattagaagaaatcttgcgaggattaactccaaggaaaaatgatattggagatgccatggtattctgtcttaataatgctgaagctgctgaagaaatagtggattgcattactgagtcgttgtccatcttaaaaaacacctcttcccaagaagattgccagattatatttggtttctgatgttttgtacaactcttcagccaaagttgccaatgcctcatattacaggaaattttttgaaacaaagctatgtcagatattttcagacctcaatgctacttaccgtacaattcaaggccatttacaatctgaaaattttaagcaacgggtaatgacctgcttcagagcctgggaagattgggcaatctatccagaaccatttttgatcaaacttcaaaatattttcttaggacttgtaaatatcattgaagaaaaggaaacagaggatgtgccggatgatcttgatggtgctcccattgaggaagagcttgatggcgcaccgctggaagatgtggatggaattcccattgatgctactcccattgatgatcttgacggagtccctataaaaagtcttgatgatgatcttgatggagtgcctttggatgcaactgaagattcaaagaagaatgaacccatcttcaaagttgccccgtcaaaatgggaggctgtagatgaatctgaattggaagcacaagctgtaacaacttctaagtgggagctatttgaccagcacgaagaatcagaagaagaagaaaaccaaaatcaagaagaagaaagtgaagatgaagaagacactcagagttccaaatcagaagaacaccatttgtattctaacccagtcagagaagaaatgactgaatctaagttctctaagtactctgaaatgagtgaagaaaaacgagctaagcttcgtgaaattgagctcaaagttatgaagtttcaagatgaattggaatctggaaagagacctaaaaaaccaggccaaagcttccaggaacaagtcgaacactacagagataaactgctgcagcgagaaaaggagaaagaattagaaagagaacgtgaaagagacaaaaaagataaagaaaaattggaatctcgatccaaagacaagaaggagaaagatgaatgtactccaacaagaaaagaaaggaaaaggcgacacagtacttctcccagcccatctcggagtagcagtggtaggcgagtgaaatccccatcaccaaaatcagaacggtcagaacggtcagaaagatctcataaagaaagctcacggtccaggtcatctcacaaagattctcctagagatgctagcaagaaagccaaaaggtcgccatcaggttcaaggacgcctaaaaggtctaggcggtctcggtctaggtcgcctaagaaatcagggaagaaatccagatcccagtcccggtctcctcacaggtctcataaaaagtcaaagaaaaacaaacactgacatatatttttaagatgccgtcacttattggaaatgcaagtttgttttgtgcctgaatggtctgtttgtttttacacaaaaaaaaaacaaaattctaatgaaagagcattcctgggttttttgtttgtttgtttgtttgtgaatgcatgtgtaaactcatgagtaactgcatctgtagacctgtcattgttttatattgtataaattacttttgttgtggctgtttctcaagatgaaatttttattgtgctaatgaatttcatcagaaatgtgtacaatggatctgctggcagtagtagtattttgttttaggatattgtgacttagacacataatacagatgtcttcccctcttttgtagctttgacaatttgaattagatttcaaataaaatctgaacaagaaaacaataatgttgttttttttgcccaattggtgacaccaagtcccttaaagacctactaaatgaatttggcactgttgctgtttcttatacctagtgcactttacaagctccaatgtttaaaggtttccatacccagagatcagaaggcgtaagtgagtgggtatgaagtggtatttgttactgtaatgcccagttaaaagttctttttcaaagaagcaacatgacttcaaagcactcaatccatcttctgagcaattaaaatattttagggtaaatttaattttatcttctaccatgaaacaagtttatttataaaagattttataaaaacgatttgccatataattcttttgtataatagttgccttttttataattgtctgtaggttatctttaaaatattggtatcatgatatttgtacaaatttgtttgaaacagcttttctgttttgaaggatttggtttgaagtacagctttaaataaaaattgaaaattaaatggttttcaggaaattttaacaccccattgtttgtaaaattcaaggcacaaaaagttgacttaaaccatttgcagagttgaatattgttataaacaggaaagaacttgctgtagttttagggagaaataggaaaacttgtgaatgttgatcaaaataccacagatttaactttttttttattttttttaaat

SEQ ID NO: 101 - DNA, 3757 bp, Cricetulus griseus
gcgagacggagggaagtggggcgagaagcgagatggcggcggcggcgctggcggcggcggttcgtcgccagtgacgcgcggtggggcagtgcagttctgcagccgtacctacgggagctcctgtctgccaaggatgcaagagggatgaccccatttatgtcagctgtaagtggccgagcttatcctgctgcaattaccatcttagaaacagcccagaaaattgcaaaagctgaagtgtcctcaagtgaaaaagaggaagatgtgttcatgggaatggtttgcccgtcaggtactaaccctgacgactcccctttgtatgtcttatgctgcaatgacacctgcagttttacatggaccggagcagagcacatcaaccaggacatttttgaatgtcgaacttgtggtttactggagtcactttgttgttgtacagaatgtgccagggtggaagccagcaatgccagcagctacttaacatctgcaagcagtttagccagggcttacagcattgtcatccggcaaatctcggacttgatgggccttatccctaaatataaccacctagtgtactcccagatcccagcagctgtgaagctgacttaccaagatgcagtcaacttacagagctatgtagatattggattaaagcaatgaatcaacagacaacactggacacccctcagctggaacgcaaaaggacacgggaactcttggagctgggcatcgacaatgaagattcggagcatgagaacgacgaggacaccagtcaaagtgctactttgaatgataaggatgatgaatctctccctgcagaaactggccaaaaccaccctttttttccgacgttcagactctatgacgttccttggatgtattcccccaaatccatttgaagtgcctttggctgaggctatccccctggccgatcagccacatttgttgcagccaaatgctagaaaggaagatctgtttggccgtccaagtcagggtctttattcctcgtctaccagtagtgggaaatgcttagtggaagttacaatggacagaaattgccttgaggttcttccaactaaaatgtcttacgctgccaatctaaaaaatgtaatgaacatgcaaaaccgccaaaagaaagaaggggaagagcagagtgtgctggctgaggaagccgagagttcaaatccagggccgtcagctcacgacgttgctgcccagttgaagagcagtttactagcagagatcggactcactgaaagcgaagggccgccccttacatcattcagaccacagtgtagcttcatgggaatggccatttctcacgacatgctgctgggacgatggcgcctttctttagaactgtttggcagagtatttatggaagatgttggagcagagcctggatcgatcttaactgaattgggtggttttgaggtaaaagaatcaaagttccgtagagaaatggaaaaactgagaaaccagcaatcaagagacttatcactagaggtcgatcgggaccgggatcttctcattcaacagaccatgaggcagctcaacaatcattttggccgaagatgcgctagcaccccaatggctgtccacagagtcaaagtcacctttaaggatgagccaggagagggcagtggcgtagctcgaagtttctatacagccatcgcacaagcgctcttatcaaatgaaaaattgccaaatctagattgtatccagaatgccagcaaaggcacccacacaagtttaatgcaaagactgagggaccgaggagagagagatcgggaaagagaaagagaaagagagatgaggaggagtagtggcttgcgagctggatctcggagagaccgggatagagatttcaggagacagctttccatcgacaccaggcctttcagacctgcttctgaggggaaccctagtgacgaccctgaccctctcccagctcatcggcaggcacttggagagaggctttatccccgagtccaagcaatgcaacctgcatttgcaagtaaaatcactggcatgttgttggagttatccccagctcagctgctcctcctcctagcgagtgaagattctctgagggccagagtggatgaagccatggagctcatcattgcacacggaagggaaaatggagctgatagcatcttggatcttggattactagactcctcagaaaaggtccaggaaaaccgaaagcgtcatggttctagtcggagtgtagtggatatggatttagatgacacagatgatggtgatgacaatgctcctttgttttaccaacctggaaagaggggattttatactccaagacctggcagaaacacagaagcaaggctgaattgtttcaggaacattggcaggattcttggactatgtctgttgcaaaatgaactatgtcctatcacattgaataggcatgtaattaaagtgttgcttggtagaaaagtcaactggcatgactttgctttttttgaccctgtaatgtatgagagtttgcgacagctgatcctggcctctcagagctccgatgctgaggctgttttctcagccatggatttggcatttgcaattgacctgtgtaaagaagagggtggaggacaggttgaactcattccaaacggtgtgaacatcccagtcactcctcagaatgtgtatgagtatgtgaggaagtacgcagaacacagaatgttggcagttgcagaacagccattgcacgcaatgaggaagggtctactagatgtgcttccaaaaaactccttagaagacttaacagcagaagactttcggcttttggtgaatggctgtggggaagtcaatgtgcagatgttgatcagttttacctctttcaatgatgagtcaggagagaatgctgagaagctcctacagttcaagcgttggttctggtcaatagtagagaaaatgagcatgacggaacgacaggaccttgtttacttctggacatcaagcccgtcgttgccagccagtgaggaaggctttcagcctatgccgtccatcacaataagaccaccagacgaccaacaccttcctactgcaaacacttgtatttctcgactttatgtcccactctattcctctaaacagattctcaaacaaaagttactactcgccattaagaccaagaattttggttttgtgtagagtataaaaagtgtgtattgctgtgtaatattactagctaattttgtagattttttttcccatttgtctataaaagtttatggaagttaatgctgtcatatcccccccctggtggtaccttaaggagattaaatgcaaacattccttgtcgagtgtgtagcttaaaggcctgagaagcactggcatcttttgtctatgatggtccgctagtcgccaacttctaggtctaaccccagccaaagatgacagcagaacaacataatttacactgtgatttatcttttttgctgaggggaaaaaatgtaaaatgttctgaaaactcactgctgcctttgtagaaagtgtttcagcaaaggttcttgtatagagggaatagggaatttcaaaataaaaattaagtatgttctgtgttttcattttaacttttttttggttgtttaatttgtggttggctgcaattgtgtattatgtatatggagcttgtaaaaagttcttaacaattgggattttagtagacaaaatacacttttacctataaaaaacaacttttactgtccggttacttctagctgcattgcgctccaagata

SEQ ID NO: 102 - DNA, 3754 bp, Cricetulus griseus
  modified_base (310)..(310): a, c, t, g, unknown or other
tgcaattcaaataaaacaaaactgtgtcagttagttgaagtaatgatggcaagaagagatgatctctcattttgtcaggagatgaaatttaggaataaaatggtagaatacctaacagactgggttatgggaacatcaaaccaagcagcagatgatgatgtaaagtgtcttacaagagatttggaccaagcaagcatggaagcagtagtttcactcctcgctggtcttccactacagcctgaagaaggagatggggtggaactaatggaggccaaatcacagttattcttaagtacttcacactatttangtaacctttgaatgactgtagtgaagttgaagatgaaaatgcacaaacaggtggcaagaaacgtctttgttggactcaatttcaactctaactttaactttgcactagttggacacctcttaaaagggtacaggcatccttcacctgccattgttgcaagaacagtcagaattttgcatacactactaactcttgttaacaaacatagaaattgtgacaaatttgaggtgaatacacagagtgtggcttacttagcagctctactcacagtgtccgaagaggttcgaagtcgctgtagcctcaagcataggaagtcccttcttcttactgatatttcaatggaaaatgttcctatggatacataccccattcttcatggtgatcctagctataggacactaaaggagaaccagccgtggtcctctcccaaaggttcagaaggctaccttgcagctacctacccatctgtaggccagaccagtccccgagccaggaaatccatgagcttggacatgggacagccttctcaagccaacacaaagaaattacttaggaacaagaaaagtttgatcacttgatatcagacacaaaggctgagaagagtggcagaaactagattatgaaatggaaacccaaaggaatttcctcacagcagcacccacatttgcggaaagtctccgtgtctgaatcaaatgttcttttggatgaagaagtacttactgacccaaagatccaagcactgcttcttactgttctggctacactggtaaaatatactacagatgaatttgatcaacgaattctttatgaatacctagcagaggccagtgttgtgtttcctaaagtgtttcctgttgtgcacaatttgttggactctaagatcaataccctcttgtcattgtgccaagatccaaatttgttaaatccaatccatggaattgtgcagagtgtggtgtaccatgaggaatcccctccacagtaccaaacatcttacctgcaaagttttggtttcaatggcttgtggcggtttgcaggacccttttcaaagcaaacacaaatcccagactatgctgagcttattgttaagtttcttgatgccttgattgacacgtacttgcctggaattgatgaagaagccagtgaggagtccctcctgacacccacatctccttaccctcctgcactgcagagccagcttagtatcactgccaaccttaacctctctaaatccatgaccaaacttgcaacttcccagcattccccaggaatccacaaggagaacgttgaactctcccccaacactggccactggaacagtggaccaactcgccatggatccacaagccaggggcagaagcaaagaagcactgacagcttcaaacgtaatagcattaagaagatcatgtgaaaatgtctttcctttcacttttaaaaaaaacctaacatagggcttctcactagtcgaccctgctgctgctgccgccagctgtgggctgtgcacggaggttggccttctttgtgcccttgtcttacagagtgaagttggttgtcttatttacacactttccaagtttggggagaaataatattttaacccagtgtatttaatcttctagctgtggtacttttttacacctaagaaagtgaaaggaaccatagaggtcaagcctcagtgaatttacaccatacagccacaagccaggtacttgggggagggggataaattagtattttgtaatggattcttaagaaatcctaacatttgagtattagcaataattacaggaaattaagcatgaccacatacatcttaacattgctggattaaagctatcggttctgaggccttattcatacttggtcatccaaactaggtaattttttttcctgttgattatcttttaatctttacatatgaaggtgttctgttccttttttgtaagccaaggctatactaagtatagtaactacacttgtttttgcacttgctttttcttcctctttcctacatgattctgagcagggtaattagcagacagagtgttgaaacttgtttccagaagctaattttcatagctgtttccattagctccaaagcaaaatggaatggtacgtgacttagggtagctgatatttttattttgttaaataattttccaaaaaacagaatatgctgtatattatcgtaaatttctttgataagatgtattttttaagtcctttaatcttcctcctctcctccaaataaaatcaggaatctctagcaaaacatttggattttatctgataggattgcattttatcactgtgaagtatggtcagcctgcgtggtgtgctgatacgggacctctagaattgctgctgtgcagacagcatggatcagtgtgccatagggccttccaggtgatgcacagccagctgcttcatggaacctgcagtatgcaaaacaattgacttgagtgagcgcagtagtatgtggatgctctcatttaggattgaactatatttattttaaaaggtattatccctctactacatgttcccttcatatattaagatacaatggctttgggaggaaacaaaaaaggaaacccggggtagggtggggagaaccctgtagtgctagctcactagtggatttcaagtaaactaaactaccacagctaaataccataaataattggccagtgctcctgcccttgggcttccctgccctccactgtggggacatagcactctgctggccagttacacttgcctgcgcactgctgagctggggagcaaggacaccaccccagacaccaagaaggaacagtctaccagaggatgggagccagcaaccctatcctccggttttagggttgcaagtttcctgtgggagattggaagtttttttgggggttgggaggattttttttttcttctttcttttcctacatttacccccaagcatactgaggcatgtcttattcaatattatgcaatggacttatacaaaaattcacttagtatcagccacacgattttttttaatgcagtatattcacctgtaaataatttgtgtaaaatttgacagaaaagtctatttactacattgtaaatacatgtgatgatatattgtattattttgcttttttgtaaagcggttagttgctgtacatggataacaaacaaatatttgattattttcgtgttcgtattgctaacttcttcctgcgactgcgttacatcatttaaagaaaatgctgtgtgttgtgaactgaccttgtatatggtgacttcccttcccatcgggcagttccctgcctccagccttgttgatattgtaaccagcaggagaaattctgcccgacacacagactccatcactgtggggaaacccatagaaatctgttccagatcattgtcctcacctcctcccatcctgtgtatgtcctcccaccc

SEQ ID NO: 103 - DNA, 3754 bp, Cricetulus griseus
ctgggctataggcagatagtgtttggttccacaatgtttgggaacctgtttgaagaggattattccagtgtgtcaaatagtcagtatggaaaagggaagaaattaaagactaaaggtttggagccacctgcccctagagaattcaccaatttaagtggaatcagaaatcagggtggaacctgttacctcaattcccttcttcagactcttcatttcacacctgaattcagagaatataccatggcaccattgtgaaccagatagtttgcaaagagtgcaagaacatcagtgagaagcaggaggacttcttagatctgacagtagcagtcaaaaacgtgtctggtttagaagatgcactctggaatatgtatgttgaagaggaagttttcgactgtgacaacctgtaccactgtggaacctgtgaccggctggttaaagcagcaaagtctgccaaactgcgtaagctgcctccttttcttactatttcattactaagatttaatttcgattttgtgaaatgtgaacgctacaaggaaactagctgttatacgttcccctccggatcaatctcaagtcctttttgtgaacagagtgaactggatgacacagaatatatgtatgacctcttctccgtcattatcccaacaaaggtggctgctatggaggtcattaccattgtgtacattaaagattgttgatcatctaggaaactggcaatgtcaagaggagataagtgatacagatttgaatttgaaagctcttcagaatgaagaggatgatgatccattgatgattctaaaaacaatcttattgcaggaggagaccaatcaagttcctgttgatcagctgggccagagactcttgaaaaaacagggatatcttggaacaagaagttcagaaaacagcatggaccactacgaaagttcttacagctccatcctcagatgtttctgctcagcacagatgaaagtacagttagtctcctgaggaaccgttttacccaggcctcatctgatttccaaaggcaccgggaacagattctacatacacttgcttcacgaacccccagggttaagtgatagcaccagctgccccactggtttgatatcaatgattccaaagtccagccaatcaaaagagaaagctaatcacacagcagttccagggtaaagaaagtgcctacatgctgttttatcggaaagccaagctgcagaggccctctgaagctacgagccaatccaagatacaaggttccatgtcatttgctgaaagaaatggatgcagccaacattcaattgcaaatgagaagggcagaatgtgactctgcaaacaataattttgaattgcatctccatctgggtcctcactaccgtttcttcaatggggctcttcaccctgcagtctctcaaacagagagtatgtgggatttaacctttgataaaagaaaaactttaggagatctccgtcagtcaatatttcagctattggaattttgggaaggagacatggttctgagtgttgcaaagcgtgtgccagcaggacttcatgtctaccataccctcgatggagatgagctgacactgtgtgaagctgaaattgctgatggggaagacatctttgtatggaatggggtagagggttggtggagtccagattcagactggttctgattgcagaaatggaagcttaattttggttcaggattcagacagtgatgataacagtctgttgcccagacaagggagatggacctccagtgtggatgaactgaactggctccaagtgaaaaacttctagacaaaattagaatctgaagaggagcaagttcagatagcaggagagatgtggcacttgcggaaaatggattggtgctatgaagctggggagcctttatgtgaagaagatgcagcaaggagctcatgatatgctctggagatactttactgttaactgaaggaaaacttcctcctccgggcttcttgaagatgcccatctggtggtaccagcctgcaaagctgacaggacactatgagaatcgggaccactccaactgtgcctcttctcaaggtagcatctggggagctgctcctacccaaggtgttcctggccccaagcctgaagatgtttcgctcttctacttgggagatgtggagatctcagaagaggccacattagtggaactgaagtcaaaggccatggccttgccctctgtcttgaagcttgcagtccagtccacagccctgcttagagtctggacattagagaacaagcaccccagcagactcttgcgcactgactggaggcaactcaaggagtacagactgggccggaaagcagaaatttgcttagagcttcttcaaaaggaagaagacttgggcccccgggatgtgctgctgaggacacagctacgcatccctggtgagagggcctacaccctggcgatggacctggtatggggacaccacccgaggatggactgctggctccttgaggcagagagtggctgatttctattctctgcctgtggagaagattgaaattgccaaatattttcctgaaaagtttgagtggcttccaatatctagctggaatcagcaagttgccaaaaggaaaaaaaaaaaaaactttgcaaggaggaccatattacttgaaagatggagatactattggcattaagaatctcctgtttgatgatgatgatgacttcagcacagtcagagatgacattggaaaggaaaaccagaaacagctggctctagggaaaaagaaaagccgagaagttctccgtgcgcagagcagcgatgtactctccagtgcaggaatgcccactcggccccgggggccagaagcttctctgtccatccacgttgccagcttcagatagcccctgcagccgtatgtactgtactccaggtagaaccgccccaccagttctgacaactgccttgtgggtttatggtggacaagctggttgcctccatagccagtgatcaagtcttcagctttgtgacaggcaaggggatgatgattctcaggccaagcaagtgcacctgatcaccagctctgtgacagagcagctgcagagctagcccagaccaagacactgtgcctaccacctacagcctggcaagaggcaggacatcacacaagcctagcacaacaaatccaggctccctgctgtcttgggcaaactgaggcctctcccttcccggtcggcacaggtaactagctaagagatttggtatttatgcactgtaactaatacactatcaaaatagtatctgttacctaaccagcaggtttggtaccctgaactgacttagtctaagacagcatggctaagaggagctgtcagggtctcagtttctcatcagctcttcttacatgccttcatgtagaggagaactaaggtagagagagacagggaaaaagtaactggcctgggctctagctgtcccctgcatgctggcttctctatggagctgacactcagcaggtgttcatgttagtcctttgtcttccaaacacccatttgccagagtcagtgtcattttaggtggccatttctgttgaagcacttgtatcataagacgttggatttggactagtgacctttagaccatgtccttgtagctacacaccaagggctcccaggagaccaaaatagttaaacattacttgactacaactgagtcctctgggtaatggccactgtttcttgtactgtaactgacatagttgcttagtttgtccc

SEQ ID NO: 104 - DNA, 3746 bp, Cricetulus griseus
gagggcttggggattgaatatgatgaagatgttgtctgtgatgtctgccagtcacctgatggcgaggatggcaacgagatggtattctgtgacaagtgtaacatctgtgtgcatcaggcttgctatggaatcctcaaggtgccagagggtagttggctatgccggacatgtgccctgggggttcagccaaaatgtttgctgtgtccaagaaagggtggagctatgagccctcctggagccctttgccagttggagcagaatagagaagaggcccaccgggtgagtgttcgcaagcagaagctacagcagctggaggatgagttctacaccttccgtcaacctgctggatgtggccagggccttgcgactgcctgaggaagtagtggatttcctgtaccagtactggaagttgaagaggaaggtcaacttcaataagcccctcatcaccccaaagaaagatgaagaggacaatctagccaagcgggagcaggatgtcttgttttaggaggcttgcagctgttcacgcacctgcggcaggacctggagagggttcggaacctcacttatatggtgacccgcagggaaaagattaaacgatctgtgtgcaaagtccaggaacagattttcagtctttacactaagctcttggagcaagaaagagtttcaggtgtgccttcttcctgctcctcctcactggagaacatgcttttgttcaatagtccttctgtgggtcccaatgctcctaagatagaggacttgaagtggcattctgcattcttcaggaaacaaatgggaagtacttccttggttcattcgatgaaaaagtcccataagcgagatccattgcagaatagtcctgggagtgaggggaagaccttgctaaagcagccagctctgtgtggtagaagggaggggctgggggtcccagaaagcttctgagctttgaaaagacttttacagaagcacgcctcatatcatcagcacaacagaaaaacggtgtggtgacaccagaccatgggaaaagaagagacaatcgttttcattgtgatctcattaaaggagacttaaaggacaaatcttttaaacagagtcacaagcctctcaggtctacagacacatcccagaggcatctggacaacacaagagctgccacctcccctggaatagggcagtcagcacctggcatgaggaaggagattgtgtccaagtgcaatggctccctagtcaaagtgcctacaacacctgccagcccagtgaaaagctggggaggatttcggattccaaagaaaggggaacggcagcagcaaggagaagccctggagggggcctgccaccagcactcagactgtccccacttgggtttaggccgagttccaggcaaggaaagggcaaagaacaggttaagatccgacagtgagaacgatgggtatgtccctgatgcggaaatgagtgactcggagagtgaagcatcagagaagaaatgtatccatgccagcagcaccatcagcaggaggacagacatcatcaggagaagcatattagcctcttgatgaaacagacgtggaaagcacgtggcttgttgctggccatgctgaggagagctctgacatgggggcaagcaaaacccattatttctgagcgacatatttttccttgcaattcagattgaatttttttccagagtcatttataaatcatttttgtgagaagtttgtgttatttgcaacttgttgaggaaacagaagagtagattgtaaccacaagacactaagattagaacctgaactaaacactaaaaaaaaacactaaaaatgaagtaacattagagagggtcaggtttgaaaggcaccttgcattactgccctccacgttttttttttccaaagcacaaactcttggattgagtacagaatcagatagaattctgtgttatgaataaattctatttatagaagccttcactactatttatagcccacaaagcttattttctaggaatggtaaatgctgacagcattttggctcccaggctgtgggtgtgagtagctgggactcagaagcttcagcaacactgggatcttgcacatgtggcatccaggggaagagtttacacaacaggcattgatggaaggctggagggacagagctgagctgctgaagtgagacttagggcctgtggcccagagtgggctgtggacatagagtgggtggagaggacgcttatgagaaagttctgtgagaaagggcagccaagacccaagtgttactagtcctcttgactttcctcatacctaactgctggtccttggacccaattcggatttccctggctactgccagtacttgaccacctggcttccaataatacaatgactattcaagttcaagtgatgaacttcagactctggtgactctcactccccagagtcgaccactagtgcatatttggggaatccaggcttccaccatgaatggattccttaagacaaaaaggaaaaaaaaaagaaaaaggaataagccccatttcccctaaattacccttagtttgttaatattaatgttcagattcctgattcatttatacatctgtttccatgtggcagggacattctgatatttaatgagcaatgctttgagtttgtagaagctttcaagtcttccagatgatcgtaaacaacagaaaaggcttattgaattccatcttgctatgcaagttttatcagatgatcaaatgacagatctgatgcatcccattgtatgtatattttcaaaccaagtcttaacttctcaagtacattgtagtagctaattcaggggaggggaaaggatgacccaggttttagattgactatttttgagctgtggagctccttttgagactgctgtccagatcagcttgttgctaccggtatttgaaggttcttaggagtcccaagttgtacttccgcttgtagactaatttaaaaattagatgttttgcatatgagcaaaaaccttttgctggatccaggaaaaggttggactctatctagttatctttggattgcagcaacagcactgggtgagaatagaatttatagaggaataatttgtgaagccatagaaagaaaacctaaattaatctagtgagtgtatagcctctcaccagtttaaggggcaccagatccatttgcactattaggaatgctagttttgtgacaaaaaatgccttacctgttttcccccatatttaggttgaaaagctttcaaatgttccaagtttgctgaaccaaaaaacaaaacaaaaaaaaataaaaaaaaaaaaatgctttgaagttcaaatggtatagagcacggtttctgacagtgtaacgacagctttgtaagttagtttcatgtcatgctgggaactctgtatgaggcggccatacacagcgacagcctacctacccacttgcattttattagtatggagcttttttgtttgtttgttcttttgaatcttccttgtgcatcctgaccaagaaatatctttgattatgatcaatgtattatgtcaaaatgtaggctagttaaacctttgtaaagttgcctggaatgtcatttgttaggttataaacacaaaatttaaatgaaggttttatgtgttgtgtacaaatcttaattatttaaatggacaaacttgtcattacatttgtaaccttgtacagaggatttttcactatgtgcctagcttggtgtccattcagctaaattagaaaaaaaaa

SEQ ID NO: 105 - DNA, 3741 bp, Cricetulus griseus
  modified_base (736)..(736): a, c, t, g, unknown or other
  modified_base (821)..(821): a, c, t, g, unknown or other
cgttcatcgtgatttaaaagctgaaaatttgcttctggatgccaatctgaatatcaaaatagcagactttggcttcagcaatctcttcactcccgggcagctactgaagacatgggtcaatatccagacggagcagacaggaactgctatgaacattagtgtcccccaagttcagctaatcaaccccagagaaccaaattatagagcctgatgggacagtgaacttggatagcgatgagggtgaagagccttctcctgaagccttggttcgttatttgtcaatgagaaggcacacagggggagtggctgacccacgcacggaagttatggacgacctgcaaaagctcctgcctggctttcctggagtgaacccacaggctccattcctgcaggtgacccctaacatgaacttcatgcacaacctgttgcccatgcagagtctgcagcccactgggcagcttgagtacaaggagcagtctctattacagcctcctacactacagctgctgaatggaatggggcctcttggccggagagcatcagatggaggagccaacatccaactgcatgcccagcagctgctgaagcgcccacggggaccctccccacttgtcaccatgacaccagcagtgccagcagttacccctgtggatgaggagagctcggatggggagccagatcaggaagctgtgcagaggtaatgtggcatataccagacaccagcaggttcccacanccttcaaggactgctcctcgccccggcacttcgctcactggccactcggacattcggctgcctccagcagagtttgcacagctcnttaaaaggcagcaacaacatcggcagcagcagcagcagcagcagcaacagcaggaataccatgaattgttcaggcacatgaaccaaggggatgctgggagcctagctcctagcatcgggggacagagtatgacagagcaccaggttttatcttatcaaactgctgactcgtaccaccatcaccaccacgccagcccttcagcatctcctacagatcagggtgcaggaaggtatctcacagggtccctccacccacccccacccatgggtatgcccatcagccgccactaatgcattcggagagcatgggaagaggactgcttatgtgagggggccaaggcgggcttcgcagacaagagcccaagcacactgaccaaaggttgccacgacagccctctgctcttgagtaccggtggacctggggaccctgagtctttgctgggaactgtgagtcaggcccgggagctggggatacatccctacggacaccagccagctgccacgttcagtagaaataaggtgcccagtcgagagtctatcatagggaactgcatggatagaagttctccaggacaagcaatggagctgccagatcacaacgggcttgtgtatccaactcggccctcagtcaatgagcctctcaggtcccggaccctccagagacaccacacgatccagaacagtgacgatgcctatgtgcagctggataccttgccaggaatgagcctggtggcaggaaaggcactgagctctgcccgaatgtcagatgcagttctcagtcagtcttcactcatgggcagccagcagtttcaggatggggaagacgaagactgtggggtgagtctgggaggtcacgagcatccaggcctgagtgatggcagccatcatttaaactcctctcgatatccatctacgtgtattacagacatcctgctcagccacaagcaccccgaggtctccttcagcatggagcaggccggcgtgtaggaggatatggagagtgtgtgtgcagcttgaggaggaggaggctgatcctaaaccaacagtgtccagcaacggtgcaccactttgccatctgtgtctccaccagaacatgcagctcctttccccaccctgggcaccagtaggccgccgcttgggttgtgagggacttttgctatgtttgcttgtatgaccaaggcaccaaggaaataaaaaggaaaatctatgttctccgccttctgggaaccggcatctggtgtacttgagtttctggtgtttggaggtttgcttgtattttgttttgggaattttcctttggggatccatttctgaggcagaggagccagcggttagtattcaggggctgaacgtcgggaccctcccttccgcagcctctctcagccgggaatctgacacagtctccttctgggagctactagaacattatctggcccagcagaattccatcagaacccagcataggttgagtggccctgctgctgaaggttccaaccagtatggctcagtgtgggcctctgtgtgtggctcagctgccctccagctaccatacaactggttccccctcatgagtgaacacccagcagtggtgcactgtgctatttgtgtggcctccattcatactctcggctgcgtggtaaaaaggccgttggtccagtcatgtgtgcatatatatgagtgtgtatatatgcccttccctttcagcctctgtcacagactagaataggaggttgtatggagtcccttagcttcctcctctccctagcatcttcggcccctacattttaattcttgatcatgtaggaattgtttttggtaaatgttgatattattgttattattgttattattaataaagacaaaataatttttgtttaaaagagaattgtttaaccagattctgtgctattgaactgtggcttgcgccttctgtttgaagcattttccttggtattggcattgtgagccactctcctctgtgccatggacggatgcagtggcccccctccccacctgaagcagcgcatacgcaatagctagtttttatgtccttacccttttctctctgctgatagaaaccaaagtctcctctgcagcctggggactgagcgaggtcttgttctctcctggtcctcaaaaccagcgaggagtagtctctgttctgactctcatttctgagagccaggggtctccagcctctgcatttgcacagaagaatgcagttgcctagcatggcatccagatgttgacagtagggtccctacccagcttatccttctccactgacaccaacagcttgcttctgagcccactgtcccttgagtgggtttgttttcaatgcaagagctttgctagggacctgttccatggtcctgtatcctccaatctcccctccacatcatggggtcattagttactcaccagaagtctgacttcccaagaaagcttgaagaactgttgttggcttctaagttcagtcctactctgatgtcctgggcgtgctgctgctctgaatgctcggcctgacctgtttacatggtactggattgatggaagagcagatgccaccctccagagccacccagaatgaaagccagtgagcctattaaccgtgccatcttgcaaactgttttcaagatcaccattgctttatattgtagtaaccaatatgcgcaatatgttgaatgtatatgaatatactttgctatttctgttctttgaaaatgtaagaagttattttttctttctcatttctgttaaacttaaaaaaaaaaaaaaggacttaaaaaaaatctccagattcaagttgctgagacattttgtccttgtttgtgtgggacatttacaacttagtaacttggttggacagtaggaggttgtggaaataaaaacttattaagttctaacactgaaaaaaaaaa

SEQ ID NO: 106 - DNA, 3741 bp, Cricetulus griseus
ctgctgtgggacagtggggacctcctggggctttaacaaatgccagaaatgtcccaagaagccatcctatcatggatatactcaaatgatggaatgcctacaaggatataagcgggttaacaacacatttttgtcaagatataaatgaatgtcagctacaaggtgtatgccctaatggtgagtgtttgaataccatgggcagctaccgatgttcctgcaaaatgggatttggacccgatcctaccttttcaagttgtgttccggatcccctgtggtctcagaagagaagggccctgttaccgccttgtcagtcccggaaggcactgtatgcatcctctctctgttcacctcaccaagcagatctgctgttgtagtgtgggcaaggcctggggaccacactgtgagaaatgtcccctcccaggtacagctgcttttaaggaaatctgtcctggtggaatgggttatacggtttctggcgttcatagacgcaggccagtccatcagcatataggtaaagaagctgtgtttgtcaagccaaagaacactcaacttgttgctaaaaagtactcatcctccacctctcccagccaaaggaagagccagcggaggccttgacctcctcgcgggaacagcggccgggaatggcggaacctgaagtggacatcaccccctgtgcctgtagaagtggcccctgaagcttccacgtctagcgccagtcaagtgattgctcctacacaagtaacagagatcaatgaatgtactgtgaacccagacatctgtggggcgggacactgcatcaacctgccagtgagatatacctgcatatgctacgatggctacaggttcagtgagcagcagaggaaatgtgttgacatcgatgaatgtgcccaggtcccaacacctctgctcccaggtcgctgtgagaacacggagggaagccaaaggtctgcacgaatggttcctgcaccaaccttgaaggctcctacatgtgttcctgtcacaagggctatagccctacaccagaccatagacactgtcaagatattgatgaatgtcagcaagggaacttatgcatgaacgggcagtgcaaaaacaccgacggttccttccggtgtacctgtggacagggatatcagctgtcagcagctaaagaccaatgtgaagatattgatgaatgccaacaccatcacctctgctctcatgggcaatgcagaaacacagagggctcctttcaatgtgtgtgcaaccagggttacagagcatccgctcttggagaccactgtgaagatatcaatgaatgcctagaggacagtagtgtctgccagggaggagactgcatcaatactgcggggtcctatgactgcacatgcccagatggattccagctaaatgacaataaaggatgtcaagacattaatgagtgtgcacagccggggctctgcggtactcatggagagtgtctaaacacgcacgggtctttccactgtgtctgcgaacaagggttctccatctctgcagatggtcgcacgtgtgaagatattgatgaatgtgtaaacaacactgtgtgtgacagtcatgggttttgtgacaacacacctggctctttccgctgcctctgttatcagggctttcaagccccacaggatgggcaagggtgtgtggatgtgaacgaatgtgagctgctcagtggtgtatgtggggaggctttctgtgaaaacgtggaagggtccttcctgtgtgtttgtgcggacgagagccaagagtatagtcccatgactgggcagtgccgctcccgggccactgaagattctcgtgtaaatcatcaacccagagaagaaaagaaggaatgctactataatctcaatgatgctagtctctgtgataacgtgctggcccccaatgtcaccaaacaagaatgctgctgtacgtcaggtgctggctggggagacaactgtgagatcttcccctgccctgtccaggggacagctgagttcacagaaatgtgccctagagggaaaggatttgtccccactggagaatcctcttacaacaccggtggtgagagctataaagatgctgatgaatgcctgctgtttggggaggaaatctgcaaaaatggttactgtttgaacactcagcctgggtatgaatgctactgtaagcaagggacgtactatgatcctgtcaaattacagtgttttgatatggatgaatgtcaagaccctaacagttgtatcgatggccagtgtgttaatacggagggctcttacaactgtttttgcactcacccaatggtcctggatgcctctgagaaaagatgtgtgcagccaactgaatcaaatgaacaaatagaagaaactgatgtctaccaagatctgtgctgggagcatttgagtgaggagtatgtgtgcagccgtcctctggtgggcaagcagacaacgtacaccgagtgctgctgtctgtacggggaggcgtggggcatgcagtgtgctctctgccccatgaaggactcagatgactatgcccagctgtgcaacatccccgtgaccgggcgacggcggccatatggacaggatgcgttggtggacttcggtgaacagtatggcccagagacaaacccttacttcattcaagatcgttttttaaatagctttgaggaattgcaggcagaagaatgtggcatcctcaatggctgtgaaaatggccgctgtgtgagggtccaggaaggttatacctgtgattgctttgatgggtaccacctggatatggccaagatgacttgtgtcgatgtaaatgaatgcagtgagctgaataatcggatgtctctctgcaagaatgccaagtgcatcaacacagaaggctcctacaaatgtttgtgtctgccaggctatgtaccgtctgacaagcccaactactgcacgccgtcaaacaccgctttgaatttagacaaagatggtgacttggagtaaaggggaaactatgtgacctgtgcccatatactctgcactgtgtaaaggaaaagggagagatgtatacctaacacacggcacctaacccagaatggcaaagacagaaacaacatggagttgaatgaaccctaaagacagtgagcagatggagccggaacctgatgggtgtgacagaccaaatggacatttctccaaaactccagtatatatagtctgttcatatgtaaaattcaatggaaaagaagcaggacagggctgttattttaaacagaggttgtattattatcttgttttgatttttttttttactattgcttaaatttggcttttaaatagtggtggagatgttttatatgattttctttttgttgtgcagttcctcagctactgtttttttttttcttcagtgttattctcaagttcaaacatctttgataaagtattggtaaagtgtattataagtattatgacacagggttgtgctgttcttcagtctggagccttttaaaaacaaattgtctgtcctgtggagtaggcagtgattgttaagcttttggagggggggggggacacctttattttcatgtattgccatatctcctatcaattggatccctttattagcctgaaatggaagaacttcttaacctatattggtattgtgatgtgtaaagtcaacccagagaaattttaaaacctgaacatccccccaaatatttaccattatatgttataagaaaataaaatcaccattttttgtagaaaaaaaaaa

SEQ ID NO: 107 - DNA, 3730 bp, Cricetulus griseus
  modified_base (718)..(718): a, c, t, g, unknown or other
  modified_base (2191)..(2191): a, c, t, g, unknown or other
  modified_base (2204)..(2204): a, c, t, g, unknown or other
ctattcaggaggagagcattcccattgctttatctggtagggatatcttagctagagcaaaaaatggaacaggcaaaagcggtgcctacctcattcccttacttgaacggctggacctgaagaaggacaatattcaagcaatggtgattgttcccactagagaacttgctctacaggtcagtcaaatttgcatccaggtcagcaaacacatgggaggggccaaagtgatggcaaccacaggaggaaccaatttacgggatgacataatgaggcttgatgatacagtgcatgtggtgatcgctacccctggcagaatcctggatcttatcaagaaaggagtagcaaaggttgaccatgtccagatgatagtattggatgaggcagataagttgttgtcacaggattttgtgcagataatggaggatattattctcacactacctaaaaataggacagattttactatattccgctactttccctcttagtgtacaaaagtttatgaattcccatctgcaaaaaccctatgagattaacctgatggaggaactaactctgaagggagtgacccagtactacgcatatgtaacggaacgccaaaaagtacactgcctcaacacacttttctccaggcttcagataaaccagtcgatcattttctgcaactcttctcaaagagttgaattactggccaagaagatttctcagctgggttacncttgctttctatatccatgctttcccaaagctggcagagacctatcttcatcgtattggaagatcaggtcgctttggtcatcttggcttagccatcaacttgatcacttatgatgatcgctttaacctgaaaagtattgaggagcaactgggaacagaaatcaaacctatcccaagcaacattgacaagagcctgtatgtggcagaataccacagcgagcctgtagaagatgagaaaccttaacaagcatgctttgataaactgcaaaaggctccttggatctgtgacacatcattttttggggggatgctcttctctttgtgggttttttcatctttgttttggaactatgaagagttatataagagctcagacatttttcttttttttaactggtgaagagaaactgaaaagaagaaatagacgttttttgttccacttgtttgcactgtgtgctgactgaacattcgttgcactaactgctggtttttaaaaatgttttctggggaaaggggacaaggaaggaggaaaagaaaaggaagggagaaaccctaaaaagagaagaaccttggtgaacacacacaccgtctacaattctccaatagctgactctactgcatttcaacttctccctgattagtcatccgtttcttaagcctgaagagcttattacttatttgtgcgaagtgccttatgctacgagaccattaagaatatcatctttacacacagcccaaggaatcaaccaagtcatgttctttttcttttttttcctttgcctcttcattttcgtttcaagttgaagtctctcttcctgttcttccagtactcatgcccagggctggaaggtggactagtgatgtcagcgccattttccttttctttatatggaggagttgattcacaactgcaggccatccacactgtaaatacatgtatttaaaagaaaaaaaacaaacagtaccaagtaaaattttcttctgggctgagtagacgcaccatcgtcgctcccaaaggaaagagcagcctgtcactgcaggagccatatgacaagcctttgtgctctacagcagaacactaagctggctcacacacctccatgagcagtatggcacttgacgtggagatgtgtcggagccttgaccctctttcctctgtggcaaagcgagtccgtagaaaattggatgtgtatacttgtataaactttgtaaataagttttttctgggttcatataaatatatatatatacatatatatatatatatatacacatatatatattatttttttgggatgaaggttgctgggattaaggggattagagtgattatgggagcagctaaagatgagaggggctcagttttctgcaacactaaattctaaaatgtgctttggcctctaactgtaggaagcagacctctgcagggccctgtgttgaaaagggcccagaagcccgggctttgagaagctcngtgatttggttcncctgctctaaaagtttgaggaacttgccaagttctgcacagggggacaaaggttcatcttcctggagtatgagaagggtatggagtgcagtgtgagagcagtgtgtgtgaagcctgcacttgcacatagaggaccagccagtgccggctccatgggcttggcagttgtggagcttagctgtcttcagtcacctgtggtgtgggagcgagttgcccttggcccaccttgttacatacactttagcaggaatgggcaaccccctgagagctgttaacacccatgctgcagaaagctgcttgccgttctctgtgccaccgtgacaagaattctgtctgtcattttgcattgtaaatcgctggcagatgctttaggtagatagtgttgctttaaattgtgcccctcccaacatgcttgatgtttggcctgatctccaggcaaaaggagtgagatgaatcaaaaccagtgtaacttttttttaaaaaaaattgtttttaattcccttttaacccagtgtactaggtcagtcaggagctagggaaacaaaaaagacaaaaaaaaaacaacagggagggtgtctgcactaaggatttagaaacactttggaagctcataacctcatggggaactgcctttagccacactcctgacctttagatgagtaacaaaaagatgaaataagtttttgggaattaagccatgttattttaattggatactttttttttccaagtttctgtgtatctttaaaattgttactgtggaatgattttcttgccaaatatctttgtcaggcaaaattattggcctcataggaggtgaagtaagccagcttttgggtgaatttatgtgggctttggtgagtttgtagttctgctttatattcataaagatagttttttaaaactcccaaagcaaatctattttcttctctgatgcaaaaactcatctttggaataaagagttaagtgtccaagggttgtaaccagtatgaggtcagagggagctagcctggcctggactctgcccctccacagctgacagactccaacagaagtgtatttaaatctccagtagacaaggctgggcagggcaggggaggggtgggcctgggttagttaaagatacagctgctgtattttaaccagtggttcttgggaagggtgcctggagaaaacaaagtcacttcccttatttgaagcaaaacaaattataaaaaaaaaaattacaatttttgttcagtaaaaataagaaaattctaatgtccctagccacaagggaccagtcccactttaaacagtgggaacttaaaattttgaaaatattttggggaaagggaaaattggctttctgtttaattggcaaatgttccagtggggagtatgtttttgttgggatgtgttacattgtatgtacatgtctatggacctgagtctttacagagtttatacatggttcagaaaagatggttggtaaaatcttgattacttttctttttgttaatttatctcaataaaagcccactggaa

SEQ ID NO: 108 - DNA, 3720 bp, Cricetulus griseus
  modified_base (948)..(948): a, c, t, g, unknown or other
ctgtttcctcagggaaacctttggtgccgcccaagccagctgctaaccgggattctggacagtggggctcttggaccggaaacaggttcaaggtgacttccagagaagggctcaccccatcctcctcgccacaagaagccgaaagtatctcagtaaccaaacctgaattgccaaagaaaccaactcctggccttacacgaagtgtgaaccatgagatttcgggaggaaggcccgtggccgagagcccagatgcagggaagaaagttccaactcctgcaccccggcctttgctaccgaagaaatcagcgtctccagatgccccaacttacccttcggttccaccaaaactggtttcagttcctcccgcctctcagtagcatcacaagccaaagcgttcaggtcaccgggagaagggcctccagccaacactccagctccaaccctgcagaacaaggcgctgggagacattgacctcatcagctttgacgatgagaactggagcaagccagtgaatcaggaggcttgggacatggaccccccagattaccaccaagacctgttcatggaaaagtcattccactttggaagccttctcccaaaaggggcccctgagagaccaccccccctaaactttctgcaaccaaatcatcaagtaaaatttgcctcttaaatcggtcctcctcagacatggatcttcagaaaaagcaaagtcacttgacctctgggctctcaaaagccaagagtcaggtttttaaaaccagatccggtgctaccacctcgtccccaacccggacaccctctctacaggaaatacatgctgtctgtgcctcatggaattgccaatgaagacattgtctcccaaaaaccccacggaaactctcttcgtaaagcgaggggactgcttgtgatcctgaagcaggcagaaatatactggaatgccagcggganaaggcactggcagagttcaccatcccagactgttgacagtggagctcctcatgctgtggttctgcatgatttcccagcagagcaagctgatgacctgagtctcacatctggagaaattgtttatcttctcgaaaaaattgacgcagaatggtacagagggaaatgcagaaaccagactggcatatttcctgccaatcatgtcaaagtccttgttgatattccaggaaaaagagaatcgtttccttctcactgtgctaaaggcccacgatgtgttgctcggtttgaatatatcggagaccagaaggatgagttaagtttctcagagggagaagtaattattcttaaagaatatgtgaatgaggaatgggccagaggagagattcgagaccgaactgggatcttcccccttaactttgtggaacttgtggaggatcatcccacatctggtgcaaatatcttaagcacaaaggagccaccaaagaccaaaaatgaagaccctggctcaaattctcaggctagcagcccttctggagagtggtgcagagctctgcacagcttcacagcagagaccagtgaggacctctccttcaaacgaggagaccggatcctgatccttgagaggctagactcggactggtaccgtggccgactgcacgacagggaaggcatcttcccagccgtgtttgtgcagccctgcccagcagaagcaaaaagtaatgactaccacaatattgaaggggaggaaggtcaaagccctatatgatttccttggggaaaatgaagatgaactctctttcaaggctggagatataataacagagctggagcccatagatgatgactggatgagtggagagctaatgggaagatctggaatatttcccaaaaactacgttcagtttctgcaagtcagctgaaggtgaagcttggctgttcctgggcacaagaactcacttgaacactcactttgactatcagatattttgcactattttttttaacggaaagagaactatctaagctgtatgtggtacactagggtttctgagagcagaaaacttgtaggttttatagtttagcttcattcgtagtggaagggtgtacataaatcggaagtgaggaagccaagaaaggaaacattagtggggacagcgggcagatgcacactttcccaggaaatcatctggtgttggcagcgtggggaggctaatgataggaactgtactcatacacctgtccccatcaacacactgaattaaccctgcttcttcattttctactttagtttaaaaagaggactttgacgttctacatgctgtaactatcaggacatggatggtaatcagaatttcattttttgatactcaaattaattctaacagcttgagcacatgagtcttagtcccagggcaaattcttgcttctggacagatagtgtggtaactagaggaacatttataagcaggtggggaaatgagctcaagtttccccctgaatgttccttgtattcccagaatttcccatttgtccagggacttgaaggggtcaaaagaaccaaaaccatccctgagatgccttgctaatacaactaacccttccacagacatgccacacttatctctttgtccatgtatactttatgttaacagggttattataaagcacactttctgaatctgcaatcattcctttgacaattactggtacccaaggaaaactcattttctttgcattaccccagtaatacataaaagctgtgtcttgttatagtagtacattatgaatcatggatagtatcttacaatacagagcaaatgggtaagatgaaaaatagtggcaaggcctggtagctcattcatttcttctcaatataatcagaagaaaaaataatttaagaggactgaaggctggtgcagctccccaccccaccccctggtcatccctggagttattggagtaaacacaagaccacttccctgccgactagggtatcacattttgagcttaaaaagtggttcttgcatgactgaatcaattaccgtttacaaactaaagccaaatggattgaagacaatcttcctgatggatcagtgggttaacatttcactggaaatgtgaaacacttcccaacaaggtttgtggctttcttctgtttttgagaagagtgccatatgctggaccacttcttagtttccattgttttccccattatccaaatagctgggtagccaatgattatctgaacatgtgggtgctataaggtatgttttgagtgaagaatgtataaggaaaattcttgtcagttttcaatcaaattaatttcatgggactgggataactttaaagtgttatccaaactaaattctcatttgcagccagccgtacaagcacatgaaggggtcaagggtgaggagtgggccatgaagcgtctttgcttatgggatttcaacatctaatagtaaagattctgaaaaatctagctttattgaagaaaaaaaaatccctcttatatgttggccttctgtaagcagaatgataagtgcaatagttgtgtatctactttacactataataaactgaactgaacttttcaattccttatctactatactgcatttttcagaagaatgtagacagtatcttacttatccttgtatctccagtcctttgcccaggtgggtgaggtggctctgtgctaggtgggtttggtggtacagacagatggctttttttttttttgccatctcactcagctcacccagcgtggcttcc

SEQ ID NO: 109 - DNA, 3706 bp, Cricetulus griseus
  modified_base (791)..(791): a, c, t, g, unknown or other
caataggaagaagaagagagcaacttcagctctccctgatgctttggactccagacaggaacaaagaggaaagaaagcattactgagaaaagcccaagaaaggccttgttttttgaaatttcaagcgatgatggctttcagatctgtgcggaaagtattgaagatgcctggaagtcactgacagataaagtccaggaagcccgatcaaatgctcgtctgaagcagctctcatttgcaggtgtgaatggtttgaggatgctcgggattctccatgatgcggttgtgttcctgattgagcagctgtctggtgccaagcactgtcggaattacaaattccgtttccacaaaccagaagaggccaatgaaccccccttgaaccctcatggctcagccagggctgaggtccacctgaggaagtcagcatttgacatgtttaacttcctggcttcttaactaccaaacattgagcctgtggctgtgagtggacgtgttaccctgtgagccttaccgcagccagtgacctttcttgatgataggagcggctccctctccatcccgtctgtccactcccttcccaccctcccatccttcatctgctgctttcccattcttctttctgggtggcagggcttgtctccctgctcagggacactccctattgggtataggaagtgcctacagaaagtcccctgagcctgaaagcactccaggtggggaagtggacaggagccactggccataaccagacagaattcagagagttcataaagctccactgggagttttaaagngaaaaatcaatgtagcaagatttttttgaacaacaagctaaagatgatttcaataggatttgagtcgtgcaacagccagagtacaataaccaggataagccgcagccccttcctaggacatgcttactttcttttccctttcttaaagacataggaagatgaattctaaatggtcagtgtccagctgaaagaacactaatcagatttcaaggccccagacttgggaactagaccacatgtgctgagggacctctgccagctgtgtgagtctgtggctgagcaaatttaatgacactactgccctggttacttcgtaggatgtggacaaacagcagcaaatgtttctttcttccccaagatagtgtcttgaacctgttaaattaagtcattggattttactctgttctgtttacagtttactatttaaggttttataaatgtaaatatattttgtatatttttctatgcgaagcacttcacagggagaagcacttatgacaaggctattttttaaaccgtggtattatcctaatttaaaagaagatcggtttttaatgatttttatttcataggatgaagttagagaaactattcagctgtccacacaaaagtctggttttcctgcccaacttccccctggaaggtgtactttttgttgttacatgtttagctcgttcgcgcccgctgacataaaatgttctctgggtctgctctttgcagtaatggagaaggaaggtcacccatccattaggcactgcctccattgccaaggatgggaagcccagcactgtggccaggatggcagagacttccttgtcatcgtggagaagtgccagcaggggactggggaaagcagtctacccagacctcacctcccgccctccttttctcatgaacaagacgcagtggcccaaggggctccactagtgtcttgtatttccttttacttaattgcactgtgtgaggtttttttgtaaatccttgtattcctatttttttaatgagaaaaattgaagctgcatttgttactgaaacgattaatgcactgatgggtcatgcattcaccttaagagagacccaaaggccagtcagagggtgggggaaactcagctgacagacctagttactgccctgctaggccatgctgtactgtgagccccctccacatcctctctctacaaccccaacccctcgaggtcacagggaggaacccacctttcctcctcctgccagctgcagatggtttaccttgcttcctacccactgtcaaccacagaagtgagaaatccctctttcagctcagccttgagtccattgccaaatttcagcatacctgccagcaacttgggggataagccagagtttccccacaagagggaaagaggacaacaaaacaaaaggcacagctgtctccaaaacatgtctgacttcattttgaaagtgaccaagagaacctccgcacagaagtgcaggttgagtgaggacttgcatggtgggtcattcccaagaattcctcaaggggcaatccacatccctaggagtgacagctgcaaacctcggctttgctgctagaacctgttgtggctgcatttcctggtggccagtgacaactgtgtaaccagaatagctgcatggcgctgaccctttggccagaacttggtccctgggctccttcattgttatccatgtccagcacaacccctttcctatttttagaccaatcacaattaagggggaagccctggtacctcttagattttcaacccaaactcctttgccaggacccagctcacctctgtcaactctcggccaatccagtgagcaccatgcagcaaccttgaatttaaaaaaaaaaaaaaagaagaaaaaaaaaaaagttaattttaatgaatgtatctttctaaaggactgacgctcaatcaaatacctgaaaatactaaaggtcagagcctcatcaaatgttaactttttttggatttgggattctttttcatagaaaccaagttgggttggttttttttttttttccttttgttttgttttcaaggaaaagcgggtcattgcaaagggctgggtgtaattttacgtttcctttccttcattttaaagcaatacaaagttattgagcagatagttttgtgccgaatcatgaaaatcatgaatatcagtcaagtctcactctgaaaacttgcagtcctttttgtttgtttgtttccacaaaaggatgacagacgcccgtccccaagatcagagtgcaatgcagagatggtgtcacctgggctcttcctgcctgtgaatgttgccagttggtacctgtactcctcgtttctctacttttggttatgaatgttggggttaccacctgcatttaggggaaaattgtgttctgtgctttctggtatcttgttctgaggtacactagttctgtctttcaaccaagaaaatagatttgtggtgtttcttttcttgaactttaccagtctccttagcaaatacaggtagttgaataattgtttcaagagctgaacaatgacaagcttcatttctagataagacatttctcagcaactgtatcatgtaaaatggatcttttgggggttgttttgttttgttttgttttttcccttttttccttgtgttcttccaagcttctggttagagaaaaagtgggggtgggggaggaaaatgtgtctaaagtccatcagtgttaactccctgagacagggatgaaggaaagtactttaatagttcaaaaataataatgctgaaagctctacgaaagactgaatgtaaaagtaaaaagtgtacatagttgtaaaaacaaaaaaggagtttttaaacatgtttattttctatgcacttttttttatttaagtgatagtttaattaataaacatgtcaagtttattgctgca

SEQ ID NO: 110 - DNA, 3703 bp, Cricetulus griseus
gtccattcctttgtatctcatgcctcggccaaattcagtagcagccacgagctctgcccacttggaggatcttgcctacctggatgagcagaggcatactcctttgagaacttctcttcgaatgccaagacagagtatgggtggtgttcgcacacagcaggatctaagagttcgctttgcaccttacagacctccagatatctccctgaagccccttctctttgaggtgcccagcatcactacagagtcagtgttcgttggccgagattgggtattccatgagatcgatgttcagcttcagagttcaaatgccaatgtgaaccaaggagtagtgattgtggggaacattggggttcggcaaaactgccatcatctccagactggtggccctcagctgccacggtacacggatgagacagattgcctctgatagcccacactataaccagtggaagctggcccaggaactccggaaatgcgcagacgacaagaggaggccatgcgaagactcgcttcccaggtggttgcctatcactattgccaagcagataatgcctacacctgcctggtaccagaatttgtccacaatgttgctgccctgctgtgccgctcacctcagctgacagcttaccgggagcagcttcttcgggagcctcacctgcaaagcatgctcagcctccggtcctgtgttcaagaccccatggcctccttccggaggggagtcctagagcccctggagaacctccacaaagagagaaaaatcccagatgaagatttcattattttaattgatggattaaatgaagcagaatttcacaaaccggattatggggatacaattgtatcatttctgagtaaaatgattggaaattttccttcttggctcaaactaattgtaactgttaggaccagtttacaggaaattaccaagttgctgcctttccataggattttttggatcgactagaagagaatgaagccatagaccaagatctgcaggcttacatcctgcaccggattcacagcagctcagagattcagaataacatctcacttaatggcaagatggataatactacatttggcaaaactcagttctcacctcaagaccctcagtcaagggtcttatctatacctgaaactaacattgacctcatagagaaaggctacctagtgcttttatttacaaagtaaagggaaaacctgtgtaacacgagaattcggcatggacaaatggagatcattttgtatctgctgttgtgtccagattgcagacgtgcactgttagaagtcccgagttaatagagcacagcccctcgttcctctcccaggcgcccttcttaggtgtttagctgaaactcgatggctcaggaaaattccactaattagaattgtgtacagtatcccaggttgttgtccagatatccaagtttgctgatttttagttaagcctggattattaaacaggtcctaaattgtaaacagaacaactcagagaaaggtgttctcagcccttatattgtatagtactttatgattcccctctaaatattcatatttttatattgcagagatatacccaatagaaaaaatttaaaccagtatctaatttaatatccataagtatttttccttagagtttagttatactcagtgggatatgtggatgtcacgtgtgcttcaccgtactctaccgctaggtgtcactgtggctctgcagcatacttacctggttacagagaatggctttgtggagctgctgccagtgtaacaggcaggcccataaactggaggtcaggaagaagggaacaaaggcctggagggtcttcatgcatccatgccacctgtagcaagacactctgaacaccacctgcttgggaggttaggttgagccccctttctcccagtccactcagcttccaacttttataactccacaagtatcatggttgggtggtttgattaaagatagctatttttctactgcagaaatgccttggacaaaaccagttgctcactgaatctttgccactcaatggaacaggctccccaggtggcaggctgtgctgcctctgtgcccatctgctgagcccccagtgctcagcagccccacccaccctgcctggctgccctctggctgcccagttctcaagaagcggtctgctgccgcctttactctgagggccatactgccctgccttgtgcttgttgaaaggtgtgacttctccttttcctctgggaattccagactgaccatctaccatgactaacaatgaacaaagggcttaggggtaagagctacctgcaaagacgcgtcatggaaaccttcaccatgcaatgccttgaaatcagctctggctgctcccaagaaaaggtggctggctaggggcctggacacaagcacaacggggctggtggagccactgtgcagagctacttgaatattccctgggtcttcatcaactcctttgtaatacagaccactcaagggctgaagtgttggtaaccttcatttcagtgtccaatgcctctcagcagctgagccaccctgagacgcttgtggccacacgatggctgcagtcagagctttgaaagtcagtaccaaatgaacgtgtaattggacaccgaaaatcaagtgttactctctcatgttccctcaccctaccatctcatttcttcctgctgactgtgatcctacactaagctgaccagtcaggctgcagctggatgcacggagatgccagccagcaccatctcctagtatcagatagacctactccatgggaagaacgtggcctagctgctttgtttctgtagcacttggtggctggattttccctttgctactcactaaccagaaagtctggctaggactcaaatcactcccttcaatccccaggaccagacagagagttaattctggaaaattcagtacttgaatgtacctgccttactgtgtacccattcgctggggggaggggggggagaactagcgatgctggctctagatacccacgtcattcacaggttattttggaaatcctgtaagttatatttcctgtcctgatttcttttttgttttgttttttaacatttggctgattcctgctgagttgggccagttcctgtggggctcagggcaggtgccattctcaggcatggcctcccttccatctagcacagtgtctgtgtctctgttctgtctcctccaaatccaagatgattttaattagtacagacatgtacagtctacaattaaagagtgatttgtactaatatgattttgattattcctctttgctgtcctttcaagacacttgctggaaaagctttaatgcacttagttttcctttaggttttctataactcagatgtaaaggactttctctgtacagtatattatccaatgcatgtttgttctctatcctaatatatcaaacaccacacagtcgtgaactcgtgcagtggggacaccccacacccagcggaggcctctagccccgtgtataaggaagacatttccttcgctgtacttgcttgaacagttttattgtctgtacatgtgagctgtgtgagatagatgtgaaaagttcaaatgaatgcattttcctgccccatgtatacagagcgtcctctgtacaatgaactgtatgtatgaaagcaaatgtacttatttataaatggtcacacttggagaaaaaaa

SEQ ID NO: 111 - DNA, 3699 bp, Cricetulus griseus
ggcaagaactattcttatgcaatcaagtttaccccagactcagctggcttcgatatggaatctttctgacattgatcaagatggaaaactcacagcagaagaatttatcctggctatgcacctaattgacgttgccatgtctggccaaccattgccacctgtcctgcctccagaatacattcctccttccttcagaagggtcagatctggcagtgggatgtccgtcataagctcttcgtctgtggatcagaggctacccgaggagccggcatcagaggatgagcagcagttggagaagaagctgcctgtaacatttgaagataagaagcgggagaattttgaacgcggcaatctggagctggagaaacgcaggcaagccctcctggagcagcagcgcaaagagcaggagcgtttggctcagctggagcgcgcagaacaggagcggaaagagcgggagcgccaggaacaggagcgcaaaaaacagctggagctggagaagcagctggagaagcagcgggaactggagcggcagagggaggaagacaggaggaaggaaatcgagaggcgtgaggctgcaaaacgggaacttgaacggcagcggcaacttgaatgggaacggaaccggagacaagaactcctgaatcagaggaacaaagagcaggagggcattgtcctcctgaaggcaaggaggaagacactggagtttgaattagaagccctgaatgacaaaaagacaatcaactaggaaggaaaaacttcaagatattagatgtcgactgacgacccaaaggcaggaccttgagagcacaaacaagtctagagagctgagaatcgccgagatcacccacctacagcagcagttacaggaatctcagcaaatgcttggaagacttattcctgaaaaacagatactcaatgaccaattaaaacaagttcagcagaacagtttgcatagagattcacttcttactctcaaaagagccttggaagccaaagagctggcccggcagcagcttcgagatcagctggacgaggtggagagagagaccaggtcaaagctacaggagattgatgtcttcaacaaccagctgaaggtaaaagtaggtgtattaccgagcattgtaacccctttcgaatccagaagtcacgaatgaaaatacaccatccagccaggagatgtagtcatggtggatgaaagccaaactggagagccaggatggcttggcggagaattaaagggaagacaggatggttccctgcaaactatgcagagaagattccagaaaatgaggttcccactccagccaaaccagtgaccgatctgacatctgcccctatccccaaacctggctctgcgtgagacccctgctcccttgccagtgacctcttctgagccctctacaacccccaacaactgggcagacttcagttccacgtggcccgccagcacaagcgagaaaccagaaacggataactgggacgcatgggctgctcagccttctctcacggtacccagcgctcggccagttaaggcagaggtctgcctttacaccagccacagccactggctcctccccgtctcccgtcctgggccagggtgaaaaagtggaggggctacaagcgcaagccctgtatcccttggagagccaagaaagacaaccacttaaattttaacaaaaacgatgtcatcaccgttctggaacagcaagacatgtggtggtttggagaagttcaaggtcacaagggttggttccccaagtcttacgtgaaactcatttcagggcccgtgaggaaagctaccagcatcgatactggccctaccgaaagtcctgctagcctaaagagagtgtcttccccagcagccaagccagccgttcctggagaagagtttattgccatgtacacttacgagagttctgagcaaggagatctaacctttcagcaaggggatctgattttggttaccaagaaagatggtgactggtggacgggcacggtgggcgacaagtccggagtcttcccttctaactatgtgaggctgaaagactcagagggctctggaactgctgggaaaacagggagtttaggaaaaaaacctgaaattgcccaggttattgcttcctacacggctactggtcccgaacaactcaccctggctcctggtcagctgattttgatccgaaaaaagaacccaggtggatggtgggaaggagaactgcaagctcgagggaaaaagcgccaaataggttggttcccagcaaattatgtcaagcttctaagccctggaacaagcaaaatcaccccaaccgagctacctaagtctgcagcgctgccggcagtgtgccaggtgatcgggatgtacgattacaccgcacagaacgatgacgagctggccttcagcaagggccagatcatcaacgtcctcaacaaggaggaccccgactggtggaaaggagaagtcagcgggcaagttgggctcttcccctccaattatgtgaagctgaccacggacatggacccaagccagcaatgaatcatatgttgtccatccccccctcaggcttgaaagtcctcaaagagacccactatcccatatcactgcccagagggatgatgggagatgcagccttggtcatgtgacttgcagcatgctcacctactgccttctgagtagaagaactcactgcagagcagtttacctcattttaccttaggcgcatgtgaccgcaatgtctgagtcacaggctggcgggcccttttgtggctttcctactcactcagactgactgccctgccctacacaggtgctttcagtagttttaagattatttttaaatgtgtattttagccttttaataaaaaaatcaatcaattacttctttgctattttggttttgcaaaaagacccactatcaaggaatgctgcatgtgctattaaaaattgttccaaatgtccataaatctgagacttgatgtatttttccaattttgtccagtgttaccgactaagttgtgtagtttggggcttctccctccccgtagagtgcacaggagtcaggtgtacccgctttgaagatgtgtagactgagcctgaccagacaggaggtgtcgtgcttgtttatgactgtcacacgtacccgttgcccatgtaacgcatctgtactgaagacatagctcttcccgtggcaaacgataccaccgtgtacaatgctttcatctattgcattaattttattttgcacagtgactttgtagccacaagagaaagcacctgtgtttccgtttggtctcagatttatctagtcggttggtgttttgttttgagcttttaatttggcgtattttcataccgtaaatcagtaagacaccaccaccaaggtggtaacgatcaacagtagtctctgttacatgaagttttattccagttgcttttcatggaatattttgaacaagtaattttcttgacaagaaagaatgtatagaagtctccctgcaattaatttccagtgtttacatttttaactagactgtggagtttctacagattaatatgaaatggcgctcctggtgcacgtgtgtgttaactgtgctgtagcctaagccatgtttgtctttagtcattagttggaatctctcaataataaaaagaaaaaaaatacccacttctggcagcacagaaaatggggttggggaaccctg

SEQ ID NO: 112 - DNA, 3698 bp, Cricetulus griseus
agcggtagctcggcgggtatcgggctcctcgccgttccggcttcctcctcgtgcttccctgcggcggcctagcggaaaactaagcaaagatgtctgaatacattcgggtaacagaagacgagaacgatgagcccattgaaataccctcagaagacgacggaacagtattgctgtccacagttactgcccagtttccaggggcatgtggccttcgataccggaatccagtgtctcagtgtatgaggggtgtccggctggtggaaggaattctgcatgccccagatgctggctggggcaatctggtatatgtggtcaactatcccaaagataacaaaaggaaaatggatgagacagatgcttcctcggccgtgaaagtgaaaagagcagttcagaaaacatctgatctaatagtgttgggtctcccttggaaaacaacagaacaagatcttaaagactatttcagtacttttggagaggttcttatggttcaggtcaagaaagatcttaaaactggtcattcaaaggggtttggctttgttcgatttacggaatatgaaacccaagtgaaagtgatgtcacagcgacatatgatagatgggcgatggtgtgactgtaaactccccaattctaagcaaagcccagatgagcctttgagaagcagaaaggtgtttgttgggcgttgtacagaagacatgactgctgaagagcttcagcagttcttctgccagtatggagaagtggtagatgtcttcattcccaaaccattcagggcttttgcctttgttacctttgcagatgataaggttgcccagtccctttgtggagaggatttgatcattaaaggaatcagcgtgcatatatccaatgctgaacctaagcataatagcaatagacagttagaaagaagtggaagatttggtggtaatccagttcatctcatttcaaatgtttatggaagaagcacttcattgaaagtagtgctgtaaatattctgccataggaatacttctgtctacatgctttctcatccaagaactcgtcatcacgctgcacaggctgcgtctttgacggtgggtgttccatttttatccgctactctttatttcatggagtcgtatcaacgctatgaacgcaaggctgtgatatggaaccagaaggctgtttgaacttttgaaaccttgtgtgggattgatggtggtgccgaggcatgaaaggctagtatgagcgaggacaggagagagcgcgtgcagagacttggtggtgcaaaatggatattttttaacttggagagatgtgtcacccaatcctgtggctttggtgagagagtgtgcagagagcaatgatagccaataatgtacgaatgtttttgcatcaaaggacatccacatctgttggaagactttgagttttgttcttagaaaacccactttagttgaatgttaagtgaaatacttgtacttccctcccctctgtcaactgctgtgaatgctgtatggtgtgtgttctcctctgttactgatctggaagtgtgggcacgtgaactgaagctgatgggctgcgaacatggactgagcttgtggtgtgctttgcaggagaacttggaagcagagttcaccagtgagctcaggtgtctcaaagagggtggacgttctcatgtctgttagcaaccataagaatgctgtttgctgcagttctgtgtcctgtgcttggatgctttttataagagttgtcattgttggaaattcttaaataaaactgatttaaataatatgtgtctttgttttgcagccctgaatgcaaagaattcatagcagttaattcccctttttgacccttttgagatggaactttcataaagtttcttggcaatagtttattttgcttcaaataaacttatttgaaaagttgtctcaagtcaaatggattcatcacctgtcatgcattgacacctgatacccagacttaattgtctatttgttcttgcattgtccaaagtgaaagtttttcatgggttgtttgttttttaatctagtttttcataagtctgggtgacagagcctaaaatggtaagccgttgccctccagcttattctgagtgcctctgtgcatttgagtgatttttctagtgacatggatgtagaaatgtccattgggaagtcatgccttctaaaaatatttgggagagggggcaaaacagttgttttcaaatgctttgtagcagaccatatcaatgggaacaaagggatgagcatatttctgttggggctttgaaaagtggaattaattgcaatagggatgaagtagaagaaacaagaaaccgtgtgcctgaaatcattaagaagcctgattgatagctttaagaactagtggggagggttgtctgcctgtggcagtcttaagtgaagtgggctcttaacctttgggggtgtgggggcatatcatgatgctcacaaagtcagagtagacttagtgcattgtaagaatgtaaaagcaataaaaccttgattgttgtactcttcctgtaactactgagaactggggagctccttttctaactggaaacttgaccatttttcgtgttggtagttttcctaatgcccttacctgaattagattatgctaaataggtttgtcattttgcaagttgcatgttttaaaattttatatcctttagagacttgttatgaacacagtgtttcattattcagtatcctctgtaaaaggatcttgagttattgtaaattttttctctgcatctaaatctgcatgatttccaaaccctgtacatctgaattttgcattttagcacttgcactattactcagcagcagtaacatggtaacattaaaatggttttcgggatctccaaagacgtccaggagtcctggggtaagttacttgtccatggcatggtttttgatcccttggtttgcacttgttaaagacttactggtcatggaaggctttcaatgttgagtagccttttaacatgtctatggtatgacgtagctgtagatagttatttgccctaaatgaagttttagaaataaactacttggcaaagatttggttttgaaagtaattggtcatcaaaatgcattcattcttaaaatagaaatctttgaaccacagttgaaataaaaagttttcttgccacaattctggttaaaagaattaaatactactaaaaggcaaattgtattaatgttttgaaaacctagatattgtcaaacaattgcttagggaaatactgaagttactagctttgggtgcctgccccagctagactctgcctattgtcctccatctactctttgtcagccatgagtcttttataaatgcgtccattaccaggctcacaagctgggagggatttttctcctttggcgctcgtccaaaatccatcagcctcgcacacatatttacctgcagatcattggaaaagcaaaaatgttttaactgtggttgtcatttgcttgaataaccccttgaaaaatgttgattcttgagcatctgtggtggggagaggtgtgtgaataaccattttacatgatttcataaataggtgtctgcattaccatgtttgcttgcaaagtggaaaccttttagatgtgtaacttgaatatgtatcaagatctcaagtgcttaatgataaggttttgacttgttaaattaaaccaatttaggaatatattgtg

SEQ ID NO: 113 - DNA, 3696 bp, Cricetulus griseus
tgattaccaggaacgaatgaacaaaggggaaagacttaatcaagatcagctggatgctgtatctaagtaccaggaagtcacaaataatttggaatttgcaaaggaattacagaggagtttcatggcattaagccaagatattcagaaaacaataaagaagacagcacgtcgggaacagctaatgagagaagaagcagaacagaagcgtctaaaaactgttcttgagttacagtatgtattggataagctgggagatgatgaagtgaggactgatctgaaacaaggtttgaatggagtgccaatattgtctgaagaggaattgtcattattagatgaattctacaagttagttgaccctgagagggacatgagtttaaggttaaatgagcaatatgaacgggcctctgttcacttgtgggacttgttggaagggaaagaaaagcctgtatgtggaacaacctataaagactctaaaggaaattgttgagcgtgtttttcagtcaaactactttgacagcactcataaccaccagaatgggctgtgtgaggaggaagaggcagcctcagcacctacagtggaagaccaggtagctgaagctgaacctgagccaacagaagaatacacagaacaaagtgaggtagaatctacggagtatgtcaataggcaattcatggctgaaacacagttcagcagtggtgagaaggagcaagtagatgagtgggcagttgaaacagttgaggtggtaaactcacttcagcagcaacctcaagctgcatctccttcagtaccagagccccactctttgactccagtggctcagtcagatccacttgtgagacggcagcgagtacaagatcttatggcacaaatgcaggggccctataatttcatacaagattcaatgttggattttgaaaatcagactcttgatcctgccattgtatcagcacaacctatgaaccctacccaaaacatggaaatgcctcagctggtttgtcctccagttcattctgaatctagactcgcccaacctaatcaagttcctgtacaaccagaagccacacaggttcctttggtttcatccacaagtgagggatatacttcgtctcaacccttgtaccagccttctcatgctacagagcagcggccacaaaaggagccaattgatcagattcaggcaacaatatctttaagtgcagaccagaccacagcatcctcatcccttcctgctgcttctcagcctcaagtgttccaagctgggacaagtaaacctttgcatagcagtggaatcaatgtaaatgcggctccattccagtccatgcaaacggtgttcaatatgaatgccccagttcctcctgtcaatgaaccagaaactttgaaacagcagaatcagtaccaggccagttataaccagagttttcccagtcagcctcaccaagtggagcaaacagagcttcaacaagatcaactgcaaactgtggttggcacttaccatggttcccaggaccagacccatcaagtgcctggaaaccaccagcaaccccctcagcagaacactgggtttccacgcagcagtcagccttattacaacagtcgtggtgtgtcccgaggagggtctcgtggtgccagaggcttgatgaatggatacaggggccctgccaatggatttagaggaggatatgatggttaccgcccttcattctcaaacactccaaacagtggctatacacagtctcagttcagtgctccccgggactattctggctaccagcgggatggatatcagcagaatttcaagcgaggctctgggcagagtggaccacggggagccccacgaggtcgtggagggcccccgagacccaacagagggatgccgcaaatgaacactcagcaagtgaattaatgtgattcacaggattatgtttaatcgccaaaaacacactggccagtgtaccataatatgttaccagaagagttattatctatttgttctccctttcaggaaacttattgtaaagggactgttcatcccataaagacaggactacaattgtcagctttatattacctggatatggaaggaaacaatttttactctgcatgttctgtcctaagcgtcatcttgagccttgcacacgatactcagattcctcacccttgcttaggagtaaaacatatactcatggggtgataatatctccagttatttgaagtggcttgaaaaaaaaaagcaagtttgacttttttgatattggataaaatctacaatcagccctagaattattcaatggtaattgacaaagttaaagcatttcccatgaaaggaagatggaaggagtggagtgtggtttggcaaaacaactgcatttcacagcttttcccgttaaattggagcaccgactgattagaagcataccaaattatgcatgggtccttaatcacacaagtgaggctggctacagccttgacatagcactagtcatctggccaaacgactgtgattaaaaacacatgtaaattgctttttagtagtggatatggtataagacaaagccaaaatgcaaattaggctttgattggctcttctggaaaaatatgcagcaaatatggggtatgatctggatgggttgcttctgtattcaatgtgaactatttagataccttttgaacacttaacagtttctctgaaacagtgacttacatgaggattggtactgtttgtcactcctcacaataatgtgcattgtggtcactaatccttggatctttctgtattgttacctaaattggtataggtactgatgaaaatctctaatggatggataatcataacacttttggtcacatgtttttcttctgcagcctgaaaattcttaaaaggatatcaaatgcctgctgctaccacccttaaaattgctatcttttgaaaagcaccagtatgtgttttagattgatttccctgttttagggaaatgacagacagtagtttcagttctgatgatacaagcaaaacaataaaacatgtttctaaaagttgtatcttgaaacactggtgttccacacctagcagctaaagtgattcaccacatgcattgttggtgtcacagaattgtggttatgtctagcagctgtttgtgaaggacttttacttatctttttgtctgatttaatcttaattgaattctccttttcttgtggagacatttacattcaaagtgttgattctttgccttagatgcatagagagagtatgcagtttgacggagatggaaagtttagcagtgtttaggcgtatgttctgtgttggaatttgtgctagcagtttgagcactagttctgtgtgcctatcaacttaatgctgcttgtttgtcccattccattttacttcatggagaattaattccttatgctaagcaaaggctactaagttaatgttttttctgtacagaaaattaattttacttttagcctttagcacactattttttttttcaagcaggtaatcagctactcaaaacaacaaaattattctcagatattcattagacaactggagttttgctgtttttgttgcctactaaaaatggttaggctgttgaacattccacattcaaaagttttgtagggtggtggataatggggaagcttcaatgtttattttaaaataaataaaataagttctcgaacttttctca

SEQ ID NO: 114 - DNA, 3682 bp, Cricetulus griseus
  modified_base (296)..(296): a, c, t, g, unknown or other
  modified_base (1304)..(1304): a, c, t, g, unknown or other
  modified_base (2075)..(2075): a, c, t, g, unknown or other
ctgcagtgtttcctgtttctccgtggaaggcttcagctggggtaactacatcaacagcaatagcttcatagcagctccagtcgcctgctttaagcatgcacctatggggacctgctggggtgatatctcagaaaatgtaagaatagaagttcccaatacagactgcagtctacctaccaaagtcttctggattgctggaattataaaattagcaggttacaatgctcttttgagatatgaaggatttgaaaatgattcttctctagacttctggtgcaatatatgtggatctgatnttcatccagttggttggtgtgcagctgaagttggaggctatagacccattaaatctttctacaatatgtgttgcaacaattagaaggtgctggctgatgggttcctgatgattgggatcgatggctcagaagcagcagatggatctgactggttctgttatcatgcaacctctccttctattttccctgtgggtttctgtgaaattaacatgatagaactgactccacccagaggttacacaaaacttccttttaaatggtttgactacctcagggaaaccggctccattgcagcaccagtaaaactatttaataaggatgttccaaatcacgggtttcgtgtaggaatgaaattagaagctgtagatctcatggagccacgtttaatatgtgtagccacagttactcgaattattcatcgtctcttgaggatacattttgatggatgggaagaagagtatgatcaatgggtagactgtgagtcccctgacctctatcctgtagggtggtgtcaattaactggatatcaactacagcctccagcatcacagtcgtcaagagaaagccagtcagcttcctcaaaacagaagaaaaaggctaagtcccagcaatacaaaggacataagaaaatgaccacatcgcagctgaaggaggagctgctagatggagaggattatagcttcctccatttgtagtcatccagctgtacagcaggctattctactgggacattttgctaaacacagaaaagttcagttccagattttcaggtggggggaaactattttggtgggggggaatttttcaatttataaagatggacaatttttgtgttgtatttgaagcttttgaaaagaaaattttgtaatattttcctgaaattctaacttttttggtaagattaaaagttttaggttagcaggattgaaggaaatgattaagaaggatatagctgtaaaatgcaaatgaactgtcgttacaaatgaaccttcttggtacctgttgggngatttttggattttagagttaggccagtcacatctccagcttccttttgctgcaaaaatatgcaactgaacccctcacagagggctcatcaccatgtagatcacggaaggggtcattaattgtgcttgctgacattttattgcagcccatttaaatgtacagaaattttttcattctgctaaaatttatttggagttatatatgaaactaggagaactctggatacttttatatgctctccacgtaaaaatgataaacttttctaacactaatgtgttaaactggaatgattgacaagatacacaggatctcagtctataaaaagggtggggaaaatgaagaatatttcccaaagttatactatattccttcctagctagagaacatcccataaaagggatattcttatcaaacctctgccatttccctccatctgagagagagcaacttaatgtaaccacgcctgaaaacagatgttctgtattaccaagggaatcagataaaaaaaaaattgttaaccagaataagtttagatttcagaatcattccagctccacttttaactggatttgttagaaactgatttgataacaataactgatttggaccattttaaacattccctattttaaaattcatatggcttcctttaaaaaaaataggataaaagggtaaattggtgaaagatttgctctctgcattttctacccttctaccgagttgtgactgaatgagagctctagaatttaccagtgaggttcataaacaaanaaaaaaaaaaaaaaagaaagtaatggaaaaccccaggagacattttagtaagatttttgtttgacttttaaatgcatagaacattaaaaaccagcaatttattttctaaaatattgctctacttttgggaataatagcattggtaatacgcacaggtttacctcattctatgcaagaggggttaataacataaggttttgtagtagctactggaagtaaaatgtgttactttatagtgtaaaaatgtatggaatcgcatgtcaccatttcttaatactgactctgggggctaaatgtagatcacatcaatgcaagttgaatctcgtgtcaaatatatgtgaattcagctgtaaaattactggatatttatcttaaacaacattgtggagggggacctactgtaaatgtgacatcctcaaactttccaaatctttgactttgaagaatcttcccaggagcttcaagcctagaagaggtccaaagcaaaggttatagcagtctttcttctcaggctcagcggattaaacccaggactgtgcttccatggtaccagcacaagaagcctgttgtatggggtgctctcctcataccttaggtgtaggagctctccggggaatgaactgtaagccaggaaggatgtgatttcatgccagccagtcctggtaattagttctgtgaaatgctcatttgtagccaggttttacaagcttccaattgtataccaaaaccaggcttggcgtgtttaaaattccccacctacattcataaagtgtttatattcaccaacagtgaagggtttgtaaagacttgttcggagtctgaatacaacctgaagccctcttctttgttaagaccctcactcctgctgctaacacagaaagttaaccagaggaggcttccatcgtagccataattcctgtcgtcgtacaactcattagccccgttctcttttacagttcaaaatgtactgctgaccttgggtttgcttttgtttcctgttaggagcctgggaacttttagtagtttaaactttttaaccttttccttgctgtgtatgaggaaagctaaagctgttatcaacttcttattctgcggatactaacacgggttttcagtgtttgtttgtttttattattgttaatttttgtgtgatgtgaataccctcccccatcaatatttgtattatggtgctatatatttggtaatgatcctttaatattggggagggattttaaaaaatactgtgattaaactgggtatcttcctttgattttcatattttaaataaagccacagtcatttatacaaaaaaaaaaaaaaaaaaatgcatctgtccctggacaaacctttcaaggacagaggccaaagtaaagtacataaggtttttacatcatttctgtgtgcgtttgatatatagatcaatatctggaaaaattttatcttttattttctggtaacttgtgatcattgaggaagcgtttgaagctttctcatgaaatgtatataatggcgtgaaaaaattccttcagagaatttatgttccttttcatttttaccaaaatgcaaattttcagcatgatgtggaaagcattaaaattataactttg

SEQ ID NO: 115 - DNA, 3679 bp, Cricetulus griseus
aagaaatgttcaacaaaacaccaaatgtggttcagttattacaggtgttgtttgatactcaggcaccattaaatgccatcaacaaactccctactgtgccaatgttgggcttgactcagagaactaacactgcctaccagtgtttctccattctaccacagtcatccacccacatcagactggccttcaggaacatgtactgcattgacatatactgccgtagtcgaggtgttgtggcaatacgggatggtgcctatagtctttttgataacagcaagttagttgaaggcttctatcctgccccaggattaaagacgttcctgaacatgtttgttgacagcaatcaggatgcaaggagaagatctgtaaatgaggatgataaccccccgtctcctataggaggtgatatgatggactctttaatatcacagctccagccacctcagcaacagccatttccaaagcagccagggacttccggcgcttaccctcttacttcaccccctacatcctatcacaacacaattaatcagtccccctctatgatacacacacagtctccaggaaatctgcatgctgccagctccccagtggggctttgagagccccatcaccagcgtcctttgttccaactcctccccatcctcgcatggaatctcaataggaccaggggccagttttgctagtccacatgggacccttgaccctagttctccatacactatggtgtcaccaagtggacgagcaggaaactggcccgggtctcctcaagtgtctggaccctcgccagcagcccgattgcctggaatgtcaccagccaacccatctctacattctcctattccagatgcttctcattcccctcgagctggcacaagttcccagacaatgccaaccaacatgcctccacctcgcaaactacctcagcgctcctgggcagcatccatacccaccatcctcactcatagtgccttgaacatcttactgctaccctctccaacaccagggcttgtgcctggcctggcaggcagttatctttgctccccacttgagagattccttggatctgtcatcatgagacgacaccttcaaagaattattcaacaggaaacgttgcagctgatcaattccaacgagcctggagtaatcatgttcaagacagatgccctgaaatgcagagtagcccttagtcccaaaaccaaccagaccctacagctaaaagtgacacctgaaaatgcagggcagtggaaagctgatgagcttcaagttttggagaaattctttgaaacaagagttgcaggacctccatttaaagccaacacacttatagccttcactaaactattgggagcaccaacacacatcctccgtgactgtgtgcatattatgaagttggagctgttcccagaccaagcaacacagctaaaatggaatgttcagttttgcctcactatccctcccagcgcaccaccaattgcacctcctgggacaccagctgtggtgctgaaatccaaaatgctattttttcttcaactaactcagaaaacatcagtccctccccaagaacctgttagtataatagttccaatcatttatgacatggcttcaggtaccacccagcaggcagacattcccagacagcagaactcttctgttgctgcgcccatgatggtcagcaacattctgaagaggtttgcagagatgaatccaccacgacaaggtgaatgcacaatatttgcagctgttcgtgatttaatggctaatcttacactgccccctggtgggcgtccatagacactattgtttttaaaccaggaaggctgacaaatgaaaaaaacaacacacacacacaaacaggctgaatccagcaatcagttaaaaaaaaaaaaacgacttttttaataaaacctttaagagctaaatatactaaactggcaaaacttttcagggtgcacttctttcatcaaaaataccatcaatcttttgtatagtgaacttgtatagtgtgtttaaatgcgacacatttcaaactaggtaataaatcagtgtccgcttgccagtgatagatttaatattctgttttatactataaagtaatgaaaatgccaaacttgtttaatttaaattgcctttcttatgtttttgggtgtaatggtcttttttgatttttttttttaaggcaggtctgtcatttttgaatactgtaaaactgtgacaaactttatattgaagctgtattttaatatgaccgctttgaatcctttcacagaaatatgtttgggagctgttaaacatatcccaaagaagcaatatttaataaaactaggatataaaagtgacactcacttgtgtgtgtataagctctctagagttcttagggcctcccttcatcttaaatttggtggggccagtcagttttttaattacatatgtctgaaatttaaacaaaaacatttttgttttaagattaatatagtttcttcagacattcctaaaatggctggtgataaacatttagcacctcagttgtttttcagtataggatttggtaaaacaaaacaactttgtctttgaaaagagatttatctatttaacttcttacttccccagcacaattggggttgttctgaacaatctcaatttaattcattgtctgcaaaatgataggaggttttgctggacacaacctggtccagtcatttaaaaagtccacagtggagggcctgtctagggtccagtggagtttctggcactggtacctctcaaataggatttccttcctagagtactgtactgttgcttgaagccagtcagggactttttaagcttcaatgaatatgatctgattcaaatgtcttctgatgacttgatgttatttggagcagttttttgttgttgttttgctcaactttgcttgaatctccatttccagtcagagttgtagaccttctttgtcttctgtgtttcatttctgccttcatctcctgcttttcacccaactctgccactattccagagtaggtgactaaacttttattcttcctttaacctaacccttttcttcttctgttttcagttctcttcacagtggtaatcacatgggtttggcaatccaagatgtcttgatcaggagtcagcccttttctatttggagctgaatcctatctttcatgtagaaatctacatgtatatacaagaaatgtatttttatctgcaggatgatattgtttcaaataattttattaatagaattaacttttcaggtattttctcttttaagtgtggttttgaattgttaattgcatttttatacatgatgcattcaatggctactttttcctaattataactcacctttgaatgcattgtgtaaatcaattaagataggattcaatgaacagattttgatttgatgcttattaaaagtaaaccaatgaatttgaattttgatattatgcttggtacttggaattggtatactttattaaagcttggaaatatttagcatttgaatcgttaactttcacttttgcctcttttgttaaccaggttcaatcaaagaaactggatgccatagtgatttttctctagtaggtggtttggaacttgattttaaggtgttttcaatgtgattttagtatttacagtaataaataaaatttatacaagtttcagagaa

SEQ ID NO: 116 - DNA, 3677 bp, Cricetulus griseus
aattatgatgatgaagatgtaagatgagaatgctatggacgctgatggtggagatgatgatgatcaagggagtgatgatgaatacagtgatgatgatgacatgagttggaaagtgagacgcgcagctgctaagtgcctggatgccgtagttagcacaaggcatgaaatgcttccagaattctacaagaccgtctctcctgccctgatatccagatttaaagagcgtgaagagaacgtaaaagcagatgtttttcatgcgtacctttctcttttgaagcaaactcgtcctgtgcagagttggctgtgtgaccctgatgcaatggaacagggagaaacacccttcacaatgctgcagagcccaggttccccaacatacgttaaagctctgcacaaacagatagaaaagaaagagtctcacgttcaggctttggtccctgcagtggtggcatgtgttggagacccgttttacaagatcacatcagaagcacttctcgtcactcagcagctggtcagagtgatccgccctttagatcagccttcctcttttgatgcggctccttacatcaaagatctgttcacctgtacaatcaagcggttaaaagcagctgatattgatcaggaagtcaaggaaagggctatttcctgtatgggacaaattatttgcaaccttggagacaatttgggtcctgacctatcaaacacacttcagattttcttggagagactcaagaatgaaattacccggttaactacagtaaaggcattgacgctgattgctgggtcaccattgaagatagatttgaggcctgtcctgggagaaggacttcctatccttgcttcatttctcaggaaaaaccagagagctttgaaactgggtaccctttctgccctagatattctaattaaaaactacagtgacagcttgacagctgccatgattgatgcagtcctagatgagctccctcctcttatcagcgaaagtgatatgcatgtttcccagatggctatcagctttcttactaccctggcaaaagtctatccctcttccctttcaaagataagtggatctattctcaatgaactgattggacttgtgagatcacctctactgcagggaggagctcttagtgccatgctagactttttccaagcactggttgtcactggaacaaacaatttaggctacatggatttgttgcgcatgctgactggtccagtttattctcagagcacagctcttactcataagcagtcttattattccattgccaaatgtgtagctgccctaaccagagcatgccctaaagagggacctgctgtcgtaggtcagtttattcaagatgtcaagaactcaaggtctacagattccattcgtctcttagcactcctttctcttggagaagttggacatcatattgacttaagtgggcagttggaattaaaatctgtaatattagaggctttctcatctcctagtgaagaagttaagtcagctgcatcctacgcactaggcagcattagtgtaggcaaccttcctgagtatctgccatttgtactacaagaaataaccagtcagcccaagaggcagtatcttctgcttcattccttgaaggagatcatcagctctgcatcagtggcaggccttaagccgtatgttgagaacatctggaccttgctgctaaagcactgtgagtgtgcagaggaaggcaccagaaatgttgtcgctgaatgtctggggaagctcactcttatagatcctgaaactctccttccacggctcaaagggtatttgatatcagggtcatcatatgcccgaagctcagtggttacagctgtgaagtttacgatttccgatcatcctcagcctattgatccactattaaagaactgcataggtgattttctaaaaacgttagaagacccagatttgaacgtaagaagagtggccttggtcacattcaattctgcagcccacaacaagccatcgctgataagggatctcctggactctgtgcttccccatctttacaatgagacaaaagtcagaaaggaacttataagagaggtagaaatgggtccatttaaacatacggttgacgatggtctggacattagaaaagcagcttttgaatgtatgtacacacttctagacagctgtcttgatagactggatatctttgaatttctaaatcatgttgaagatggtttgaaggaccattatgatattaagatgctaacatttttaatgttggtgcgactatctaccctttgtccaagcgcagtactacaaaggttggatcgacttgttgagccactacgtgctacatgtacaactaaggtaaaggcaaactccgtaaagcaggagtttgaaaaacaagatgagttaaagcgatccgccatgagggcagtggcagcattactaaccattccagaggcagagaagagcccactcatgagtgaattccaatcccagatcagctctaaccctgaactggcggccatctttgagagtatccaaaaggattcttcatccactaatttggagtcaatggatactagttagatgtgtgttccacatggggaccattacatttgaccgcacaatgcactgagtcgacaaggtgaccatagacacaggagagaagtgtctagaagcttcgggatgttccacttttgtttcctccatggagagtttgttcagctttcttccattgttgtttttatagcaattacttcagaaatctgtatttccataatccagaggttgtaaaaccactaatgtttttagtggttagggcaacatttgaaatgggaactaaagttaggatttatggaatgtggagatagggtccagtatctgtttgccctgtaatgtgtaggattaaaatgttaaaattttgtgaccatggatttctcgttttataaattctctcatttaaaatcaatcctgcaacacaaaaaccatgtttcttcttgtatgacctcttctttgagcaatagaaattgatttttaactggcagataagaatatccatttaagacattatatatatttcagagattggcatcttagcaaagataataaagtaccacgtgtgcatgtgtgtgagtagattttattgaatagatggaaagttctgtgttggagccctgagacctttaattctagtatcagatctctggggtggttttggaatgtttgttttgctggggtcttcaaaagagatagtgggaaaagaaaacttaaactgaaaaaaaaattacctttacaaatgaaggagtgttgggattagcaaatttagccacttggtaatagctggtggtcgttaagtgtcttgtggaacattcgttctcacagacgaatgaaaagctgtagagttgtactctgtatgataccatgacagccctgtgtttactagtttgtaataagctatttctctgaaaagctactttacttgtttcatacatttctttttttcacgtttaaacaaaactgccactgcttgcttaggtgagggcagccaaatgtgtatgtacctgtactcctagtgtaagacgtgtatttgcttgcaatcattgccatatgtaaactaagcaaggctttcctaacagatgtggaaataaactcctggttccttattctagaaataaaatccatgttttccttcagaaattta

SEQ ID NO: 117 - DNA, 3673 bp, Cricetulus griseus
gaacctgaaggtgattgacaagggtccaggaggaggcagcactgcgcagggtgcagggcgcttgccgccccaaagtcccatcacggaaccgggtcattgggaaaagcaagaagttcagcgagagcatgctgcgcacccagatccgccatatgaagtttggcacctttgcgctgtacaaacccccgcccgcccctcctggcgccctctaccgcaggcaaagccgacaatggcctcctccgggcctgggctgctcctgtccacccggcagctgccccttatgacgcacacagctccagctcttccggctgcccctcacccacactgcagtcctctgacccagacgatgcaccgcccaagctgctccctgagaccatgagccgatctgcccccaactggcgagagccagaggtgctggatctgtccatccctcctgaggtggcagccaccggccagcgggcacctcctgatgtcactgctgctgcaggccaagtgctccacacagccctggagcccacaggtgcctgctccgagcctgaggctggggactggcgtcccgagatgtcaccgtgctccaatgtagtcgtcacagacgtcaccagcaacctcctgaccgtgaccatcaaagaattctgcagccctgaggatttcgagaaggtggctgcgggtgtggcaggtgctgcagggggtggtggtggcactgggcccagcaagtgaggggtttctccaaggaggaaggctttgggggggggccgtccttcctagaatcatacttgtgctcccaccccgtccctgccctcagacctgtctgcctgtgctttgcttgcctcaaatggctcggtgttgacccagggatgtggctgggtagtcctgaatgtggttagggctcctacctacaccccccaccctgcctctcgcttgcttcttgctctgtgtgcagtgtctggtctcggtgctatcttggctgcttcagggcccctaggagatcccacctacggtgggcacagtctcttagtgccacctgggactgagtgaaggatgatgctaacataggctcctccctcaacaccattgagggtggcagcagctgggccagaggtcccttccctgcttgcctacatctggaccaggctcacacagattttgtgctccccacaccctgtctctatccaaaacccctttgaaggtggaggggctggcagacatagcaccctgctgcagcctctgggcatctgaaagccccctacattttctaccaaaggtgctgcaggaacctgctgtggaaacttctgtgcatgtgtgtttgccccttggcttgttcttgtgtggatccatgtgtgtgttgggtgcagggcgtcaggctttcctgcaacaccctttacggttccttagaacagggtcactgaaggcgtggcctcccttgccttagccaggcctgatacagtccagtctgtgtggtttgtcgtggaagccacaggcctcttttccaaccccaggttcctgaggggacatgaaaccctcaggcccttcttggggtgttacgcttgaaagtcagaccttcacactgcagacatagcatggggaggactgtgatggggagggcccagctccagcctctcttattgcagatgttggaggaaagaaaaggcctagagacctcccaggatctttggtttctcccacccttctggtttgcttttaactgctgagctccctggcagtctagcctgttggaagactttgggtgccttgggcagcttcgcttgccttctgctgctagggaaccgaggcatccatgctgatggccgagaccaaagccccaggtacaaggacagtgggcaggccagaggggagagggagggtgcctgtccccagacagcactagggactccactggcctgcccttggccactgcctgagactcacttgggtgttgagtgggatgtttctatgtgtagcctgagctggctcttggtaccttgctcagagcatggtaaaaggtggagtcagctgacccaaggacaagtattctggtcttaggggaagatactcttctctcctaccccctgccagggtctgcagcgcagccccagccctcctcgccccagggtatgaaacggctcctcacagggtttgagggggaccacagtccaggtcccaccttgtcctgtgttaaccctgataccgtccaagtgccaattggcttttccccaaataagggctggtatttcacctctgtccccagaggcgatttccccctcccctttacccaggtgagccaccacctgggtgccagttacaggtgtttgcagagaccatagaaatgtgttttcctgagagtctgtgtcatttgtgtaccttttttgtaaagaagttgtgttttcagaggtgattttatgacaggaaagtgaaagagttagttttgcaaaaaaaaaaagaaaaaaaaaaaaaaaaatttttaaaaaagttaaaaaaaaaacaaaagaaaaaatagaaaaaaaaaaaaaaagaataattgtgggattcctaagtgtggggtggagggagaaagctatttaaagagaacataggaacgcagcgattgcacaggtgaggtggcagtgttagagtaagggggaggcctgagctagctggggggtcccccagggtcgaaggcaccatagatggccatgctgccctccttccttgacttgtcaaggaaatggaagttaggtgagtccccagggtcttgggttttgagatggaaggttggttttctggtttgtttggttggctttcttttcttctttgttttgttttgcacttcaatggatggtggaacccggtctggtcagctctgcccttgggttccggtgcactaggccaaggcggcctctctggggcttctgcggttcaaggaatcactttttaaaagataagagaaaatttaagggttttagttttgttctgtctgcttctcttcttggttcatgaagcccagagagggttaggtgggggtaaggacccacttcctagcctataggtccctccgtccatacaggagtcaggactccactcccactgtacgcagagcgtcagctaggtgatggagccagagggtctgaagaggtcaggtggaaggaaggagtcaaatgctgggcacacctgtgccaaggggtgaagcaggcatctttttgttggttttaacttaaaaacacaaaggcctaaagaaatatgtatcttataattttgttttaatttttaagaagctcatttgatgaactgcacgaatggattctatatatatatataatatacgtacatagctctatatttggggacgggcactgtctcttttctctcgcgttttaagggtgacgtgtctgcctttgtctgtggttcaaccatccagctcccagctggctaagctttgcctccagtggttaatgacaggaacatggtaaagctagccggtggatgaagggtggggcccccgccccttggggagaacttctggcggggaaggtagcttattttggatgtgggtttggtagcttctgggccaggggagggcgggctcgtgctgatcactctgtctcgttcgttttgttctgctgctcttcaatattgtatcgatgccaggaaaagggggtgagacctctttcaccctcaaataaattgtcacattccgaagcta

SEQ ID NO: 118 - DNA, 3673 bp, Cricetulus griseus
ttcatgctaatgattatgatcagaagaggttgttctcggtcctacaaaggaagatccacagaactcatccccggctaaagggaagtgctaactaatccaaactgtgaatttgaagctaactatgttgctatccacacccttgccacctggtacaagtcaaacatgaacggagtcaggaaggatgtagtgatgactgacagtgaagacagtactgtgtcaatacagataaagttagaaaatgaaggcagtgatgaagatattgaaactgatatactctatagtccacagatggctttaaagctagctttaacggaatggttgcaggaattcggcgtgcctcatcagtacagcagtaggcaagttgcacatagtggagctaaggccagtgtagttgaccgggactcctctagttgcagcgccctctttaaatgcctcgactgtagttacaacagtttaccaggagcccattatgagccagggagcagctttgagtggtgaaccttcagctctgaccaaggaggaagaaaagaaacagccagatgaagaacccatggatatggtggtagaaaagcaagaggaatcagagcacaagaatgacaatcaaataactaaactgaaattagttgaagctaaaatgtcagaggaattgaagccaatggacacagataaggagagcatagctgaatcaaaatcgccagagatgtctatgcaagaagattgcattaatgatattgctcctatgcagactgatgaacaaacaaacaaggagcagtttgtgccaggtccaaatgaaaagcctttgtacactgcagagccagtgactctagaggacttgcagttacttgctgatctcttctatcttccttatgagcatggacccaaaggagcacagatgttacgagaatttcagtggcttcgagcaaacagtagtgttgtcagtgtcaattgcaaagggaaagactctgaaaaaccaacaggacaatcctttattgacatgtactcctatgtttgggacatcaagagtataatgtctatggtgaagtcttttgtacagtggttagggtgtcgtagtcattcttcagcacagttcttaattggagaccaagaaccctgggcctttagaggtggtctagcaggagagttccagcgcttattgccaattgatggggcaaatgatctcttttttcaaccgcctccactgactcctacctccaaagtttatactatcagaccttattttcctaaagacgaggcttctgtgtacaagatttgcagagaaatgtatgatgatggagtgggcttaccctttcagagtcagccggaccttattggagacaagttagtaggaggactgctttccctcagcctggattactgttttgtcctagaagatgaagatggcatttgtggctatgccttaggcactgtagatgtgacgcccttcattaaaaaatgtaaaatttcctggattcccttcatgcaggaaaagtacaccaagccaaatggtgacaaagagctctcagaggctgagaaaataatgttgagtttccatgaagagcaggaggttttgccagaaactttccttgccaacttcccttctctgataaagatggatattcacaaaaaaagttacagaccccagtgttgctaaaagcatgatggcttgtctcctgtcttcactgaaggccaatggatcccggggggctttctgtgaagtaagaccagatgataaaagaattctggaattttacagcaagttaggctgttttgaaattgcaaagatggaaggatttccaaaggatgtggttatacttggtcgaagcctgtgacgttggttggcactgtgaactgtccagagtctcttaaccccaccttgtggttggtggttgaggtcttcacacagttcagtgtctggagccgtgacagataagccagttgaattggaaacaaagatgactatagaactcaccatcccctgttcagactgctcactggttggaagatagatactactgctacatatcctgcgggaaaaagatgtggtgtgcctctcctttgggtcttgtgttaggtgtcaggacctcttatggggctctgtagggagagggtctcaaataaatgtagtcagcactattttctgcatccagtgtggttgcatttctcacctacgagtaatgaagatcactctttgttctccgtggtgctgaatgaactgtctctgttctttggagacatggcaggaatgacaaagaattagtggggttccaatttggggcaatttttctgctttttgtaaagctctggctaactatctcctataatgttggttcaggcagttgtgctttgtagggacaaatgtgcatttgtttgtggcaaaggcctaaatggacaaacttgtaaatttctttgtatatagactatagctgtaacctgactgttctttcttttgtttactgttttattatttttttttcctttgaaaatgaaaggtgttggtttagggtggcactttgaataatgtaaaccagtggatggtagatttcctttacgtttgtcctttttttaaaatgcctcccacataggaataggccacgactattggggggagtgtcagctttataggactcaaatctattgggaagtgcattacttctggaggttaaccttcattgcagatacgcatgtgaaatgttctgacattgttgtcatgtaagggtaagtaaagggactgactcgtctcttctgcccttagagcagttgtcattttatctcaagacctgttaactactggtttaattgaatcagtctttaattcttgcatgtttgtatctaatttttaaaagaaagaataagtatatgttaaccataagtatactttttcttttaatcagaagttctgaaaacttcatgtattttaatttagatttggtgaatttaagggtttgagcatgaagctggcagatggtctctgcagggttttttttttttaaattcatggctagctagtgtcttctctctagatttcaacagtattttgttatcttctctcaagtttttcatcagcttttgaactctgagctgaggggggagagagaaaaaggaaacttgaacatttacttttatagaactccagtgtgagcttttgagatagtcttttaaatttagcactagtgtacctggtgacttccaactgaggcccaggagagagtgcttgcttagaagcctcttagggtaaaaacctgtgataggctatgttggaaaactgaaatcaagtttggttttgaaggctgaggtgaagggcaaaatttttactagatactaaaaccatttaatgttcctcacctttctcttgagtacagccccatactctagtgggaattaccaccttttatttggagggtttcagagtcagtttcttatggaatcaggaattttaaacaagttgctttttgtttcatgttggcttttcagtaatcactttgaatgatctgaacatacctgaaacatgtccaggtttataccatcatcgctctgggataaagtgctgtgccaacttacatggttatgaatattaaggttggaatatcatttcatcacagctcagttctgtagaaaacaaactgtaaaactatctgaagaccatgcaagaggcaaaataaaacttgaaagtgaa

SEQ ID NO: 119 - DNA, 3672 bp, Cricetulus griseus
cgaagcagccagttccctccagctgcagagagtctttcagtttgtcctttttttttttaaaactaaaatggaggctggtttcttgccttaaggagtgcagcgcccttcccttcccgctggagtctagatgttgacatgtaataaggcgggcgagcgggatggtggtggatgcggccagctccaacgggcctttccagcccgtggcccttctccacattcgagatgttcctcctgcggatcaagagaagcttttcatccagaagcttcgtcagtgttgtgtcctctttgactttgtttctgacccactgagtgacctgaagtggaaggaggtgaagcgagcagctctaagtgagatggtagaatatatcacccacaaccgcaatgtgatcacagagcccatttacccagaggtcgtccacatgtttgcagttaacatgtttcgaaccttgccaccctcctccaatcccacgggagcagaatttgacccagaagaagatgaaccaacgttagaagcagcctggcctcatctgcagcttgtttatgaatttttcttaagatttttagagtctccagatttccagcccaatatagcaaagaaatatattgatcagaagtttgtattacagcttctagagctctttgacagcgaggatcctcgggaaagagattttctaaaaactacccttcacagaatctatgggaagttcctaggtctgcgtgcttacatcaggaaacagataaataatatattttataggtttatttatgagacagagcaccacaatggcatagcagaattactggaaatactgggaagtataataaatggatttgccttaccactgaaggaagagcacaagattttcctgttaaaggtgttgctgcccttgcacaaagtgaaatccctgagtgtctaccatccccagctggcgtactgtgttgtgcagtttttggagaaggacagcaccctcactgaaccagtggtaatggcacttctcaaatactggccaaagactcacagtccaaaagaagtaatgttcttaaatgaattagaagaaattttagatgtaattgaaccatcagaatttgtgaagatcatggagcctctttttcgacaattagccaagtgtgtttccagccctcacttccaggtggcagagcgggcgctgtattactggaacaatgagtacattatgagtctaatcagtgacaacgcagcgaagattctgcccatcatgtttccatccttgtaccgcaactcaaagacccactggaacaagacaatacatggcttgatatataatgccctgaaacttttcatggagatgaaccaaaaactcttcgatgactgtacccagcagttcaaagcagagaaactgaaagagaagctaaaaatgaaagagcgagaagaagcatgggttaaaatagaaaacctagccaaagcgaatccccaggcacacaaagacctgaagaaggaccgttcccttgtgcgccgcaagtccgagctgcctcaggacccccacaccgagaaagccttggaagctcactgcagagccagtgagctgctctcccaggatgggcgctagctctggagcagcacgtcgagctgggcctgtcagttctcttccggatgctgtagaaaagacatactgtttgtgccataccaatcagctacactaaagtcaaagctcccactgacccgtctgtaggcaacgatgctcatccaccctggctcgagattaggctcttagctttcacagtctagctgcctactgggaaaagtagccaacatcctcagcactgggaccttccaaggtgtttctttcctttggttaatggcatgcatgccatgtcatgcttccccttaatgtctaccgaaagccatatttcatagtctgtggtagaggccagggttccttgactagaagcgcaatgttgaaattatgtgttcttatttttatttgcaggatcagttttctcatctacttacacattatccttcaacaaggctcttgaattgataaaactgtaggatctaagaattccacatctgtagaacgttacaatacattaagccactgggcctaatgcagactgcagctgcctttgggcgcactgcagactgcgctgttagagtgccctcagtgagcctttctattggaaaaaagcacacattaccaagctgataaggaaaagtgcagtgtctgcgtttctgcccatcttcacatgctgttacaggcttcccagacttcttgcatggattaagcttctgttttagatggaatagcacgaggagaaaacttaaacttagcactctgtctgttctttatttctctcagggtggccagtatttcgatttatttatcctgcttgaaagctacttgagatgtgtactgctattctgaacagtgactcgtttctttgtctccagcatatatataattaatatatatatatatatacatatataaaacttagtgataataaaaaaagatgcataagagtaaaatgtgcttctctgaaaatctgtttttcaattgtggtctcgggtatccatgaactaattgtgaaattagacattgctaaaggtggccccagctgaaggtggacaggctggtcacttggctgagaagaacacttcctgagaaacttgacaagtatctatccactttaccattatgaaatctataataaaaaaaaaaaagttagagatgccttctccttttgagggaaaaagggtgcttttactgtataaagcagtgtctgtgtgttttgataccccattgtttgaactctcgtctttagctggtagagtctcagatatccctggtgtgtggggtggtccctgcgtggtgagaggtccctggcgactcctttgcccttcgtggaaagcaagctatcagtgtccgggtgattgtatgaagctcagcacagaagaacattgctggtctaggttttattcctgctctctattgaagacaaactttaccaataagtaaagaaaaaaaatgttttcagagaaactaattttctttgacaagagtattactcaatattttggcctattaaagtttccctagttagtacttgggttccctgtgctaattgttcaacttatatattgttatagagacactgtccattctgtaccaaactggtttcaaaaaaaaaagtaccgcattgaaaataaacgggtgactgtttttcttcttaaggctctaagtttggcaccttcactctttccaaaatgtatctgtgcgtcagagatgtcacagttacaagtatctttctagtgtggctttgtatggcttcctttgaacattgtacatacattgtatctttgttttatggtaataagtaataaaatgtagacttcgtattttgtacaaaatgtcctatgtacagatttaaaaaaaagttcatagaaacagcaaaaataggtaagtggcacagttatttttctttagaaaatatctgtaactttatgctttagtgaaatgttaagtaccaacatattttttaacattttgtaattcaaaacttttttgttttgacattgtttatgaagaaaaacttcatgcacttgccatttaatatgctcttttatctaattttaaagaactctttaaaatggtgtattatatggactaaataaagaacatgtagaatttt

SEQ ID NO: 120 - DNA, 3669 bp, Cricetulus griseus
  modified_base (3022)..(3022): a, c, t, g, unknown or other
ataaacaaggaactggcaaatattagatcaaaattcaaaggtgacaaggctcttgatggctacagtaaaaagaagtatgtctgcaagttgctcttcatctttctccttggtcatgacattgattttgggcatatggaagctgtgaatcttctgagctcaaacagatacacggaaaagcagattggctaccttttcatctctgtattggtgaactcgaacagtgaactgatccgattgattaacaatgccatcaagaacgacctggccagccgcaatcccacatttatgggcctggccctgcactgcattgccaatgtgggtagccgtgagagtgggcggaggtccttcgctggagagatccccaagatcctcgtggcaggagataccatggatagtgtgaagcagagtgcagccctgtgcttgctgcgtctgtacaggacatcacctgacctagttcctatgggtgactggacatcccgagtggtacacctcctcaatgaccagcacgttgggtgtagtgactgctgcaactaggcggtgcgtggccgtctgactgagtgcttggagaccatcctgaacaaggcccaggagccacccaagtctaagaaggtccaacactcaaatgccaagaatgcttgttgtctgtttgaggccatcagccttatcatccatcatgacagcgagccaaacttgctcgtccgtgcctgcaaccagctgggccagttcctgcagcaccgggagactaacctgcgatacctagctctggagagcatgtgcacattggccagctctgagttctctcacgaggctgtaaagacccacattgaaactgtcatcaatgccttgaagactgaaagagacgtgagtgtgcggcagcgggcagtggacttgctctacgccatgtgtgaccgcagcaacgcccagcagattgtggctgagatgctgagctacctagagacggctgactactctatccgagaggaaattgtgctgaaggtggccatcctagctgagaagtatgcagtggactacacttggtatgtggacaccatcctcaacctcatccgcatcgcaggcgactatgtgagcgaagaggtgtggtaccgtgtcatccagatcgtcatcaaccgtgatgatgtgcagggttatgctgccaagacagtgtttgaggcattgcaggctccagcgtgccacgagaacttggtcaaagtgggcggctacatcctgggggaatttggaaacttgatagctggggacccacgatccagccctctgatccagttcaacctgctccactccaagttccacttgtgcagcgtccccacccgggcactcctgctgtccacctacatcaagttcgtgaacctctttccagaggtaaaagctaccattcaggacgtgctacgcagtgacagccaactgaagaacgcagatgtggagctgcagcagcgggctgtggagtacctgcggctgagtactgttgccagcactgacatcctggcaactgtcctggaggaaatgccacccttccctgagcgtgagtcctccatcttggccaagctgaagaagaagaagggcccgagcacagtgactgacctggaggagagcaagcgtgagcgaagcatcgacgtgaatgggggccctgaacccgttccagccagcactagtgctgcgtctacaccttctccgtcagcagacctgctgggtctgggggctgttcccgctgctcccacagggccccctccttcctctggcggtgggctgctagtggacgtattctcagactcagcttctgcagttgcacctcttgcacccggctctgaagacaactttgccaggtttgtttgtaaaaataatggtgtgttgtttgaaaaccagctgcttcaaattggacttaagtctgaatttcggcagaatttaggccgaatgttcatattttatggcaacaagacctccacgcagttcctaaacttcactccaacactaatctgtgctgacgaccttcaggctaatctgaacctgcagaccaagcccgtggacccaactgtggatgggggcgcacaggtgcaacaggtggtcaacattgagtgtgtatctgatttcacagaggcacctgttctcaatatccagttcaggtatggtggtaccttccagaatgtgtctgttaagctgcccatcacgctcaacaaatttttccagcccacagaaatggcttctcaggatttctttcaacgttggaagcagttgagcaatccacagcaagaagtgcagaatatcttcaaagcaaagcatccgatggacacagagatcactaaagcaaagattattggatttggttctgcactccttgaagaagttgatccgaatcctgcaaattttgtgggtgctggcataatacataccaaaaccacacagattggctgcttgctgcgcctggaaccaaatctgcaagctcagatgtaccgactcacgctgcgtaccagcaaagacaccgtctctcagagactatgtgaattgctgtcggaacagttctgatccacagaccagaagatcaggctccttgtttgtgcgtcttcttgtctctaccgtttgtctttgtaccacactgcagataaacaccccctgtctgaaaactgccattcaaggcaccttcagtcctacacctacagccagccccttgggtgtggagataatgcaggacacagtttgagaagggctgcagcaggcctgccccatcaaagaagggtgcctgggcctggaaaatcaaggcagccctgtggttcaacctacaaattaaagggaaattagaagtttgaacgaaagtggaaattttgttcaaattttattaaaatgccactggctcattctcagaatccagacagctccttgtgcgtatagggttaacacaggggctgtgtggccatgctgggtggtgacagcagtggcttagaggtgtgtgacctcatgggctgagcagagtccgtggggtttgctatagcactactgttggcaaactccatgntccactcatggtaggatcctgtacctagtataccagtgttctagaagggacagttcaaacatttgaccacatatttgagaccttaggtttgcaacatggtgagtaaagaggttcctattgactttggaagacatggacatcacccatcttttgcttttaatgaatgtactgtccctgtggtcattctggggacttgaaggttaatgggtctggtgggaaagtactaattcatatggtgtgcttctctccagagggtcttagttgttgccccagtattgcattctcacttctgtgaagctcttgtggttgtgtggaaaagggaggcctaagtgtggtaatggagtgagaggctggggtgagaatggcagcccaggcaggtgctgtgctaaaggatacactggacttcccagctattatgtacaatccatgcactactgcaaggaccatgtggatagctcaacctgtgtggctgtggcttatgtaccatgtgcttcacagtgatggtgtctagatcagtagtgccccagcacatggaaactgttggggcacaagcccgccctctgtgactcctgggccttcatcagtacagtgtgcttgttctcagaagaaaaaaaaaaccaataaatgctaggacaggaaactaggaa

SEQ ID NO: 121 - DNA, 3653 bp, Cricetulus griseus
gcggcggcggctccatggccgggatggccgaggcccagcgtgagaacctcagtgcggccttcagccggcaactcaacgtcaacgccaagcccttcgtccccaacgtccacgccgcagaattcgtgccgtccttcctgcggggcccggcccagccgccgccatccccagctggcgcggccggcggcgaccacggagcgagcagcagcgcgggaggccctccggcacctgtggaatcctctcaagaacagtcattattgtgtgaaggttcaaactcagctgttagcatggaactttcagaacccgtagtagaaaatggagagacagaaatgtccccagaagaatcatgggagcacaaagaagaaataagtgaagcagagccagggtgtggttcctcaggagatggaaggccaccagaggaaaatacccaagaaatgatggaagaggaagaagaaataccaaaacctaagtcggtggtggcaccgccaggtgctcctaagaaagaacatgtaaatgtagtattcattgggcatgttgatgcgggaaagtcaactattggaggacaaataatgtatttgactggaatggtcgacaaaaggacacttgagaaatatgaacgagaagctaaagaaaaaacagagaaacttggtacttgtcttgggccttagacacaaatcaggaagaacgagacaagggtaaaacagtagaagtgggtcgtgcttattttgaaaccgaaaagaagcattttacaattctagatgctcctggccataagagctttgtcccaaatatgattggtggtgcctctcaagctgacttggctgtactggtaatctctgccaggaaaggagagtttgaaactggatttgaaaaaggaggacagacaagagagcatgcaatgttggcaaagacagcaggtgtcaagcacttaattgtgcttattaataagatggatgatccaacggtaaactggagcaacgagagatatgaagaatgtaaagagaaactagtaccatttttgaaaaaagttggcttcaatcccaaaaaggacattcattttatgccctgctcagggctgacgggagcaaatctcaaagagcaatcagatttctgcccttggtacattggattaccatttattccatatctggataatttgccaaacttcaatagatcagttgatggaccaatcaggctgccaattgtcgataagtacaaggatatggggactgtggtcctgggaaagctggaatctggatctatttgtaaaggccagcagcttgtaatgatgccaaacaagcacaacgtggaagttcttggaatactttctgatgatgtagaaacggattctgtagctccaggtgagaacctcaaaatccgactgaaaggaattgaagaagaggagattcttccaggattcatcctttgtgatcttactaatctttgtcattctggacgcacatttgatgcccagatagtgattatagagcacaaatccatcatctgcccagggtataatgcggtgctgcatatccatacctgtatcgaggaagtcgaaataacagccttaatctgcttggtagacaaaaaatcaggagaaaaaagtaagactcgaccccgttttgtgaaacaagatcaagtatgcattgcacgtttgaggacagcagggaccatttgtttggagacctttaaagacttccctcagatgggacgctttaccttgcgagatgagggtaagaccattgcaattgggaaggttctgaaactggttccagagaaagactaagcattttcttgatgaccctgcacaatactgtgaggaatattgactgcaaaagcctacttcacaccgccttctcttattttctgcccattgacaaaactctccccatattttgcaaagaaaattcacagcaaaagtccacattatgtcagctttctcatattgagagctctgctatgccactgttgaattttccccaagattttgcccccctttcaaacttcgctttcttggacagatttggcaatagctttgtaagtgatgtggacataattgcctacaataatgaaaacctacaggaatttttttatttttcattttccccttagacatagttagtctttttcccccaggcagatcattctgagtgtgcgagtgtgtgtgcacatgttaagaagacaactaccatgttaataaaatattcaatttgaataacagatgccatctaattattcataatcttatttgtttagaaatcttgccatggcagcaacttgttaaatacatataattacatatgcacaactcatgacttactaggtttaaatttagcagttggttaaattagatttcatagtatgtggaatagaaagtgttattttccagtagtaattcagtcgattgcatctgaaccaatttattgccagaattcagatagggtagatttgatacttgatggttttagttctgggatattcttaatatttggaatcctagaacttaatgagtcttcccttcaataaatacacttctcacatacctctaattctatgcttccttgaaacaataatatgctagccaagttgtttactaaggattattatgagggcgtggaggtgtgggggtagagatttaaaacttgttttccggtgcaagggaaaagtacataggcactaagcctggttaggcagaaaacatggatttcttaagcagccccagaacagtattgctttttttctgccttgtcacacatgccactgtgccctttaaatattgacatgggaacctcaggtttgtggactgcacaggtagatggcattttgtgcttcctgaggctcccctcttctcggcacattagcttagtgcttcagatgtcagcctgagtccttgctacctcctttcctgctgcccggggaagagtgtctgtgctggagctggagctctggccctcctcaggtgatggtctgttttaaaggaaatgtggatctctcaggccaggatttagtgactaatttttactgaactggttaatacctagagcccattttaaaagaaaacaagattaatgagaactggttaggtttgatgggtttagcctaaaattccaaagcatgaatgagtgttctaggtaggaaagaaacccttttcttatgatttgtagctacctactgtgcctgacttggtgcctgtgtgaggattaagcccttagtctgctcttgcaattactcaaatgactgaagtttaaaaattttgttttgtaacaataaaaattgtcatcttcccttttgatgtgcttgtctgtctgtttataatcacctgtgctgtactctgtgctactttctctatatattttgtatcgagtactggacatatctaacagacttattagatggatctaacaggctgttatctcagaatttaagaacacatgttggttggtgtgtgaggcttttgtatggttatatgacaaccttacagaacaaaaacagccctccaaaagggttatagatagaggtacttgataataacatcacattgtatggttttatgtgaacaacagaattggagaaacatcaatgattattctgtccaagctatgaacctctacaattcaggatttttaataaagatcaagagaaccaaaaaaaaaaaa

SEQ ID NO: 122 - DNA, 3653 bp, Cricetulus griseus
  modified_base (509)..(509): a, c, t, g, unknown or other
gagccgacgaaggaccactacttgccagacctgcaccacatgcggctggaactggaggaggcagccactcctcagggtcatggtgtgcgctttggcttcaaccccctggagtttgagaactttagctggagaggctacgcccacatgacgcctatccagcccaggatcgtggccaggctgaccgtgaccgcccctgacctctttcggctggtcttccgatatgtcaaccgtgggcccacaagtgtgaacgggcgtgtctctgtgcgtgaggagggcaggctttccagctgtgtcaactgcacagagcaaagccagccagtaacccttcccacccagcaccagacgcctgccttccgcactgtgccccagaggggctttggggaaccctttgtgctgaatcccggcacctggactttgctggtggaggcagaaggtgtactcctggactatgtggtgctactgccgagcacctactacgaggcagctctcctacagcatcgagtaaccgnggcctgtacctaccggccctcacgccatgctggatgtacagacacgaactcactgtgaccgtgcgtgtgcccgaaggccgatggctctggctggactacatactcatcgtccctgaggacgcttacagctccacttacctccatgaggagcccctggacaaatcctatgacttcatcagccactgtgccacccagggctaccacatcagccccagcagctcgtctctgttctgccggaatgctgctacctccctgtctctcttctacaataatggggccctaccttgtgcttgccacgaggtgggtgccatcagccccacatgtgaacccttcgggggccagtgtccctgccggggccacgtcattggccgtgactgctcccgctgcgccaccggctactggggcttcccccactgcaggccctgtgactgcggtacccgcttgtgtgacgagctcacaggtcagtgagggctgggtgctgttgggcagtgatcggcaggttgtacctcaccagcatcggcctgagatggagctgctccatgcagacctgcgcctcctagctgacagtttcccagagctatactggcaggccccaacctcctacctgggtgacagggtgtcatcctacggtgggacccttcagtatgagctgcactcagagatccagcgaggtgatgtcttcatttcctatgagagccggccggacgtggtgctgcagggcaaccagatgagcattgccttcatggagctggcataccctccacccggccacgttcaccggagacagctacaactggtagagggatggttcaggagatcaagggggacacagtggccccaggcttggaggggctactcagcctacagcctgatgactttgtcttctatgtgggaggataccccaagaacttcacgccccccgagcctctccgattccctggctacctgggctgcattgagatggacacattgaacgaggaggtggtcagtctctacaattttgagcagatcttcaagctggacactgcagtggataagccgtgtgctcgctccaaggccactggtgacccatggcttcacggatggctccggcctgaagagggccacgccattgcagaccccacaccccttgacagcagccagcaaggcgatccaggtgtttctactggctggcagccgcaaacgtgtgctggtgcgtgtggagagggccactgtattcagtgtggagcaggacaacatgctggagatggccgatgcctactacctaggtggggtgccacccgaacagctgcccccaagcctacggcagctcttcccctccggaggctctgtccgtggctgcatcaaaggcatcaaggctctgggcaagtatgtggacctcaagcgactgaacaccacgggtatcagctttggctgcactgctgacctgctagtgggacgtgccatgactttccacggccatggcttcctgcccctggcacttcccgacgtggtgcccatcactggcgaggtctactctggctttggctttcgtggcacccaggaggacagcctgctctactatcgaacctccccggatgggccataccaggtattcctgaagcagggccatttgacactccagtttatgggaacagcagtggaaactcagagggtctttgccgacggtgccccccactatgtagccttctacaccaatggcacacgggtacagctgtttgtggatgaccagctacaacagatagagtccctccgggagccaccccccacgttccaaccacagcctcagcagtccccacaacttctcctaggaggcctgcctaagtctggtacctcccacaacttcagtggctgcatcagcaacgtttttgtgaagcgacttcgggggccacagcgtgtgtttgacctacagcagaacatgggcggtgtcaacgttagcataggctgcacaccaccccaactcatccagacttcgagggccatgcctcagaaggtctcccgccgcagtcgccaacccggccaggaccttgcctgcacaccaccctggctccaagggactattcaggatgcataccagtttggagggcctctccccagttacctgcagtttgtgggtatctccccatcccgcagaaataggctccacctctcgatgcttgtccgcccacatgatgcttcccagggcctcttgctctctgctgcccccctgtcgagcctgggtccttcactggtactctttttgagccatggacacttcgttgcacagacggaaggccctgggcccgggctccgggtccagagccaccagcagtcacgggctgaccagtggcacagggtgtctgtgcgctggggactgcagcagatccagcttgtagtagatggcagccagacgtggagccagaaggcacctcgccatcgaggccacagggcaaagggcccacagtcccataccctctttgtaggaggtctccctgacagcagttacagctccaagctccctgtgtctgtagggttcagtggctgtgtgaagaatctgcagctcgataagcagcccctgaggactccaacgcgaatggtgggggtcataccctgtgtctcaggccccttggaggacggcttgttcttcccaggcagtgagggaatcatcacattagagctctccaaggccaagctgccctatgtaagcctggagctagaggtacggcccttggcagctgctggcctcatcttccacctgggccaggctgaggccaccccctacattcagctgcagatgttgacagaacaggttctgctgcgggcaaatgatggggcaggagagttctccacgtgggtgacctaccccaagctttgtgatggacagtggcaccgagtggcagtgatcaagggtaggaacacgctcaggctggaggtagacacacagagcaaccacaccatgggcacttcaccagtgaccttggctgccattccagtacctctgcaccttgggggcctgcccaaggcaacagctgctcagccagagcttcctgcctatcgagggtgcatgaggaagctggtggtcaacggggacccagtcactgtgactacttctgcacaagtccaggggacagtgggggtgagcggctgcccctctgggactctagc

SEQ ID NO: 123 - DNA, 3650 bp, Cricetulus griseus
ccccacctcccgaagcagctgctttgaagaagaaagcagggcagaagaagtctaaaaatggaagcgatgaccaagataaaaaggtggaaatgctgatggcaccctcaaaaaagcaagacataccgctcttccatcaagagactaaacaagaaggtgtgccgggaaagaagaaaggtttgtcaaagaagcaaaagacagaaaatgtcttggtagatgaaccccttattcatgcatcttcttacattcctccgatggataatgctaactcaaatcttgtggtggataagagagaaattattgatgtgattaaacctgaccatgtagaagggatccataaatctggagctaaaaagctgaagattgaaactgaacaaagaaaatgctgaagtgaagtttaaagatttccttctgtccttgaagactatgcagctaccaagaaactcagcagatgcagataaagtttcagcaagttcgggaacaaatggaagcagagatagctcatttgaagcaggaaaatggtatactgagagatgctgtcagcaacactaccaaccagctggaaagcaagcagtctgcagagctaaataagcttcgccaggactgtgggaggctggtgagtgagctgaacgagaagaccgggaagctgcagcaagagggagtccagaagaagaatgcagagcaagctgccacccagttgaaggtccaactacaagaagctgagaggaggtgggaagaagttcagagctacatcaggaagagaacagcagagcatgaggctgcacaacaagatttacagagtaaattttgtggccaaagaaaatgaagtccaagagtctgcatagtaagctcactgacaccctggtatcaaaacagcagttggagcagagactgatgcaattaatggagtcagaacaaaagagagtgagcaaagaagagtctttgcaaattcaagttcaggatattttggaacaaaatgaagctttgaaagctcagattcaacaattccattcccagatagctgctcagacctccgcttcagttctagcagaagaattacataaagtgattgcagaaaaggacaaacagctaaagcagaccgaagattcattagccaatgaacacgaccacttagcaagcaaagaggaggagcttaaggatatacagaatatgaatttcttattaaaagcggaagtgcagaaattgcaggccctggctaatgagcaggccgctgcagtgcatgaggtagagaagatgcagaagagtatccatgtaaaggatgataaaataagattgcttgaagagcagctgcagcatgaaattgcaagcaaaatggaagaatttaagattctgagcgaccagaacaaagcattacagttggaagttcagaacctacagatcgttgtttctcaacagcctaataaagatattatggaacaaatggaaaaatgcattcaagaaaaagatgaaaagttaaagaccgtagaagaattacttgaaactggacttattcaggtggccactaaagaggaggaactgaatgccataagaacagaaaactcaaccctgacaaaagaagttcaagagttaaaggccaagcagagtgatcaggtttcttttgtgtctctagttgaagaacttaggagagtgatccatgagaaagatggacagatcaagtctgtggaagagcttctagaagttgaacttctcaaagttgctaataaggagaaaactgttcaggctttgaaacaggaaatagaggttctaaaagaagaaataggaaatgcccagcttgaaaaggctcaccagttatctgtcacttctcaagttcaggagcttcagaacttattaagaggcaaggaagaacaggtgaacaccatgaaggttgcattagaagacaaagacaaagacctgaaggcgtgttcaacaccacgatttgaagaacttgaaaatatgttgaaagaaaaggaaaatgaaattaggagaatagaagctatattaaaagacacagagagtcatctttccaacaaatcaaagatgttacaggaggtagaagatgaaaataaattatttaaatcccaaattgaacagcttaatcagcagaaccaccaacaagcatcttttccctctcaggaagaattacaaacaataatttcagaaaaagaaaaagaattaactgatcttcgcagtgagttagattctttgaagaatgctgttgaacatcagaggaagaaaacaatgaccttcgggagaaaactgggaagcaatggaagctttggcatcaactgaaaaaatgcttcaggacaaagtgaacaagacctccaaggaaagacaacaacatgtggaagctgttgagctagaggccaaagaactgctcaaaagattatttccaatggtgtctgttcctactaatttgacttacagtgaatggctacgtggctttgaaaagaaggcaaaagcatgtgtagctggaacttcggatgcagaggcggtcaaggttttggagcacaggttgaaagaagctgatgaaatgcacgcactgctgcagctagagtgtgaaaaatacaaatccgtccttgcagaaacagaagggatcttacagaagctgcagcgaagtgtggagcaggaagaaagcaaatggaagattaaagctgatgagtcccgaagaactattaagcagatgcaagcctcctttacatcttccgagcaagagctggagcaactaagaagagaaaaccgagacatagaaaatctgagaagagaacgagaacacttggaaatggagctagagaaggcagaggttgaacggtcaacttatgtgacagaagtcagagagctgaaagatctgttgactgaattgcagaaaaacttgatgactcatactctgaagcagtaagacagaatgaggagcttaacttgttgaagacacaattaaatgaaacgcgaacaaaacttcaaaatgaacaaagtgagagaaagaaggtagctgatgatttgcataaggctcaacagtcactgaactttatccactcaaaaattgcactaaaagctgctggagacaatgctgttattgggaatagtagtgtttccccagaaacgggagctcctgagaaagagacaatgtctgtgagtctgaatcagactgtggtccagttacagcaactgcttcaggaagtcaatcagcaactcatgaaggagaagtgatcctggctgtgggagtgaagtcattggaaattactcgaaggcgttgtattatattttgccaaatgaaagccttatttatgtttcaccctttctactttgtcacacactgaacagttttgtcttttctaaccttgttagactactgacttacagagaaaacacttaaaaagccaactctgtagacacctccagagtttagttttataataaactgtttgaattaatagaccttaaatgtaatcttttaccttattttgctcaaattgttcagaagatcaaagtggtgtagacgatgtgaaatataacattttaatactgatgttgtacactgctttacctaacatttgggaagtaactgcctctgacatcaactcaagggaacacttttgttgctaatgtaatcagcaaataaagggacacttactattcaaaaaaaaaaaaaaaaaaaa

SEQ ID NO: 124 - DNA, 3648 bp, Cricetulus griseus
tcgccgtcgccgtcgccggtcgcgccgctctgccgcctccaccaccgctaccgaggccgtgcggagccgttatcgccgcgccgcccgccccggagcagagccccgggccttcccgcccgtgttcagatttttaaataatacaatgtctaatggttatgaagaccacatggccgaagactgcagggatgacattgggagaacgaatttaattgtcaactacctccctcagaatatgacccaggaggaactacgaagtctgttcagcagcatcggcgaggttgaatctgcaaaacttattcgggataaagtagcaggacacagcttgggttatggctttgtgaactatgtgactgcaaaggatgcagagagagcaatcagcacactgaatggcttgagactccaatccaaaaccattaaggtgtcatatgctcgcccaagctcagaggtcatcaaagatgccaacttgtacatcagtgggctcccgaggaccatgactcagaaggacgtggaggacatgttctctcggtttgggcgaatcatcaattccagggtccttgtggatcagaccacaggtttgtccagaggggttgcgtttatccggtttgacaaacggtcggaagcagaagaggcaattaccagtttcaatggtcataaacccccaggttcctctgagcccatcacagtgaagtttgcagccaatcccaaccagaacaaaaacatggctctcctctcgcagctgtaccactctcctgctaggcggtttggaggccctgtgcaccaccaggcgcagagattcaggttctcccctatgggtgtagatcacatgagtgggatttctggtgtcaatgtccccggcaatgcttcctcgggctggtgcatcttcatctacaaccttgggcaagacgctgatgaggggatcctctggcagatgtttggcccctttggtgcagtcaccaatgtgaaagtgattcgtgatttcaacaccaacaagtgcaaagggtttggttttgtgaccatgacaaactatgaagaagctgcaatggccatagcaagtctgaacggctaccgcctgggggacaaaattttacaggtttccttcaaaaccaacaagtcccacaaataactcgctcatgcttttcttttttcttttcttctttttttttttcttttcttttttctttttttgtacggaatagataattaagagtgaagaagttgaaacttttttgttagtgtacaactcattttgcgccaattttcacaagtgtttgtcttagtctaaatgagaagtgcaaaaggtttttatactctgggatgcaaccaacatgttcaaatgcttgaaatcccacaaatgttagaccaattttaagtttattaagttatttcctttaaagtatatattaaaccgaaacctaagtagactgcattgactaaccagtccctctggatggtggtggaacggaagcatgctttaacttctaagactgtctaacacctatttcatttgatgtctccacagaccagatttaaaacaaaacaaagacctttttttcttcttagttctagtttttaacctaaagatgttagacagatggagaatgtgttttctcaactgtttcaccattttaagcaatttctgctttagttgacgggaaatctgccctcttcagcaggtcccactgctgcctcctacacactcagtcctggctctgtggtgttgggagcagcagcagggcccattctctgtgggcctttaccagggaagggtgggttccacatgttgggctgggccaggccctccagaggacacaaaggtgttttataagcccaggcaccaatgagaacggaccaaagagtttcagggcagctccagtatattccagagtcagacctgagctccgggcatgcctgaagatgtccaactcctctgacatcctgagtgtctgtccacacattgcatgcatggtgccacacatcggatactgttgttcatgcaacctctcgagtttccaagaccatttaacccagcttgaatgcacagtgatagctgtttttaatgacacagaaacatttgagcattgtatttctcgcatccctccttgtgagcactagactttttccaatcttagtcagatttttgttttgaaactttgcttttgtatgaacactcagcagaaaagtacttcttgccagttatctattaacaaaacctttgatttgtagttttaaggattaaccctcaaagttctcttcataactgccttgacgtttggggttctgttctgttaattttcttttgcttttttgtgttttttgtttgtttttacttttgcatttaagaccattaaatttgattttgttttgctcgatcctgaggagccacccctggggtttatcacactcaaggagtcaggaattctgtttccaaacttccctagagcaccccaaagtcatgaacgcttactgttgagtggcattgatgatttgacacattcttaggggagcaatagagcatgcatttccatcccagataaggactccccaccccccacccctgcctttgacctttaataatgattgtattacattttcccataaccttttgctgatgtggttcaatttctttttctcagtcatgaaaatatttattatttatttatttattattatttatttatttattacttgtaagtcaccagctgccaagtatccgcattaggctgatggagacttggagaggactgtgcttttctgttcccctcccccagaagagaaggctggtggttggtggaggctacctctcttcccacatgctgttttctctcgaagtggcttgctctgggggaggaagggcttctaccagctgattcccgtgttgtacactagatggctagacatttttgtatattagtgtgtttttaagttattgatttgttttctatgaaataatttatttttcaggtaccattttttttttcattttaactttgtttttacatgggtttgttttcaataaagtctgacactgctgtccaaagtcaacaataaagtgaatcccattgtgttcttttgaggatgtttatgtaactagcctttaaaacttagtaatttccagaacaagaaggtaggggacaagatcccttactgttttccttctcccagtttgcctttcccccactccttcaatccttgtgaataaatgttcttcagtgttttaggaagaagaagcaaacctagattttgataacccagaagatttcagattaatgaagctttgaaagaaccatttttcgaaatttttagtgacgtgtgaatattttttgtcaatggcttttctcaaagagaatgaaacttttgcaccattttcagagtttttatagagattgccaaattgatatatttacatgtaatggaaacatgaaaaaaagttttattaaacaattgttcatagctgtgtagacattttaattcagtttccaaagctcttcaaaagcgtattttggaggtatggggcgttgactgatgattccaaatgagtcagtttgtccgaatactcagtacctttgcaggtgtcaggtttgtgttaaacactgtatgttaccagtgactggaattctgtgatattttggtaataaatgaagtgggatc

SEQ ID NO: 125 - DNA, 3643 bp, Cricetulus griseus
ggcacagatttatcagagcattgaattttctcgtttgacttctctggttccttttgttgatgctttccaactggaacgggccatagtagatgcagccaggcactgtgacctgcaggttcgtattgatcatacttctcggactctgagttttggatcagacttgaattatgcaactcgagaagatgccccaattggtcctcatctgcaaagcatgccatcagaacaaataagaaatcaactcacagctatgtcctcagtacttgcaaaagcacttgaagtcatcaagcctgctcacattctgcaagagaaagaagaacagcatcagttggcagttactgcatatcttaaaaattcacgaaaagaacatcagcggattctggctcgtcgacagacaattgaggaaaggaaagagcgtcttgagagtctgaatatccagcgtgagaaagaagaactggagcagagggaagcggagcttcagaaagtacggaaagctgaagaagagaggctgcgccaggaggcaaaagagcgagagaaggaacggatccttcaggaacacgagcaaatcaaaaagaagactgttcgggagcggttagagcagatcaagaagacagaactgggtgccaaagcatttaaagatatcgacattgaagaccttgaagaactcgatccagatttcatcatggccaaacaggttgaacaactggaaaaagaaaagaaggaacttcaggaacgcctgaagaatcaagaaaagaagattgactattttgaaagagctaagcgtttggaggaaattcctttgataaagagtgcttacgaggaacaaaggattaaagacatggacctgtgggaacaacaagaagaagaaagaattaccacaatgcagctagagcgagaaaaggctctcgaacataagaatcgtatgtcacgaatgttggaagatagagatctatttgtgatgcgactcaaagctgcccggcagtctgtctatgaggaaaaactgaaacagtttgaagagcggttagcagaagaaaggcataatcgcctggaagaacgcaaaaggcagcgaaaagaagaacgtaaaataacttactacagagaaaaggaagaggaagagcagaggagagcagaagaacagatgctaaaagagcgagaagaaagagagcgtgctgagagagcaaaacgggaggaggaactcagagaatatcaggagagagtcaagaaactggaagaagtagaaaggaaaaaacggacagagggagctagaaattgaagaaagagaacggcgcagagaggaagagaggaggcttggtgatgacccactttctaggaaggactctcggtggggagacagagattcagaaggtacatggaggaaagggccagaagctgactctgagtggaggagaggcccgccagagaaggagtggagacgaggagagactcgggatgatgagagacctcacaggagagatgaagaccgcctgagacgcttgggggatgatgaagagagagaatcttctcttagaccagatgatgatcgaatccccaggcgtggcctggatgatgacagagggcctaggcgtggtcccgatgaagatagattttctcgtagaggaacagatgatgaccgtccatcctggcgtaatgcagatgacgacaggcctcccaggcgaattggtgatgatgataggggaagctggcgtcacacagatgatgacagaccactgagacggggactggatgatgacagaggaagctggcgcacagcagatgaggacagaggacctagacgtgggatggatgaggagcgggggccgagaagaggaggtgctgatgatgaacggtcatcctggcgtaatgctgatgatgaccggggtcccaggaggggcatggatgatgaccggggccccaggcgagggttggatgatgaccgaggaccttggaggaatgccgatgatgatagaattcccaggcgaggtgcagatgatgaccgggggccttggagaaatatggatgatgataggattcccaggcgaggtgatgatgcaagacctggcccttggagaccattcgtcaagccaggtggatggagagagaaagaaaaggctagagaagagagttggggtccacctcgagaatcaagaccatcagaagaacgtgactgggatagagacaaagagagggatagagacagtcaagatcgagaggaggacaaggaccctgaaagagacagggaccgagacagagatggggaccgggaggatcgcttcagaagacccagggatgaaggtggctggagaagaggaccagcagaagaatcttcaagctggagagattcaagtcgccgtgatgatagagacagggatgaccgacgtcgggaaagagatgatcgacgtgatctgagagacctgagagaaagaagggatttaagagatgatagagaccggagaggacctcccctcagatcagagcgagaagaagcaagctcttggagacgagctgatgacaggaaagatgaccggactgaagatcgggatttacctcgtcgtgttcctcccccagttctttcaagagagagagagagagaacgagaaggtgagaaagagaaatcgtcctggagagcagagaaagatagggagtcccttcgtcgtactaagaatgaaactgatgaagatggatggaccacagtacgacgttgagtcccaacaatgatggagtcaaacttgtgtctacataggtttgatcacattcaaggattattatacttgtgcttcacccagtctaaattgaattctttaatgttgtctcaccataacacaaaaagcatgaacttgtattaatcatatataatagattgatcatgcactgtattcacaggaggttgaaaaaccattccattttctggaatttaaggtgttgcattatttcatcaatcatttgttaaaaaaaaacctaaaaaataaaaatgaacccttcaggtgttaacacctatatcttggtatacaattgatctttttgttttgttttgtttctaaaatatcagatattaatttgaaggtaaggttctgttaaaatatttgaaaaccctttaagccaatgggtctgacagctttcccatcattagtgggaacataccttcttaggtatttactattaactacatttaggcagttttatagcttctgaccagtgtagtagacattgcaaacactggttgcaatggggttttctgtagagagaggtgagtataaagcattttgtagtcatcatgacaacactgctcaagagcatatccagagcagtacagctctggattcctagagcatttggtaaactgttgctgtttcttttttctgttgccaaaagaaaactgctttccactaattcatgcctttcaagccttttaaatatgacaatatttataaatgtgtggtttggaggaattgtttaaattctttttcctaattttctttcttcaggatagattatttcaacaagtaatttgtagtgatgactgtgttgacttcaattttggagtgtagtagctgtgttaaagagtaaccatttggttttattgaagccaacacagaacttgctgctgtggttttttcttcagtgataaataaaatacttgcataattgg

SEQ ID NO: 126 - DNA, 3635 bp, Cricetulus griseus
  modified_base (12)..(12): a, c, t, g, unknown or other
ctcggtctgctnaccaagaagttcattcagctcctgagccagtcgcctgatggggtcctggatctgaacaaggcagcagaggtgctcaaagtgcagaagaggaggatttatgacatcaccaacgtgctggaaggcatccacctcattaagaagaagtctaagaacaacgtccagtggatgggctgcagtctgtctgaggatgggggcatgctggcccagtgtcaaggcctgtccaaagaagtgaccgagctcagtcaggaagagaagaaattagatgagctgatccaaagctgtaccctggacctcaaactgttaaccgaggattcagagaatcaaaggttagcttatgttacatatcaagatattcgaaaaattagtggccttaaagaccaaactgttatagttgtgaaagcccctccagaaacaagacttgaagtgcctgattcaatagagagcctacaaatacatttggcaagtacccaagggcccattgaggtttacttgtgtccagaagagacagaaacacacagacccatgaaaacaaacaaccaagaccacaatgggaatatccctaagcccacttccaaagacttggcctctaacaactcaggacatagcgactgctccgtttccacagcaaacctctctcctctggcctccccagccaaccttttacagcagactgaggaccaaattccttccaaccttgaaggaccctttgtgaacttactgcctcccctgctccaagaggactatctactgagcctaggggaggaagagggcatcagcgacctctttgatgcatatgatttggaaaagctgcccctcgtggaggacttcatgtgtagttgattgggctttgtacaaactgtccttataaaccaatatttttttatcacggaaccagaacgtgtatcgcagtgttgtcccttcctaccttcttcctccaagagtatcatgaagtaaacttcagaacaaagctgacattttgatgaattattaatttttttttccttaaacgcacagttgcaggctcccttgggaaagccctgcctggtcccaggctccaaaatcttcctgatgagtcagcaagtgagaagatgtgcaatcaggtgtctcagctgccattgaagcattcctgtggcacccatcaaccatttcaattgaattgtttaccttaaagcgatttttgcaaattcctattcctttagcagagggagagaacctctactgatcaaagcatctaaacccgtgtgacctaaggtccaccagcctctgcaagaaccatcctctgtcttgcttcctttcccaggagggagcttggagcgagaacagctctagagctcagtgactcgagtggcccatagtgaggacctcgggtcagatgatacagctgtcccatggagcagcaggcatggatccctccatccttgggcttcccgggcccctgcgaccggggaaagggctctgatgccacactcagggagaccacttctcaggatggggtcaggtggagaggcccttgggagaaaggacatcccattgtgtgagtggcattctatcagggacacttccttaagttggaacgaggagcctcccactgtgtcaggagatagactagttctggccagaacccattcgcccctcccactgcgagtaggtgaggctgggttaaggcaagtgggaggtaggaaatgcagtgatagaatgccagggcgactccctcgttactcctcaggaatggtgtcccaaactggaggctttgtgtcacctacgatccttccagttacttccaagaatagcgttcccactggcaggtggcggtggccatcatgtcctggtgttaaatatggcatagtacctcaaattcattcctcggatgctaagggctgcggaaatgagttagtcgtgaaaactaacctccagctgaacagtttgaaatgctatgtgcctgacccacccggggaggcacatagtaggcactcaactcatacacatttaatcgagttgaaaatatcccttgggaaaacattttactaaaccacaagaaccctggccagtttactctagatagatttccacaatatgcaaagtggtggtggggggtggagacagaagacaccggcactttaaactctgtgtgtgggtatgcgtggtgtatgtttgggaagaaaaatcaaaggtgcagactatcttcctctctcttcttcagcctccagccccggcctcctcccctcacatactctggacttggtacagaataatccgtgtggtccgagctgaagcactggggtggaggagggagggggagcttcgtgttaagtgcctactggaaatgcactgtggggttttttcctgtatgggaaaccatttatgccaagctttcccccatgtcctatatttatctcatctggttagctgcctctgcttctggctttgtgtaattctctttgccaccttcgtagagctgggtttctttccccaaagtctaatgactaaactcacctggctcttggttgttgtgtgtttggttgactattcttgttgaaactattcgtattgtaataccgtatttattgttttaagaaatgaaaggaatactaatgagtaagtcttcaagagttctttcatgcataataagacttttccagttaatgggcttaactggcgtatgtagatgagacatccacactatcttctgttttgcattttctttgctcataatatctggcacacaaagtaggtgagtactacagtatttttgttacttttaagtcctgagaatgcaggttccctggtaccattaagttgctgctactaaaagctcacatgcggaatggctgaacgttacaagtgtgcaaatgatgacggcgtgagcctcagagaattaaactgtataaagggcaacacatgagctgtcaaacagtgttaggcgtgtgtttgtgtacatagcagttttatttaagtcgatacagtccgctcacattgccattatttaccagttttgtacagagatagcaattcatttgtaaacactgccagaatattttctagctggtttgtaattttttaagactgttgccttggtttttgttttttgtttttgttgttgttgttgcgcctgtgactcttgtttgcctttttttttgtcgtacatgtagctgtctgtaaatagaattgcagtatttaaagctttagctttcaggaaaaacgaagtaagaatccaagtgtgtgcatgacaagttgtgtgtctgagaagggatctgaaggaagatgccttgtggaggaagtcgggtggcaggtggcagggtgtgggaatgtctttcctacggggtacatgcttttgtaaaaaggaagtgtttctcccaacattgggagtaggcaaactactaatcagtttagctttgtgttgtatgctagttaaaaaaataataataatgtaatataatgtaatataatgtaaaaatagacaaacaaacaaaaaaaaaagcttttatgatggattttgtaaatagatttgttacagggtgacctgttctagctgtgatcttaccacttcaaatggatgtaatttgaataaattttgtatggtaaagggtcaataaaatgatttttttaagagttcaaaaaaaaaa

SEQ ID NO: 127 - DNA, 3628 bp, Cricetulus griseus
cgtcgcaaacaatacccaatctccttggtactggcaccaacgagagaattggcagtgcagatttatgaggaagcaagaaaattctcataccgatctagagttcgtccttgtgtggtttatggcggtgctgaaattggtcaacagattcgagacttagaacgtggatgccacttgttagttgctactccgggacgcctagtggatatgatggagaggggaaagattggattagacttctgcaaatacttggtgttagatgaagccggatgttagatatgggatttgaacctcagattcgcaggatagttgaacaagatactatgcctccaaaaggtgtccgccacactatgatgtttagtgctacttttcctaaggagatacagatgctggcccgtgatttcttggatgagtacatttttctggctgtaggaagagttgggtctacttcggagaacatcacacaaaaagtggtttgggtggaggaaatggacaaacggtcatttctgcttgacctcctaaatgcaacaggcaaggattccctgaccctagtatttgtggagaccaaaaagggtgcggattctctggaggatttcttatatcatgaaggatatgcctgtaccagtatccatggagaccgttctcagagagatagagaagaggcccttcaccagttccgctcaggaaaaagcccaattctagtggctacggcagtagcagcaagaggactggatatttcaaatgtgaaacatgttattaattttgacctgcctagtgatattgaagaatatgtacatcgcataggccgtactgggcgtgttggaaaccttggtcttgccacttcattctttaatgaaaggaacataaatattaccaaggatttattggatcttcttgttgaggcaaaacaagaagtgccatcttggttagaaaacatggcttttgaacaccactacaagggtagcagtcgtggacgttctaagagcagtcgatttagtggagggtttggtgccagagactatcgacaaagtagtggtgccagcagttccagcttcagcagcagccgctccagcagcagtcgcagtggtggaggtggccatggcagcagcagaggatttggtggaggtggctatggaggcttttacaacagtgatggatatggaggaaattataactcccagggggttgactggtggggtaactgagcctactttgcagtaggtcaccctgccaaacacaagctaatatggaaaccacatgtaacttagccagactataccttgtgtagcttcaagaactcgcagtacattaccagctgtgattctccactgaattttttttaagggagctcaaggtcacaagtaaagatgaaaggaacaatcagcagccctgttcgaaggtggtttgaagacttcattgctgtagtttggattaactcccctcccgcctaccccttatcccaaactgcatttataatttgtgactgaggatcatttgtttgttaatgtactgtgcctttaactttagacaactttttattttgatgtcctgttggctcagtaatgctcaagataccaattgtttttgacaaaataaatttactgaacttgggctaaaatcaaaccttggcacacaggtgtgatacaacttaacaggaatcatcgattcatccataaatataaagaaaagtggtagcctgcattaaggctttgataataccagcagatggggaaaaacaaaacaacaacaaaacgtcttgaagcatattaatggaattagtttctaaatgtggcaaaactgtattaagttaaaagttctgattttgctcactctatcctggataggtatttagaacctgataatagtctttaaacaagccattccagtcatgatgaggtgatgtatgaatacatgcatacattcaaagcactgttctcaaagttaatgcaagtaaatacagcaattcctctttcaatgtttaggcagatcgttaactatgagctagccaaatgtgggcatgttattacagggaaagtttaaaggtctgataacttgaaataggtttttaggagaattcatctacttagactttttaaatgcctgccataaaagaaattgaaatggtagaatggctgaccacagcaatgaccagccctcatatagggctctggatgatttttggtctaataacgcatgctagtgttgatgttttttggtcaagaggggatgaacaggaagaattatgcagcaggctttattttaaatgccgattcacattactctgttcaagctgcgttgagatgttaaactggcttactatagactttgtaaaaaatatgtacataactgcacaaggtgtcaattctgctctacagtgcagtttagtcagttttagttgcataggtttccattgtatttatagtctgtttatgctaaatctggccaaagacgagcattgtccaccactaaaatgcctatgccacttggaattctgggctaattttgtgaccagaatgcagtgatcaaaacgctcaatctttttgtagtggcataggaagacggcaaaaatttcctaaagtgcaatagattttcaagtgtattgtgccttgttctaaaacttttattaagtaggtgcacttgacagtattgaggtcatttgttatggtgctatttcaattagtctaggtttaggcccttgtacattttgcccataactttttacaaagtacttcttttattgcacattcagagaattttatatatatgtcttgtgtgcgtgtccttaaacttccaatcttattttgtctcttggagattgttgaacgcagcttgtctaggaaagggatgggactagattctaaaatttatttgggaccatgggaatgatagttgggaagaaaactttgcacacgacagatttctagatactttttgctgctagttttatgtaatatttattgaacattttgacaaatatttatttttgtaagcctaaaagtgattctttgaaagtttaaagaaacttgaccaaaagacagtacaaaaacactggcacttgaatgttgaatgtcaccgtatgcgtgaaattatatatttcggggtagtgtgagcttttaatgttaagtcataataaactcttaagtcaaattaagcagacccggcattggcggtgtagccataactttctgatgttagtaaaaacaaaattggcgacttgaaactaaatcatgccaaggttttgatacacttgtcttaagatattaatgaaacacttcaaaacactgatacaaagtgtccagattctcagatgtttgttgtgtgagttttgtttagttgtatttttttttcagtgaatgtctggcacattgcaatcctcaaacatgtggttatctttgttgtattggcatattcagtgacttgtacattcagcaatagcatttgagcaagttatatcagtaagcaatattttcagttatgtttcaaaaataagaatgggtttaaacttgctgaatgtagagattgaccctcaagtcactgtagctttagtagttgcttattgtattagtttagatgctagcactgcatgtgctgtgcatattctggttttattaaaataaaaagttgaactgca

SEQ ID NO: 128 - DNA, 3628 bp, Cricetulus griseus
  modified_base (124)..(124): a, c, t, g, unknown or other
ggatggcagtgagccggctcctctagaggactgagccagcccagcctcgcgcaccctcggaccgcggtgcgctcacccacaccccaggccacccgccagctggcttctgaagcagctgaaatgngaaaaaggcagcaatcccaaaatgaaggaacacaggctgtgtctcaagcacccggaaaccagaggcccaacaacacctgctgcttctgctggtgctgctgctgtagctgctcctgcctcaccgtcaggaatgaggaaagaggagactcttcggggagacccccacacaccacaaaaatggagaacatccaagtcctagaggagtgccaaaaccccactgcagatgaagtcttgtcctggtctcagaattttgacaaaatgatgaaggctcctgcaggaagaaaccttttccgagagttcctccgaacagaatacagcgaggagaacctactcttctggctagcctgcgaagacttaaagaattctatagtgtcacctaaataggcaacaggaacctgctggaccctagccctcacatgtacgaagatgcccagctgcagatctacactctgatgcacagggattctttcccaagattcttgaactcgcagatctataaagcttttgttgaaagtactgccacctcttcttctgaatcttaattttcatttgaaaggccaaaaccaaaatcatttcagagggctgggacagaaaatataagtagttaaatggcatcagaaattgagttcctggagaactccaggttggcacccttcggctgctgtcgagagacagccatgaaggtctttgtctccatttttattgaggttacccatgattcggtttggaaaagcctatataagacaatgaattgccaaatttatgtttgtctgattcaacacttgttctacttgcaagcaaactgtgttcctagtcctctgaacagactcctagtgcatctccagaggccgcatgtgcaaagtacacctgctttgtctgccgcttagctgtactatttaatcagtcgcataccttatacctgtatttaaggacttttgtgcaatatggtctcttagaaacaattgccaacaaattggctgtggtttgcatttttaagcataatctgatacaaaaaaggctattttaaacatgtaactgtgatatttaaccatgctacatactatgtttagcacttggactttgaagccaatttttctgtccatgaaagaaaaagtagctgtttatctctgcctgttgagagatcttagtctgagactcctctggttgttcactgcccaaactctagcattttcattacagaagagaaagaaagaaagaaagaaagaaagaaagaaagaaagaaaagaaagaaggaaaggaaagaaaggaaaagaaaaaaaatgataagaaaaattttaaaaagacaacaaaacaatctgaagatatcctatctcgttgaaaaatccaagagtgatactgtttttaggtataaaacaagaaatgagtctatgtatatatcaaatgtccaataatgtcattaatttattatagaatggccctccagttctaaaatagttgtgtaaacttatgtatgtcagcaaaagaacaataatatgcctgataatccagtttgggaatataaaggaaaagatttcataaggaatgcctacatgtagcactgcaaaaaacaccttgaggacctgcacctggcatgtggcatattcaccttgaacatataatccagtgaaaagcttaagtttttcctaagcaacactttacaaggagttatgaagatgaaaaccttcgatgtcagaccttaactgttttcatgtagtatctcaagaaagacttattttaacattgttcaaaacaatcaaccctcatccacaactaaaaggcagtacagtgctcaaaccttttagctgccaatattatttttttgtaattacagtaactctttacatgaaatactcacctgaccttggcatgtatttctgaccttcagaatagtatcgcattgttcacaaaaccaaaattacaattgtcatatttatatcaaggtcttatctttcaatatcaatatccccaggactatttttttaatcttaaactcaatgaatataatgttaagtaatctaaaaaaatggaagatttaaaaagatttatatccactgagaatactggccttatattaaggatgataataaaattataggttttatttgtcatttttaactacctctcatatttttaatttattaaacatattttttaaaaagaaaagtttggagttttctttttaaattcattttacttgaaaggttggcatcatgtttctttttccataaatttaaaacatttcaagaatgtgttttttttaatgagtatgattttctaacttatatagaattcaggagctatgattaaaagggctattacctattccctatgcaaatattttaactgttgcagtgtttgacaaaatgggattttaaaaaaaattgcagagtagaaaacaaatgttctgtttacactggcgtcgctgactatcctaccatgttcagcactttttaaatacattatttatgaaaacataagttaaaatgcagatagaaaatatttataatagtcatcttttaataaatgcctgtttgtttctgaaagtattagtgtatttaagatgtgctctattcatgtcacctagatatttactatttgaatagtttcagtaaaatgttgagaaaaagatagttgtaaagatgtttacaaaaatcttatttcatttcagaatgttttaagttttgaaagagtgtgtctgtggacttatgactatgccagtttttaaagtatggtatgatttcttctatttaaatctcagagctataataaacaaacaaaaccctcaaattgtagcaagaggttatttattactcgtgtttaatgctttcctatataccatccactgagcaatgtatacaacgctgaagtggtgtggaggacttgatgttgtccctctagctttaacctgtttgtcacagtgtttcttgtgtatgattttaaagagtttgcaaaatactaaaacgtattttaatgaatttgattctgtgaaatttgtcattttgaatgtgtacaatttcttacttccatgatcattctatttagtaatctatttccatattttgtattccaccaatacatttattagtggaccacaaagtttctgagtacatgaatacaagagtaaccatgcttggctatttcataataccaaaatagctgtgggtactcataactgaatagataatccagattctttttcttgcagtttaagtttttctgggttttattccattgaatagattttatcatttacctatgtacaataatagacttcctgaaagtgctacaatttttaccatgtaatagagttgagcatgacaataatgtaagaaaactcagacgtctcccgctaagtgtatctgagttttcaaagtaaatcaaataacaagtgttttcatttaactatatcgtggaggtttatgaatattattgtgaaatgcatatgcattacactgattttcttaagatgttttgaattaataaagaattctcccatgtatcctta

SEQ ID NO: 129 - DNA, 3620 bp, Cricetulus griseus
cctcaaggaggcctagggcaccattgacacagctgtgctccacctagataccaacctggacatccgaagtggaactgaggtccactatcatgtcacagctggccctcactcgggacagctgctccgggatggtcagtcagtcaactccttcacccagcaggacttgttggagggagccattctctatagccacaatggcagcctcagtccccatgacacggtggcgctttctgtggcagcagggccagtgcacaccaataccatcctacaagtgaccattgccttagagggtcccctggccccactacaactggtccagcataaaaagatctacgtcttccagggagaagcagctgagatcagaagggaccagctagaggtggcccaggaagcagtgcagcctgcagacatcatgttctcattgaggagccccccgagcgccggctaccctggtgatggtgtcccacggtgcttcggcagatgagccgcccagcctggaccctgtgcagagcttctcccaggaggcagtgaattcaggcagggttctctacaagatgggagcctcggcactttctcctggagagaggttggaagagcagctgatccgttacgttcacgatggaagtgagacaccgacaggacagctttgcaaacacaggcctgcagatctgggagggggccactgtgcccatccctcctgaagccctcaggggcacagacaatgactcaggaccagaagacctaatctacaccatccagcaacccagcaatggacggatagcactgagggtggctccagacacagaggtccgtcacttcacacaggcccagctggacaatggacttgtactgttctcccacagaggagccctggaaggaggcttccactttgatctctctgatgatgctcacacttcttctggacatttcttccgagtggtggcccagaagcaagtgcttctctcattggagggcaggccggaagttgactgtctgtccagagtctgtgcagccactcagcagccagacggcacgatgtgctcttccaggtcacacagttccccacccggggccagctcttagtgtccgaggagccactccacgccaggaggccccacttcctgcaatctgagctggctgcaggacagcttgtatatgcccatggtggtgggggcacccagcaggatagcttccgcttccgtgcccatctccaggggccaacgggggcttctgtggcaggaccccaaacctctgaggcctttgccatcactgttcgtgatgtgaatgagcggcctcctcagccacaggcctccattccactccgtgtcaccaggggctcaagagcccctgtctctcgagcccagctgagtgtagtataccccgactcagctccgggagagatagagtatgaagtacagagggcaccccacaatggcttcctgagcctggctggggacaacactgggccagtgacccacttcacacaggctgatgtggacgcagggcggctggcctttgtggctaatgggagcagtgtggccggcatcttccagttgagcatgtctgatggggccagccccccaatacccatgtccctggctgtggatgtcttgccatccaccattgaggtgcagctgcgagcacccctggaggtgccccaagccttaggacgatcctcactgagtcggcagcagctccaggtgatttcagatcgtgaagagccagaggtagcctatcgcctcactcaggggccccgatatgggcagctactagtgggtgggcagcctgcttctgccttcagccagatgcaggtagaccagggggaagtggtttttgccttcaccaacttctcctcctctcaggatcacttcaaagtcctggctctggccaggggtgtgaatgcatcagccactgtgaatgtcacggtacaggctctgttgcatgtgtgggcaggtgggccatggcctcagggcaccaccctgcgtctagaccccactgtgctcgatgccagtgagctggccaaccgcacgggcagtatgccccacttccggctcctggcagggccccgatatggccgtgtggtccgtgtgtcccaagcccacacagaacccaggagcaaccggcttgtggaacatttcactcagcaggacctggaagagggaaggctgggcctagaggtggggaggccagagggtaggtccactggcccagcgggtgacagtcttactttggagctgtgggcaaggggtgtccctcctgcagtggcattgttggactttgccactgaaccttaccatgcggccaagtcctacagtgtggccctgctcagtgttcccgaggctgctcggacagaaacagagaaaccaggaagaaacacccctactggccagccaggtccagcagcatccagccccattcccactatggctaggagcggtttcctgggcttcctagaggccaacatgttcagcgtcatcattcctgtgtgcctggtcctcctgcttctggccctcatcttgcctctgctcttctacctccgaaaacgcaacaagacaggcaagcatgatgtccaggtgttgaccgccaaaccccgcaatggcctagcaggtgacacagagacctttcgcaaggtagagccaggccaagccattccactcacaactgtgcctggccaggggcccccaccaggaggccagcctgatccagagctactgcagttttgccggacacccaatccagccctcaggaatggccagtactgggtgtgagacctgacctgtgcccagatgctgcccactctccaggcccactgctttggtaccctggtctggcctgagaatctccagggccaaaaggacctcgagatgccaggggtggagggaactgggagacagtctggagatcctggagtggagtgagtggagtcaagagctggaactttcctcagctcacttagacctggagaactgcaggggccaagttgagaggcagctaaagtcggctcactgcgggaaaacagggtaccagcctaaataggtcacaactctgggtcctgagtctgtgatcttagataaccctctctggtgttttcctgaagctgaatgggaggaatgttagtcaatagattaatatattcaaggtgtaaagtgggtgggttgctctggggctggctaatttaaggcaagaaagctatttaacatggtgctgggctagccaggcctgatggaaccctggagtatatgggatggagaaggatctgaagccgttttacccacagagccctgtggtaaagcactgaagcactggtgagcaaccttccacgcttggactgggaatgtagaaggccactctggtggccatgctcccctcaagaccagggagcaggcaaactggggcacttgactccagggagggagccttgataaatggtgcttcagaggctctggacagctgtgcattgtttgtgtttgactatgcactgggctcttatccatggcagcctggctcccctggggcaggccatgtggcctagcttcatgggggtggggacggacagatctgggcaagctcttgaattcccacctcctggggccttcccaaagtcctctattctcacctgt

SEQ ID NO: 130 - DNA, 3620 bp, Cricetulus griseus
  modified_base (872)..(872): a, c, t, g, unknown or other
ttataaagacatctgtgcaagaatgagttttacagtccccaatcaggctctcccacaactgaatatcatgaagcatgatgttgtcatttggttgggagacttgaactacagactctgcatgcctgatgccaatgaggtgaaaagtcttattaataaaaatgaccttcagaagctcttgaaattcgaccagttaaacattcaacgcacacagaaaaaagcctttgtggatttcaatgaaggggaaatcaagtttattcccacttacaagtatgattctaaaactgacagatgggattccagtgggaaatgccgagttccggcctggtgtgaccgaattctttggagaggagtaaacatcaatcagcttcattaccggagtcacatggaactcaaaactagtgaccacaaacctgtcagcgccctgttccatattggggtgaaggttgtcgatgaacggaggtatcggaaggtctttgaagatatcgtacgcattatggacagaatggtgaagtttcggcagctgcaaaaggagaagttccagatctgcaacaatggacaggttccctgccattttttctttcatccctaaacttaatgacacccaatactgcaagccatggcttcgagctgaaccttttgagggctacttggagccaaatgagacagtggacatttctcttgatgtatacgtcagcaaagactctgtaaccatcctgaactcgggtgaagataagattgaagatattcttgtccttcatttggacagaggcaaagattacttcttgaccatcagtggaagttacctcccaagctgctttggaacatccttagaggctttgtgtcgaatgaaaagaccaatccgagaagttccngtcaccaaactcatagacttggagttacagcagatcattgattgtctggataccagtattcctgagacaatccctggaagtaaccactctgtggctgaagcactgcttattttcctggaagccctgccagagccagtcatctgttatgagctctatcagcggtgtcttgattctgctcatgatccacggatctgcagacaggtaatttcccagcttccaagatgccatagaaatgttttccgctacttgatggcattccttcgtgaactcctaaaattctctgactacaacaatgtcagcgccaacatgatcgctactctcttcactagccttctcctaaggcctccaccaaacctcatggcaagacagactccaagtgaccgccagcgtgccatccaattccttctggtcttcctgcttgggaacgaggaagactaagtctttccctatctgaaattcttgaaaaggaagatcttgggctctgagtatttcaggattatttgaaaagtcatgacacaaaaaaaagggacctactgcaggatcttaagttctgttaatagtacaaagggaagagtttcttaatccctcctcaccatatcctacagagcaaaatccttttagacatatattgccaagccaaagttaccatatttcggggtttttgtgtttactctttgtaaagcaaagaggtctgtatttactactcctttacctaggggtatgttttctgccctgcttcccagtcaacataattctcttaataccctgggcctagattgtgaggcattcccattctaggcctacaagcactacttgctgtaactcagacttgtctgtagtccttttataatgcactttggatccaccctctccccatgtcactactttgcactcttcctccattcgtgctgtcacttggaaggagccctggatgaggctagtgactctgtgggtgtagtcgacagtgaagctcactgtctccatgcgattgttacatgtgtgtgtgcatttctactacaatgatgtctatgtgtcgctggaacattggtctgctttgggatccacacctggtggagccgtattcccttgtctgtgatcgtgtttagttccacagttgtatggactctagagatggcatcccactgatgcgagaaaagcactgtgaggatttcaggagtgaaaatatccatgctccacagctcctgtttcctactcccccttacgtcttttagtgtccacacttgacatgaggagtaaccctgggtgttagggaacccatctccctctagaaacacacttccagaataatgtttgcatcacagtcaaaaagggagtctgtgcacctcaagtgaggtcccctggaccttccctcctctcccagaccaagtattgagggtaaccctcagaatcatttctcctatcttctggcattgcaggggaagacattgctctctctcagcagggctgactctgggctccacttctggctccttcaagtaaagaatttaaagactgcccttggctcctaaacactatatcgagtgctgtgtaagagaaactggtcagtgggaccagccacacacacattacctctcccacctgaaatgactccaaggttttcattttattcaagatttgtgggacagacagactttctaaaacctgatatgttggttaacaaaaaagccaccagctactgactgcaaactgcctgatgaaattggtttgcttggttttctttcatcgaaaccaacccaagttgtgtcattcttgcctgttaacattgggtgtaacgagcttgtatcaggctgtgtgtacagtcttgggtactgattccatgactcttgtagcatctaaggagagggccagggaaacatctactatcaaatggtttcccagttccctcgtctcctccaaattgagttctttggagaacaaaaagtatgtaccctgcaatagaccacttaagcccttacccaattgggagttgggaaataaaagaattggtgccagctcactgaagatctgattgggtcaacagttggttagtggaagacagagagcagagagcaaagttttgtcatgtctgttaggctagaaagtaatcactaaaaaagcagatgataacagctggggcaaggtggtccacaggaaaagcctttcctgtgtgtattctgtaatatcttgccaacctggggtctttgggtgagcaggactatggttagtagggctggctctgtggagcatgcatgtagtgcccttccttcatcaggccaaagcaccaagttgcttcactgcctcaccttttgttcacctaggcctaggatgtatatggggttgagggttttggacaatctccagataggggatacaaaacagatcagatgaagaaacctgctttcctatgctggtttcctatccagcaccccaacttctaacccctcatgcctccaaggtactgtttcatagttcctctgaattaaggctttcagatccaactggtagggaaagactgagcacctagtgtcttagggcagaaattattcaaatctattggatgatattgcattaatttccatttctgttttctgattctatattctaaattatacatcacatttcacaaaaatgtcttggtcactaagcaaagctgctagtgggattctgtattttgtgtcatcttttttattataatttattgcaattttctgaataaatatatgttgtgtgaaaaaaaaaaaaaaaaaa

SEQ ID NO: 131 - DNA, 3611 bp, Cricetulus griseus
  modified_base (1906)..(1906): a, c, t, g, unknown or other
cagtaaaagtgatggtcagttttacagtgtgcaagtggcggactcaactttcactgtcctaaaacgttaccagcaattgaaaccgattggctctggagcccaaggaattgtttgtgctgcttttgatacagttcttgggataaatgttgctgtcaagaagttaagccgtcctttccagaaccaaacacatgcaaagagagcctatcgtgaacttgtcctcttaaagtgtgtcaatcataaaaatataattagcttgttaaatgtgttcacaccacaaaaaactctagaagaatttcaagatgtgtacttggttatggaattaatggatgctaacttatgccaggttattcacatggaactggaccatgagagaatgtcataccttctctatcagatgctctgtggcattaagcatctgcattcagctggtataattcacagagatttgaagcctagcaacattgtagtaaaatcagactgtactctcaagatcctcgactttggcttggcaaggacagcctgcaccaactttatgatgactccctatgtggtgactcgctattaccgggctccagaagtcatcctgggcatgggctacaaagagaatgttgatatctggtcagtgggttgcatcatgggagagctggtgaaaggttgtgtgatattccaaggcactgaccatattgatcagtggaataaagttattgaacagctaggaacaccgtctgcagagttcatgaagaaacttcagccaaccgtgaggaattatgtggaaaatagaccaaagtaccctggaatcaaatttgaagagctctttccagattggatatttccatcagaatctgagcgagacaaaataaaaacaaagtcaagccagagatctgttatcgaaaatgttagtgattgatcccgacaagcggatctccgtggatgaagccttgcgtcacccatatattactgtttggtatgaccctgctgaagcagaagcgccaccacctcaaatttatgatgcccagttagaagaaagagagcatgcaattgaagaatggaaagaactaatttataaagaagtgatggactgggaagaaagaagcaagaatggtgtaaaggaccagccttcagatgcagcagtaagcagcaaggccaccccttcacagtcttcatccatcaatgacatctcgtccatgtccactgagcacacactggcctcagacacggacagcagtctcgatgcctcaacaggaccccttgaaggctgtcgatgatacgttggagacagtgcgcttgtctgtgaaggaactctcacttccatggtcccgaagcacatgggagttgatggacccagattgaaaaactccatgttctgcatgtaagaaacacgatgcccccacccctgctcagttcaataggattgcctgcttagactataaagtgaggcagactgtgtctgaagaaaaagtacaaaccacactgttagagattttgttcaagatcatttcaggtgagcaattagaatagatgaatttcttttccaaattgtgtggtgtccgtggtgacagctcatgtgtaaccgtggggactcgtatgcatgtgaccacaaatgcttgcttgaacttaccatgtagcactttgggaatcagtatttaaataccaaataatcttccaggtagttctgcttctagaataatctcttaatcctctttagtaatttggtgtctatacacaaaaaaaatagatttatgtgtattaattggccaccgtcatattatcatatcttacccacttttatggtatgatttattctatcttttgtatttcagaaggaatataattaaatttatttaataaataaaaataacagcttttctttaaacacccattctttgtccctcccttcattcatggngaaaagtgattggctcttacagccttccttctgcagcattccctcctaactggtctttgtcactgacagaagccagggccaacaagagcacgtggtctcttaggaggtggggctcatcactgtgcctgtttgctgctgccattttccattttgtggaggcatttccttttcctaagggaagtccatgaatgttctggacacattcttcagaagagtaagaagaaatatcctagagagtagcgattcactcttgactgttttctgatttaaaactgctcacctgaaattgatactttgatattctgatctgtaaatgactcaggatttagtaaaatgctgagtgttccatgctgcagaaatggagttggtatggtcataccttggctgcctgtgctcagagtgtgctctcccttgagcttattttgttagcaattcatatcttgtgttcaattattttgggagctatggagcgtgttccaggaggaaatttgctaagaacttttatggaaagtaccatttgatacatgattctgtctgcaccagttgtatcctaatggttggtctcatcactggaacctttaatgaacaaaattaatcttgaaataaggactagttttctatcatgtatggacactttaggtacaaagtggaaatgctcatgtgggtggaggcagaaacacctgtttatggcttcaggttgtttaggccccggaaacctgaagtcaggtgcccccaagagtggctttctgctctccccttaccctgcatatccaatgagcctgttgtggatggagcctgtgctggtatggacagggtctcctgcaaagaccctcttctatcaggcaagtgcacctatgactggccacagagctccaaagaaatacctcaccccagtttcagggtcctccctcctgagcctagatttgtcagggtcctgggacaatgcaaatggtttcgaactgacctctgtaggcaaatgccggagttggatgaagaactgaaaaatgtgctcaactttttcatcttttctattttatttttgtaatttatattgtacacaccctggaagtcactattttggacatgtattttataaaccaggtaattgatgattatctggaatttgcactaggttagtttttgttgttgttggcttagttttcaaccaaaaggggaatgactgctccttccaggtctgggtttccatttcaagcacaggtcttggagggcagacatgtccagccagggtaggagagcagcctcagaacacaggctgcacagtgcctcacagctctgggcctgcagtcagaaccaggctgtgctctaatctttagaacacaaagcccagaggcctggtgttagaaggagaaagccctccacaggcccttgatgatagctagggcttgcatctaaaacaaaaacacagcactggcttcatctgggctgagtgatgcgtgagtcgactcctctggtgtctcatgctggtagtaaatacaggtgtgacctttcaaaattgcatatctcaaaagtaacattgcctaatgttttataataaaatatattatgtgtgttttgattggtggaaaataatacaaactacattttaaaagagaaatgtacagcatgtccaattcctgtgtgtttcaaagtgacaattgactgactgtatctttccacatcaccattttgattacaaacttaacac

SEQ ID NO: 132 - DNA, 3604 bp, Cricetulus griseus
gtagaggacattgcccagtttctgcaccaggaggaacggctggattctacccaggttggtgaatttctgggtgaaagcacgaggttcaacaaggaagtaatgtatgcctatgtggaccaactggacttctgtgaaaaagagttcgtctcagccctgaggacattcctggaaggcttccgccttcctggagaagcacagaaaattgaccggttaatggagaagtttgctgcacgatacatagagtgtaaccaaggggcctctgaccacgatgggaacatcgtggaactggccttccagaccactggccacatcgtctcaaccattttccagcaccatttccctgcagccatcgactccttccaggatgctgtgaagtgcttgtcggagtttgcctgcaatgccgctttccctgacaccagcatggaggccatccggctcatccgcttctgtgggaaatacgtctcagagaggcctcgggtactgcaagagtacacaagcgatgacatgaatgtggctcctggtgacagagtctgggtcagaggctggtttcccatcctgtttgagctctcctgcatcattagcagatgcaagttagatgtgcgcaccaggggactgaccgtcatgtttgagatcatgaagagctatggccacacctttgcaaagcactggtggcaggacctgttcagaatcgtgtttcgaatttttgacaacatgaaactccctgagcaacagtcggagaaatcagagtggatgacgaccacctgcaatcacgcactgtatgctatttgtgacgtattcacccagttctacgaggctttaaatgaagtgcttctctctgctgtgtttgcacagctgcagtggtgcgtgaaacaagataatgagcagttggcgagatcaggtactaattgcttagagaacctagtgatatccaatggagagaagttcagccctgctgtttgggacgaaacctgcaattgcatgttggatattttcaaaaccaccattccacatgttttgctgacatggagacctgcgggaatggaggaagagtcatcagataaacatttggatgtggacctggaccgccagtccttaagtagcatagacagaaacgcctcagagagaggacagagccagttctccaaccccactgatgacagctggaagggagctccatatgcaaatcagaaattgttggccagcctcctcatcaagtgtgtggttcagctggagttgatacagaccattgacaacatcgtattctaccctgccaccagcaaaaaggaggatgcggagcacatggttgctgcccagcaagacacactagatgcagatatccacatcgagacggagaatcagggcatgtacaagttcatgtcttcccagcacctcttcaagctgttagactgcctacaggagtcccattcgttctccaaggccttcaactccaattatgagcagcgaactgtcctctggagagcaggcttcaagggcaagtccaaacccaatcttctcaaacaagaaaccagcagcctggcctgctgtttgaggatcctgtttagaatgtatgtcgatgaagaccgcagggattcctggggtgaaatacagcagcgacttttaactgtttgcagcgaagcacttgcctatttcattactgtcaactctgaaagccatcgggaagcatggacgaatctcctgctgttacttctaaccaaaaccctcaaaataaatgacgaaaagttcaaagcacacgcttcggtgtactacccctacttgtgtgaaatcatgcagttcgacctgatccctgagctccgagcagttcttcggaagttcttcttgaggataggcctggtgtataagatatggattccagaggagccttcacaagtgccagcagcattgtcatcggcatggtagcactggctcccacggtcactgctgtggctctgcagagtatccgttgggccatcacaactggcagacagggagccacccaccttgttggggttcagacctggatagcagtgatctgtacactggcctcgccacagtccccaagcagaggctcatggtgtcttcattaaaccattgcataccagtataatgtgttgttggaggaagtcactctccttggaagtactgaacttcgctgtatagattcgtgtttattagagagtatgttaataaattccttgtaacggctaactgccacctaagagatgttctccctggtgttgccactcagcatgacctcagctatcagtggtccctgcagtatttgtactacacatgtaatcagggaacatgcatgcatgttcagtcgtgcatcctgcctaagctgtgtccctgactggtagctttccctcccctgtcatgtgacattctacccatctacaccagcccttgtcccccagtgttctctgcctcctctgtaacttttgccctttacagggcagggagtgtgtcagtgtgttttcttacttgctgagatattcgggcttgaatgtctttataattttgttatgtaaaaagattgatttttctgaatgatgcatttgaattgtacagcaatagatcttttaaaaacaatgtaaaaccattcagggtaatttttgtcggtggacagtggtgtccctgacctccagaaacaagccattcggtataaattctttttggtgaacaagtctattctttctcatggcaaatgtagcttgagcccaccggacaccagggcagagctgcctggctgcagcacggaggaggaagggtggagcatcttccaaggccttatttcttcatcagaatgctttaagtgttggttgtatgtgctggggtctctaaagaagcttctgtccccaagctgctcttctgagcagttctgttgttgtctgttaagaaaatcaccagctttggcatctgagcagcaaacagagtggggatgtgacatctgctgtgcacttcagagccaaacacaccttccctcattctgtacaactaaaccagacatcaagaaaattgtaggcaacatctggaaacacagcactttcctccagtaggtgacttttgtacaaaattcagaaaatctataaagacaccacccttgtggtaaggtagacacagctgaggctcacatgggacctggagttgtactaccagcagctttgtggtttgggaagcaaaataaccaaagctgagcgtcataaagaatgaatccgtctgaaaatccttgctctcagaaaatggcactcatcaaatgtatggtttttctcagtgttctcagtttttaaaaaaatttatcttgcatatttgcatcaaatgtttctttatgtgcaaaaaatgtatgttttcctcttttaaatgcctacaagttagttactagtgactttgatttcatccatacacaatgattaagtgcatttaatattgataatttaatgaaaagcattccttgccctatggatgtaaacatttttgaaagaataaagcagaattatatatatgaaatgctatgtaaagttttctatgtaaaaatattatgtataatactgttaaataccccatgctttgatcaggtggaaaatcaataaagtttaaaaaagttaaa

SEQ ID NO: 133 - DNA, 3602 bp, Cricetulus griseus
aatggttgagagactgaatacaagccttgccttctttcttaatgatttgttgtctgttatggacagaggatttgtcttcactcttataaagtcctgctacaaacaggtgtcatcaaagctctattcactgccaaatccaagtgtcctggtgtctttgaggctggacttcctgcgaatcatctgtagccatgagcactatgttacattaaatttaccctgcagcttgctcaccccacctgcatctccatcaccttctgtttcttctgcaacatctcagagttctggattttccacaaatgtgcaggaccagaaaattgcaaatatgtttgagttgtccttgcccttccgccagcagcattatctggcaggccttgtgttgacagaacttgcactcattttagaccctgatgctgaaggactgtttggattgcataagaaagtcatcaatatggtacacaacttactttccagtcacgactctgacccacggtactctgaccctcagataaaggctcgggtggctatgttgtaccttcctctgattggtattatcatggaaactgtacctcaactatatgattttacagaaacacacaatcaacgaggaagaccaatttgtatagcccctgatgattatgatagtgagagtgggagcatgataagccagacagttgccatggcaattgctggaacctcagtccctcagctgacgaggcctggcagttttctcctcacttcaacgagtggcagacaacataccaccttctcagcagaatcgagccggagccttctgatctgtctactttgggttctcaagaatgcagatgaaacagttctgcagaagtggtttacagacctctcagtcctacagctgaaccgtctgttagatctgctttatctgtgtgtatcttgctttgagtacaagggaaaaaggtgtttgaaagaatgaatagtttgacctttaagaaatcaaaagacatgagagccaaacttgaagaagccattctggggagcatcggtgccaggcaggaaatggtacggcggagcagagggcagcttgagaggagcccatctggaagtgcctttgggagccaagaaaacctgcggtggagaaaggacatgactcactggcgtcagaacacagagaagctcgataagtcaagagcagagatagagcatgaagcgctgattgatggaaacctggctactgaagcgaacctcatcatcttggacacattagagattgttgttcagactgtttctgtaacagaatccaaaagagagcattctgggtggggtgctgaaagtgctactccagagcatggcctgcaaccaaagtgcagtgtatctgcagcactgctttgccacgcagagagccctggtctcaaagtttcctgagctcctgtttgaggaagagacagagcagtgtgctgatctgtgcctccggcttctccgacattgcagcagcagcatcagtaccatacgctcacatgctagtgcctccctttacctcctcatgaggcaaaactttgagattgggaataactttgccagagtgaaaatgcaagtaacaatgtcactgtcctctttggtgggtacatctcagaattttaatgaagaattcttaagacgctctttaaaaactattttgacatatgctgaagaagatctagaattgagggaaactacatttcctgatcaggtccaagatctggttttcaatctccatatgatcctttctgacaccgttaaaatgaaggaacaccaggaggatcctgaaatgctgattgatctcatgtacagaattgccaagggctatcagacctctccagacctgcgattgacctggttgcagaacatggctggcaaacactcggaacgaagcaatcatgctgaagctgctcagtgcctggtccactcagcagcacttgtcgctgagtatctgagcatgctggaggaccgaaagtatcttcctgtgggatgtgtcacattccagaatatttcatctaatgtattggaagagtctgctgtctcagatgatgtggtgtctccagatgaagaaggtatctgctccggaaagtactttactgagtcaggactggtggggttgctggaacaagcagctgcttccttctctatggctggcatgtacgaagcagttaatgaggtttacaaagtactcattcctattcatgaagctaatcgggatgcaaagaagctctccaccatccatggtaaacttcaagaagcattcagcaaaatcgttcatcaggatggtaagcggatgtttggcacctatttccgtgttggtttttatggaaccaagttcggggatttggatgaacaggagtttgtttacaaggagcctgccataaccaaactcgcagagatttctcacagattggagggattttatggagaaagatttggagaggatgtggttgaagtaatcaaggactctaatcctgtagacaagtgtaaattagatcctaacaaggcatacattcagattacttatgtggagccattcttcgacacctatgagatgaaggacagaatcacttattttgacaagaattataatctccgacgtttcatgtactgtacacccttcactttagatggccgtgcccatggggaacttcatgaacagttcaaacggaaaaccattctgacaacgtctcacgcctttccttacattaaaacaagggtcaatgtcactcacaaagaagagataatcttaacaccaattgaagttgctattgaagacatgcagaaaaagacacaggaattggcgtttgcaacacatcaggatccagcagaccccaaaatgcttcagatggtcctgcaggggtctgtgggcacaactgtgaaccagggacctctggaggttgcccaggtcttcctgtctgaaatacctgctgacccaaagctcttcagacatcacaacaagctgcgcctttgcttcaaggattttactaaaaggtgtgaggatgccttaagaaaaataagagcttgattggaccagatcaaaaggagtatcaaagagaactggagagaaactatcaccgccttaaggaggctctgcagcctctgataaacagaaaaattcctcagctgtacaaggctgccttgcccatcacctgccacagagattccttcagccgaatgagccttcgaaaaatggaactctaaaatagacacttgttctagacacttgaatctattcatgtattcagcattgactgtgaggtcttctattgaaacataggacttggatgtcactctggaagcaatagcattatttcctcactgaagactgtgctaccagatgcaggctgttacatgtgaggctcgtggctgtggtttctaaccttctggtaacatgctgtcatactttaaaaaaaaaaagttttaatgattcaaaggtacagtacacatttacaattatttataccatagctaatgttaaatttatttactttaagttcttattttttaatttatattaccatttatagattcattcatttttggaaccattttaaatgtagtaatgcttattttaaaggtactattaaatatgtgaatgtttacactaa

SEQ ID NO: 134 - DNA, 3599 bp, Cricetulus griseus
catccttaatgtgatgaaatttgtggaatctattctgagcaacaatacaacagatgaccactgccaagaatttgtgaatcagaaaggactcttacctttggttaccattttgggtcttcccaatctgcctattgacttttcccacatctgctgcctgtcaggctgttgcaggtgtctgcaaatccatattgaccctgtcacatgaacccaaagttcttcaagaaggtctccttcagttggattcaatcctttcctccttggaacctttacaccgtcccattgaatcccctgggggttcagtgttacttcgagaactggcatgtgcaggcaatgttgctgatgctaccctctcagctcaggctacacctcttgttgcatgcactcactgctgcccatgcatacatcatgatgtttgttcacacttgcagagttcagatggagaacaggatgtaacagctggaagtatggatgcttctacccagggcttattggaaggaattgagctagatggtgacacattggctcccatggagacagatgaaccttcagattctaagggcaaatctaaaatcacaccagccatggctgccaggattaaacagatcaagccactgctgtcagcttcttccagattaggtcgagcacttgctgactgttgactccttgttaagctttgtgttcggttcccctgtgactcaggtggtgattgctgggcaacctgaggtgctcagttcacaagagatgcaggttgagaatgaactggaggacctgatagaggcctacctgaagaacagccacagaccaccaaactgaaaaggcaaaatgcagagcaggtttgacatggctgagaatgtggtaattgtggcatctcagaagcgacccttgggtggccgggaactccaactgccttctatgtccatgttgacatccaagacatctacccagaagttcttcttgagggtactacaggtcatcatccagctgcgggatgacacccgacgagctaacaagaaagccaagcagacaggcaggctaggttcctccagtttaggctcagctagcagcatccaggcagctgttcggcagcggaggctgaggctgatgccattatacaaatggtacgtgagggtcaaagggcgcggagacaacaacaagcagcaacgtcggagtctagccagtcagaggcatctgtccggagagaggagtcacccatggatgtggaccagccatctcccaatacctcaagatactcagtccattgttgcctcagatggaccaccactcagtgagcagcgtgagtctagatgagcttggtacatgctaggggaagtgtttaaaggaactggaggaatcccatgaccagcatgcagtgctagtgctacagcctgctgtcgaggcctctttttggtccatgccacagagcgggagagcaagcctcctgtccgagacacccgtgagagccagctggcacacatcaaggatgagcctcctccactctcccctgcacccttaaccccagccactccttcctcccttgacccattcttctccagggagccctcatctatgcacatctcctcaagcctgccccctgatacacagaagttcctccgctttgcagagactcaccgcactgtgttaaaccagatactacggcagtccaccactcaccttgctgatggcccttttgctgtcttagtagattatattcgtgtcctcgactttgatgtcaagcgcaaatacttccgccaagagctggaacgtttggatgaagggctccggaaggaagacatggcagtgcatgttcgccgtgaccatgtgtttgaagactcctatagggagctgcatcgcaaatctcctgaagaaatgaagaatcgattgtatatagtgtttgaaggagaagaagggcaggatgctgggggactcctgcgagagtggtacatgatcatctctcgagagatgttcaaccctatgtatgccttgttccgtacctcacctggtgaccgggtcacctacacgatcaatccatcttcccattgtaaccctaaccacctcagctacttcaagtttgttggacgcattgtagccaaagctgtatatgacaaccgcctcctggagtgctactttacacggtccttctacaaacacatcttgggcaaatctgtcaggtatacagatatggagagtgaagattaccacttctaccagggcctcgtttatctgctggaaaatgatgtctccacactaggctatgacctcaccttcagcactgaggttcaagagtttggagtgtgtgaagttcgtgacctcaaacccaatggagccaacatcttggtaacagaggagaataagaaggaatatgtacacctggtgtgccagatgagaatgacaggagccatccgcaaacagctggcagccttcttggaaggcttctatgaaatcattccaaagcgcctcatttccatctttactgagcaggaactagaactgcttatatcagggctgcccaccatcgacattgatgatctaaaatctaacactgagtaccacaagtaccagtccaactctattcagatccagtggttctggagagcattgcgttcctttgaccaagcagaccgtgccaagttcctccagtttgtcacgggtacttccaaggtgcccctgcaagggtttgctgcccttgaaggcatgaatggcatccagaagtttcagattcatcgagatgacagatccacagatcgcctgccttcagcacacacttgttttaatcaactggacctgcctgcctatgagagctttgagaagctccgccacatgctactattggccatccaggagtgctctgaaggctttgggctggcctagttaggccctgcctacttctgtggggtttttctaccattgttggacctggggaggggggggatttcaaaagatccagaaagaaaatgtcaaaatccaataaatgaaattcaccaactcaccatgtgtgtgtcccagctgcccatcttccccagtgcatacttgttcccttctcattctcttgcctctcccttttccatcgcctctcccttttccatgccgtccatggtccccaccccctgtgttaaggcgcagtagcctttggagggacctgtttgtcccaactgaacagtgtgctcctcagattctgtgttcagaaggatttgctgcattgagacttgaaacctttggataggggaaaattatatatatatatatttttttgttctgtttgcatttcttaatttgtgcttggaatgtgttgatgtgcacagctaatgattcaatgcgagacaagattggcatctgtgttgtggaggtttcaaataaagagcactcttcataaatcacttttcacaacggagtttttttcaaacttacaaaattttggaaaaagaaaacctcttgcacacatactagacacatgaactttccagccagttatctgcccttcctgctcacccagccacctccacttctggtacaatttcgttcctcagtcagtttcccagagaagaaactgacagccaccaggaattgggaaattaagttacgaaaaacaaaaaaaaaaaaaa

SEQ ID NO: 135 - DNA, 3592 bp, Cricetulus griseus
ggataacgcggcatgtgaatatcctacttttcatgggctattcaacaaagccacagctggcgattgtgacccagtggtgtgagggctccagcctgtatcaccatctccacatcattgagaccaaatttgagatgatcaaacttatagatattgcccggcagaccgcacagggcatggattacttacacgccaagtcaatcatccacagagacctcaagagtaataatatatttcttcatgaagacctcacggtaaaaataggtgattttggtctagccacagtgaaatctcgatggagtgggtcccatcagtttgaacagttgtctggatctattttgtggatggcaccagaagtaatcagaatgacaagataaaaaacccatacagctttcagtcagatgtatatgcatttgggattgttctgtacgaactaatgactggccagctaccttactcgaacatacaacaacagggaatcagatttgccaaaaattcaccgcagtgcatcagaaccctccttgaatcgggctggttttcaaacggaagattttagtctgtatgcttgtgcttctcctaaaacacccatccaagcagggggatatggagaatttgcagccttcaagtagccactccatcatgacagcatctgctcttttatttcttgagtcttgtgttcatacaatttgttaacatttcaaaacacagttctgtccctcaaatcattttttaaaagatacaaaattttcaatgcataagctcgtgtggaacagagtggaattttcctattcaacaaaaggagggaagaatgttttaggaatcagaattctctgctgcccgtgtttcttcttcaacacaaatatcacctgcatacaagtctgcccattcccaggaagaaagaggagagaccctgaattctgcccttttggtggtcaggcatgatggaaaggatttgccgctgcagcttgggaaattgctatggaaagcctgccagtcacctttgcccttctaaccagatccatttgtggctggtcatctgatgggcgatttcaatcaccaagcatcgttcttgcctgctctgggattgtgttgtggagcgctttccctgtctatccaccacggttaatttctgagggacggagtaaatgcagcatgccctttgtgcagcacctgtttagtcctcaacaagtggtgtcaccgtgaagctcttaggttctcgtggagggtgagaggcaaggagaggctggctgtgctgggcagagaaaaggggatgctgcatcttcctcctcacctcccgcgctccccttgctcgggttgcctcactccctgggctctgcctaacactcgggctggacagtgctggcacacactgccttcttgtctcgtgggtccagcaacagaggtgagggctggggggttgtctcctccacaatgtagcaaattctcaggaaaatacagtccatatcttcctctcagctcttccagtcaccaaatacttatgtggctacattgtccagggcacaaaatgtcatggacagcatctaattaaaagcctacaaaactgcttactgacagttttgaatgtgagaaattagtgtaatttaaatgtaaggtacatgttttaatttctgagtttcttctatttttattttttaaaaataattttcaggtttaattggaatgaaagaatacttcccaccagaatatatatcctgaaaattatatttttgttaattgtaagcaacttttaaagaatgattattatccttttctttacctaaaattatggggagtcttagcataatgacagttatttatactttttaaattaatggtacttgctggatccacactaacatctttgctaacaaccccattgtttcttccaacttactgcctacactacagcctacaccctccttctagtcttttatctataacatgcaaccgaaaataaaaatggtggtgtctcaaaaaccctaacgtctcaaaaaaaaaaaagttaattagcaggtagcttacaggagtgaaacatggggaggctctagaaaaaaaccttgacaatttgccaaatgatcttactgtgccttcatgatgcaataaaaaagactaacattttagcagaaatcagtgatttatgaagagaacagccagtctggtttaactcagctgtgttattttttagagtgcaatttagattgcgaagataaatgcactaaagagtttatagccaaaatcattttaaaaaaaaatagagaaaatggtaaattttcaatgaaaaaaattatttttttaaagcacataatccctagtatagtcagaaatatttaccacatagagcagttaggttgaaaatacagttcagtgacattcctaggcaaactttttctactcccataggctcttcaaagcatggaacttttatacacgatgtttgacattttaagatactgctgtagtttagttttgaagtagtatgtgctgggcagcattcatgtactaactcaggttttttgtgatgcattcttctgtaaagaattctgtagattgaagtgctctttgaaaacagaactgaaatatatttattcttgtttacaaaaaaaaagatgttttgtgcacatcatttgctttttctggcagtctgagtgcattatctagcacccatgactgctggttcctgtctacagtgtccacagggaagacagggaggtgaactacagtcacctgaaatacagtgtaagagtgcaataagtgtgcttcttagtctaagctgtgaacttgttttcagtcattcctttctaatgcatttaatactatatgttccattgctgactaaaaccagctttgtgaacataggcctttttatttgtgttaactaccaatataagtggctaaccctgatgtcttatttatcttcatgttgtattagtttacataccaggtatgtgcgtctatactcttcctccctttatttgaaaacactttttggtctgaggacaaatctccatccaataagggagaggggagggaaatgcttcgtgtctgaacttcggtgagtctcggctcctgtctcaccacccaaacctatggcaactcatacacattcctcttgtctgtaactgccaaaggtttgggctatgtcagtcacttcagttccgctcaagcattggaaaggttctctggagtctggggtgtgcccagtgaaaatgcgggggactttttcattatccacagacctctctgtacctgctttgcaaaaattataatggaataactatttttaaagcttatttttcaattcataagaaaaagacatttattttcaatcaaatggatgatgtctctctctaatcccttattcctcgatgtttgcttgtaatttttttttttctatatacctatttcctattactttagttctttcctgctcaggccccttcatttgtactttggagtttttctcatgtaaatttgtataatggaaaatattgttcagtttggatagaaagcatggagaattaaataaaaagatagctgaaaatcaaattgaaggaatttatttgtgtaaaagttatttaaaaaactatgtattata

SEQ ID NO: 136 - DNA, 3588 bp, Cricetulus griseus
  modified_base (333)..(333): a, c, t, g, unknown or other
ctgctggcaacagcgagttcctggggaaaaccccagggcaaaacgctcagaaatggattcctgcacgaagcactagacgagatgacaactccgcagcaaacaactccgcaaatgaaaaagaacgacatgatgcaatcttcaggaaagtaagaggcatactaaataagcttactcctgaaaagtttgacaagctatgccttgagctcctcaatgtgggtgtagagtctaaactcatccttaaaggggtcatactgctgattgtggacaaagccctagaagagccaaagtatagctcactgtatgctcagctatgtctgcgattggcaagaagancgaccaaaccgcctcttgatttccaaattgcaagatgaatttggaaaccgaaccagaaatagttgatgtctatgataagcgtgaaaatcccctcctccctgaggaggaggaacaaagagccattgctaagatcaagatgttggggaactatcaaattcattggagaacttggcaagcttgatcttattcatgaatctatccttcataagtgcatcaaaacacttttggaaaagaagaagagagtccaactcaaagatatgggagaggatttggagtgcctctgtcagataatgaggacagtgggacctcgattagaccatgaacgagccaagtccttaatggatcagtactttgccagaatgtgttccttaatgttaagtaaggaattgccagcaaggattcgtttcctactgcaggataccgtagagttgcgagaacaccattgggttcctcgcaaggcttttcttgacaatggaccaaagacgatcaatcaaatccgtcaagatgcagtaaaagatctaggagtgtttattccagctcctatggctcaagggaggaatgacttcttcctggagggaccgttcatgccgccaaggatgaaaatggatagggacccacttgggggacttgctgatatgtttggacaaatgccaggtagtggaattggtactggtccaggagttatccaggatagattttcacccacgatgggacgtcatcgttcaaatcagctcttcaatggccatgggggacacatcatgcctcccacgcaatcgcagtttggagagatggggggcaaatttatgaaaagccagattagtttgaggcctgctcagtcgttcctaatgaataaaaatcaggtgccaaagcttcagccccagataactatgattcctcccagtgcacagccaccacgcactcaaacaccacctctgggacagacacctcaacttggtctcaaaactaatccaccacttatccaggaaaagcctgccaagactagcaaaaagccaccaccatcaaaggaagaactacttaaactgacggaagctgttgtgactgaatatctgaacagtggaaatgcaaacgaagctgtcagtggtgtaagagaaatgagagccccaaaacactttcttcctgagatgttaagcaaagtgatcatcctgtcactagatagaagtgatgaagataaagaaaaagcaagctctttgatcagtttactcaaacaggaagggatagccacaagtgacaacttcatgcaggctttcctgaacgtattggagcagtgccccaaactggaggttgatatccccttggtgaaatcttatttggcacagtttgcagctcgtgctataatttcagagttggtgagcatttcagaactagctcaaccactggagagtggcacccacttccctctcttcttactttgtcttcaacaattagctaaattacaagatcgcgaatggttaactgaactttttcaacaaagcaaggtcaatatgcagaaaatgctgccagaaattgatcagaataaggatcgaatgttggagattttggaaggaaagggactgagtttcttattcccactccttaaattggagaaggaactattgaagcaaattaagctggatccatcccctcaaactatatataaatggattaaagataacatctctcccaaacttcatgtagataaaggatttgtgaacatcttaatgaccagcttcttacagtacatttctaatgaagtaagcccacctagcgatgaaacagattcttcctctgctccttccaaagaacagttagagcaagaaaaacaactgctgctctccttcaagccagtgatgcagaagttccttcatgatcatgtggatctacaggtcagtgccctgtatgctctgcaggtgcactgttataacagcagcttcccaaaaggcatgttacttcgattttttgttcatttctatgacatggaaattattgaggaggaagctttcttggcttggaaggaagacataacacaagagtttccaggaaaaggcaaggctttgttccaggtaaatcagtggctaacatggctagaaactgctgaagaagaagaatcagaggaagaagctgactaaagaaccagccaaagccttaaattgtgcaaaacatactgttgctatgatgtaactgcatttgacctaaccactgcgaaaattcattccgctgtaacgtttttcacatatttaaagcagaagcacgtcagtaaggtttccttctgcataaggtttttgtagtgtgatgtcttaatcatagtctaccatcaaatactttaggagtatccttaatgtttagatagaatattagcagcatgcaataattacatcctaagttctcaagcagaggcagtctattgcaaggaccttctttgctgccagttaccataggctgttttaagttagaaaactgaatagcaacactgaatactgtagagatgcactttgctcagtaatacttgagttgttgcaatatttgattatccatttggttgttacagaaaaattcttaactgtaattgatggttgttgccgtaatagtatattgcctgtatttctacctctagtaatgggctttatgtgctagattttaatatccttgagcctgggcaagtgcacaagtctttttaaaaagaaacatggtttacttgcacaaaactgatcagttttgagagatctttaatgcccttgaagtggtttttgtgggtgtgaaacaaatggtgagaatttgaattggtccctcttattatagtattgaaattaagtctacttaatttatcaagtcatgttcatgccctgattttatatacttgtatctatcaataaacattgtgatacttgatgtagttgtacatgacttcaaatagtacctgcaaagttatggagaattattcatttttgagattggacttatctcagtttaagaacttgggaaatttttagcttcatagtcttaattttgtgagcttcaatcttagtgaattttgggaattaggaacttaagggcaattcaaaattaggtttagaatccaaaatgtcctggataaaagattgtctttgaatctaaagactgattgactgcatggtaactgaattagggctaacacactaactgaaatgatctgtgtattgccccacccactagaaaaactagtaaataaatgattgatagtgaacttttttttttttttttttaatattttatatgtat

SEQ ID NO: 137 - DNA, 3587 bp, Cricetulus griseus
tgctatggatggtgagcttgtctgtcgggtgctccagcttatgaacctgaccgattcccgcttggctcaggcgggtaatgagaagctcgaatttggccatgcttgagctctttttgagcagtttcgtaagatctacattggggaccaggtgcagaaatcctcaaagctgtaccgccgactctcagaagttctgggattgaatgatgagacgatggtgctgagtgtcttcataggaaaagtcatcaccaacttgaagtactgggggcgttgtgaaccaatcacctccaagacactgcagcttctcaatgacctctccattggatacagtagtgtaaggaagctagtgaagcttagcgcggtacagttcatgctgaacaatcacacgagcgagcacttttcatttttgggtattaacaatcagtccaacctgacagacatgcggtgtcggactaccttctacacagcacttgggcgtctcctcatggtggatttaggagaggatgaagatcagtatgagcaattcatgcttccactcacagcagcgtttgaggctgtggcccagatgttcagcactaacagctttaatgaacaagaggcaaagagaactcttgttggcctagtgagagacctgagagggatagcttttgccttcaatgccaagaccagcttcatgatgctcttcgaatggatttatccctcctacatgccaattctccagcgggcaatcgagctctggtaccatgatccagcctgtaccacacctgtactcaagctgatggctgaattagttcataacagatctcagcgactccagtttgatgtctcatctcccaatggtatcttacttttccgagaaaccagcaagatgataacaatgtatggcaatcgtatcctgacactaggagaggtgccaaaggatcaggtctatgctttgaagctcaagggtatctccatctgcttctccatgctgaaagctgctctcagtgggagttatgtcaattttggagtcttccgtctctatggagatgatgccttggaaaatgccctacagactttcatcaaactgctcctctctattcctcacagtgacctcctggattaccccaagctcagccagtcttactattcactactggaagtcctgacccaggaccatatgaactttattgcaagcctggaacctcatgtcatcatgtacatcctctcttctatttctgaaggacttactgcacttgacaccatggtatgcacaggctgctgttcctgcctagaccatattgtgacatacctcttcaaacagctgtcacgaagcaccaagaaaaggacaacacccttgaaccgggagagtgactgctttctgcacatcatgcagcagcatccagctatgattcagcagatgctgtccacggtgctgaatatcatcatctttgaagactgtaggaatcagtggtctatgtctcgacccctccttggcttgatattacttaatgaaaagtatttttctgacctgagaaatagcatcgtcaatagccaacccccagagaaacagcaggccatgcatctgtgttttgaaaatttgatggaaggcattgagcggaatcttctgacaaagaacagagacaggttcacccagaacctgtcagcattccgtcgagaagtcaacgactcaatgaagaattccacttatggagtgaatagcaatgacatgatgagctgacaactcttggactctacctgtacagagcagcgtccctttggtctggtccagaggttgaacaattgcaagggagagggcctggctgatcccagctccttcctccagaggtgtgggggaaatggcaaaggttaactagctgtttcaccaggaaacatgggggtgttcgtgcactcactaaggggcagggcactgctggttcctgggggactgggtgggaagggtggtgggaggagacagagacagcatctgagactccagccccctcctggggccacccaagcagggagagcccagtgtcctgccacaacctgccttgtataaacatgtacattttttcataacattttgaacaaggtttatattgactcaagtttaaaaacaaaaagtgtgactgaaaactttttacagagtctagtgcaccaatgctgatgtgaggggttatgtatggcgagtgaagaaaatgtgtattgtggtggcctgaagctttattggacaaggatgtgtgaaagtgcagagatatatttagtgacacagtagagaggcaaaaaaggaaaaactccaaatgtatattttttcttaatgccctttttcctaccccacccccaccgatgcgttcctgatgctgtattaacccttgttattaggaactctgagccatgagggagcaccaacttccccatccatggatgctgccctgggtcccccagcctcctacagtgacaaataactccagctaaaaatttctggtgttcttatctccatcctttctcccattttacttaccctcatcctcagacagatgcctcttgctgttaaaagttggatttatgttttaggattcttggtctctgtagggagacaatggagaattgagccatttgctctcttgttgagcaatttgcatgagtccaccagaggcctgatgtgtgtggccataactttgtcttccccagcccttgaggcagtgtgtatggatgtgtgtgtggatatttatgtatgtaccctgcactcatgaatgtatgaactggaggaagttactaaagaggaggggttcttaataacaaggtctacctagcatgaagtatttaacattctcccttaaaaaatatacatttttataaaataaaaccataataaatgttttgaatattaaaaaagaaaagtgaacctacagaggaaaattcaatggagaaagctatttgccttgtacttttccacaactgttgctgctagttgtacacatctctagttcagctcttacccatgggacgttaatcaattaggttttatttttattttcctcaaccctcacaaacaatcctgttaattttccttctcctctggcgactgtgtggtgactcttttcttgcgtgatcaggttgcggatagacttgtaagggtgtttgctgcatacagtgtaagcattgtgaccgccaataaacttcagtggtttctactgatttgcactcccaccagcagtggagaagtgttcccctttctccacatcctctccagcataaactgtcattggtgtttttgatttttagccattctgacaggagtaagatggtatctcagagttgttttgatttgcatttccctgatggctaaggatgttgagcactttctcaagtatctttcagccattttagattcctctattgagaattgtctatttagttctgtaccccactttttaattggtattgtttggtattttggagactagcttcttgagttctttgtatattttggagatcagccctctgtcagatgtgggggatggttcagcagttaaagcactagctgttcttcagagaactggtgttcaattcccagcacccccacatggtggctcacaacaatctgt

SEQ ID NO: 138 - DNA, 3585 bp, Cricetulus griseus
atgccttggatacacttgcaataatgggaaattcatctgagttccagaaagcagtcaagttagtgatcaacactgtttcgtttgacaaagattccaccgtccaagtctttgaagctacaataagggttctgggaagcctcctttctgctcatagaataataactgactccagacagccctttggtgacatgacaattgaggattatgataatgaattgttgtatatggcccatgacctcgctgtgcggctcctgccagcttttgaaaacaccaagacagggattccctatcctcgggtcaatctgaagacgggtgtccctcctgacagcaataatgaaacctgcacggcaggtgctggttctctactagtggaatttggtattctgagccggtgaacatccagacaggccactgggttggaaagcagagtggcttgggtgctgggctggattccttctacgaataacctcttgtaaaatcttacatcctttttggagaaaagaagacctagagatgtttaatgccgcatatcagagcatccagagctacctgcgaagaggccgggaagcctgcaatgaaggagaaggggacccaccactctacgtcaacgtgaacatgttcagtgggcagctcatgaacacctggattgactctctgcaggctttcttccctggactgcaggttctgataggggatgtggaagatgccatctgcctccatgccttctactatgccatatggaaacggtacggggccctccctgagcgctataactggcaactccaggcccctgacgttctcttctacccactgagaccagagttagaagaggaccggatggagagcttctttctcagtgagacgtgtaaatacttgtatctgctgtttgatgaagataatccagttcacaaatctagaacaagatacaatgtttacaacagagggccacattcatatcgtgtggacaaacgtcttcgggaattgccttggaaggaggtttttctctgaagatggggagcgggaaccaagaagagaagttttgtacacaggtctaagtctcaggaactcagaatcattaactccagttctaattgcaatcgcgttcctgatgagaggagatactctctgcccttaaagagcatctacatgcgccagatcgaccagatggttggcttgatttgacctgctcacctcagtgtggccagaccttaaaccaaacccaagcataccaaaatctcctctgagatggaaggggtggagtgtgtccatctgtgatgctgtagaagtttctgtccagctcttacctctgcttgattcttgcacttagtgttgctggtgctgagtattgctacctctttgttagaggatcgggaatgcaattcctgtgcaaaggtcctgaggtttacttggcatcactacttactgcaatgaaagtgtcatcctttctctcctgggttcatcgtgctgttcccaagatagccaactgtgatttggggtcacatgggggaaattcacctggtttatttatatcctcaagtaatttatacagtgttacttgttttagtgtaatggtctagccagaaatctgacaggtagcctctgaagttagattggaatctacgagcttaactaatagatcttttgagctgtaatttgcatttattttcaatatcagcttacctgaagaactcctgtcggtttccacgaaccaggtgccttctagggagaggaaaaccttaggattgtgtgagcttccatctctcatgtttcataaccaaggatgcttggcttatgtgtagtgccaattagctaatcagggacaaagaaaagatcagatgactttctgatatccttgagccatttctttatgtgatacaggctttagattagtgccttatgggttttgtttgggccattggctgtcacagccactgtggtgcctgtaggcagcttgtttgtattgccatatgatgggaccaataaagaacagggtgggcatgaggaagattcctggagtatgtcagctcccaacagtcctctctcactggacttttcacctatcactcttgagtgggcttcggttgtttcttctccctgtgctctaggagtagtgatctttgtctggaacaaagtaccatggtgccttgagtgctatcagtgggtcttaggggtacaggcagacatgcagtgtattttattgagtctcaaaccctcttgacttttgggtactggacttttcacctgttgaaaaaggctggggcttagtaagataatgcctataaatctccttctcgactgctcaggccacagtcagtgatttgtggggccagatgaagaccactgaccatgcttgtgttcccaggagcaaccagtgtctagtgtccagtttggccagcatgttcaaagtgtagcaagctgccttctggttcggtaggtgtggaggagtccagttctcctacaaccaacaggcttgccttagctgctataaatactgtgacagaggaagtccattctcctagaagtggggtgacaaaggaatgcttggtggctctgattgctttgaccgttgagaaaaacaggtttgttttccaaagcttccctttagtttcttcctgatctgccagagcttgctttttgtaactgaatttctagttctgatgatgtctgggcttttcttgtcttagattccggcctctgcacgtgatattcaaatagttttctgtgtgttgcagggaaaacacatgagggtagtgcctgtgcaggtgtcagggagtccatattttactggtcggattaaatgcagttgtctgtgaatgagtgtccactgtagttcttcactctggatcttgtagactttccatcagatatccctttctttcagggcactgaggtcttcttctgttgacatgcacacatttagtgctggtcagaggcgaggcctgagtgatcacctcagtcagagtggctgagcagggacttgagaagaaggtgctgatctttgctcttccgttccagctgtccagcacttactctagtgcctcttccctgcagggcagggactccttgtggattggagatggtgatgtgtgtgggctgtgtggcccgattcagcagggctcaggcttatggtccctcttgaatttggatgtgaatctcctaaagatgtcaagtacctgtgaaacccatcttcactacttccctctttctgagaggaggacaaataatatttttaaggtgtttggttttagtgttaaatagcaaaccacaagctgcatacagctttatttattacatacacgaaaagtaaatctgtttttacaaaacaaaaaatctagagttggaaactctgggacaacttactgagatgcacaaatgcttctctctgtgatgtgcaatatgcttggcgaccatagatgatacttcatgtttaatctgtaaataagaaatgtatttaaattaaatgggagatttttgtaaaaggaccaaatgttcttttataaatgtactaaggaatatcttgctctttgaaatttattaggatttttatgaataatttttattaaaagattcttttttgagttgtca

SEQ ID NO: 139 - DNA, 3582 bp, Cricetulus griseus
  modified_base (3352)..(3352): a, c, t, g, unknown or other
tcagccgcctgcgctgcctggccagggggcgggccggaaacctcggaggcccgggggggccccgacggctccccgtggggagccgtgggcgcccgctgcccgggtccggccggacagaacagtaaactaagcagactctgaccattggcctcccttccaccagccaggatcaacctctctgtctgtggtccatgagctgcatcatctaccatcattgtgcaaccggccccaacgcaatgtgtgtttgtcaaaccatggaagtggggcagtatggcaagaatgcaagtcgggccggagaccgaggagtcctcctggagcccttcatccatcaggtgggcggacacagcagcatgatgcggtacgacgatcacactgtgtgcaaacctctcatcggaaagtgagactgtagagcaagatgacacaccagaacgggagcaacctcgacgtaaacactcccgccggagcctgcatcggtcaggcagtggtagtgaccacaaggaggagaaaggccagcctgtcctttgagacctctgagagctcccaggaggccaagagcccgaaggtggaggctccacagccactcagatgtccctttccagatgctagacagcaatagcggtctgagttctgagaagatcagttacaacccctggagcctgcgctgccacaagcagcagctgagccgtatgcgctctgagtccaaggaccgaaaactctacaagttcctcctgcttgagaatgtggtacaccacttcaagtacccctgtgtgctggacttgaagatgggtacccggcagcacggagatgatgcatcagctgagaaggcagcccggcagatgaggaagtgtgagcagagcacatctgccacgctgggggtcagggtctgtggcatgcaggtataccagctggacacaggtcattacctctgcaggaacaagtactatggtcgtggactctccattgaaggcttccgcaacgccctgtatcagtacctgcacaatggcctggacctgcgacgtgacctctttgagcctatcctgagcaaacttcggggcctcaaagctgtgctggagcggcaggcctcctaccgcttctactccagttctctgctcgtcatctatgatggcaaggagtgccggtctgatctccgactcaagcacgtggacatggggctccctgaagtgccaccatcctgtggccccagcactagccctagcagcaccaaccttgaagccggcccctcttctccgcccaaggtggatgtccgcatgattgactttgcacacagcacattcaagggcttccgggatgaccccactgttcacgatgggccggacagaggctatgtgtttggtttggagaatcttatcagcatcatggagcagatgcgggaagagaaccagtaggccagctctgggccctaagaccccgtcctctccacccacaggcagggaccattgctctgaacttgctgtgaggacacactgacttgcttttaaagggttatatttctctttggtgtaaactaaaagaaatgtttttagctgtagcctggaatccatatatataaagtaaaggagggcagaacatacgtcctctcagccaggctccttagctttgtggctctgtctgctgtgtccaggctgactcaggaaggaagaggtgccccagtgggcttggcagcagagacagaatgcctttgaactttggttcccttgcctaaggttttggggatctgtggctgtagggctctgctggttgtgaggtgaagcccttggctggcacaggctctctccatgcctactaaatccctcatttcccagaactggggaggcacagctctgtttgctgaggtgagtcagtgtcccagtaggcccaagggtctttagtggctctggcctagacagtatttgcagttcttgagctttgggtggtgtcccttcctctagtttgggcagctgcgctgcctctagacgggctgctgctcccagggctcagggtctgtggtccactcagggtctcgtcttctccaggccaagcccaaggcggaagcccattgtgtgtgttgcaggctccaggcgtggagggagaactttaaatgtgtctgcttctagggacgtaggaccctgggtacaggtgcccagcgtctgctgagaactttgtgtgttagtcctgggatctgtcaggaagttcctttgtctgcctgccaggctgttctgtggtgagctctctggagtatagccttgttgatagtatatattgctttgcttcatgctctcctcagcagaacattctttcccttttctgaggagagcctttgctcctgtgcccttcctttgcaggttctgctgttttacaaacctgttgacagaatgacccgtagtggtgttcacctgctggccttgtgggcctagtctaacacttctgacatgtctgttttggcgtttaaagatattcctgccagcctttgagagatattggtaactaatggtgtaattcctggttcatagagatgcagcctctgagaagggctccttgacagagaccccagtcatggtcttctgaccctggtgccagtggtgggcaggttcccattccttagggccgggaggcatagctttgcccatttctggttaggaacaactgtcttgtgtccagtagtgttatgttgcttcagccatgggggcagtaggtgttcattattgtagacacatgttttctgccaggagagaggctaagagaggggtttggggccactgccactacagcttggaaaggctgggattcgctgcttctcaagggcagggccccactttcagcacttttgatatctggagggccagcccgtttatctgataggtggtggtgagtgtgagataacactttctgccattgcttttctacctgtcccaggctagagccctgtccctgactgacagaccctgctttcccagccccaatttgggaccaaagtgcaactcgggatcacaggttggggagctcaggttacccctttccatagtatttcctggggctaagcactcagcagccctgggagatgggtgggagtgaaaatgggatgggtggtgcttaaagaggaaagggaccagtgtagtaactaacttgcctgggaccccaccttcccagctttgggcctgtgcaatgggcatgaggattctctcctagaggccagaggccaggggcctgggctagttcagtatccgctgctcattcactcacatctggccacgtgcacgttcccaagatgtaaactgctttgaactttacagctgtgtaagttggttgtgtgtaaatgtaagacttcgaggtctggaaattgttctctgctccncttctgaagctacacacctgcctacataccctaagacctgcgcctggatgcacacgtggctccattggcgtttaggcgcgcttgcgtttccctgggtcttgtgtgtggtggagaggagtgcttggcccgagccggcccctttctgtacacctagcgctccccgcccgcttgtgtcaggtcgtatatgtcaaaataaagcctctagaaactaaaaaaaaaaaaaaaaaaaa

SEQ ID NO: 140 - DNA, 3579 bp, Cricetulus griseus
gcccggccccgccagcccagcccagcccaaccctgctgactcccttcccacacccgggcagcagctgccgtcgcctggagagaaggtggaggaaaaaaaaaaaatccagcccctagcacgcgcgcaccatcatggaccattatgattcccagcagaccaacgactacatgcagcccgaagaggactgggaccgggacctgctcctggatccggcctgggagaagcagcagaggaagacgttcacggcctggtgcaactctcacctgcggaaggcagggacacagatcgagaacattgaggaggacttccgagatggcctgaagctcatgctgctcctggaggttatctcaggtgaacgcttggccaagccagagagaggcaagatgcgagtgcacaagatctccaacgtcaacaaggccctggattccatagccagcaaaggagtcaagctggtgtccatcggggcccaagagattgtggatgggaatgtgaagatgaccctgggcatgatctggaccatcatcctccgctttgcctatccaggacatctccgtggaagagacatcagctaaagaaggtttgcttcctgtggtgtcagaggaagacagccccatataaaaatgtcaacatccagaacttccacatcagttggaaggatggccttggtttctgtgccttgatccaccgacaccggcctgagttgattgactacgggaagcttcggaaggatgatccactcacaaacctgaatacggcctttgacgtggcagagaagttcttggatatccctaagatgctggatgccgaagacatcgtcggaactgcccggccggatgagaaagccattatgacttacgtgtctagtttctacccttctctggagcccagaaaggcggaaacagcaagccaatcgcatctgcaaagttttggccgtcaaccaagagaatgagcagcttatggaagactatgagaagctggccagtgatctgttggagtggatccgccgcaccatcccgtggctggagaaccgggcgcctgagaacaccatgcaggccatgcagcaaaagctggaggacttcagagactaccggcgcctgcacaagccgcctaaggtgcaggagaagtgccagctggagatcaacttcaacacgctgcagaccaagctacggctcagcaaccgacccgccttcatgccttccgagggcaggatggtctcggatatcaacaatgcctggggttgcctggagcaagcagagaagggctatgaggagtggctgctgaatgagatccggaggctagagaggctggaccacctggcagagaagttccggcaaaaggcctccatccatgaggcctggacggatggcaaagaggccatgctgcggcagaaggattatgagacagccaccttgtcggagatcaaggccctgctcaagaaacacgaggcttttgagagtgacctggctgcccaccaggaccgcgtggagcagattgcagccatcgcacaggagctcaatgagttggactattacgactcacccagtgtcaacgctcgttgccaaaagatctgtgaccagtgggacaaccttggggccctcactcagaagcggagggaagcgttggagagaacagagaagcttctggagactatcgaccagctgtacttggagtatgccaagcgggctgcacccttcaacaactggatggagggagccatggaggaccttcaagacaccttcattgtacacaccattgaggagatccagggactgaccacagcccatgaacagttcaaggccaccctcccggatgccgacaaggagcgtctggccatcctgggtatccacaatgaagtgtccaagattgtccagacctatcatgtcaacatggcaggcaccaacccctatacaaccatcacccctcaggagatcaatggcaaatgggaccatgtacggcagctggtgccccggagggaccaggcactaactgaggagcatgcccgccagcagcacaatgagaggctacgcaagcagtttggggcccaagccaatgtcattgggccctggatccagaccaagatggaggagattggaaggatctccattgagatgcacggcaccctggaggaccagctcagccacctgcggcagtatgaaaagagcattgtcaactataagccaaagattgacatgctggagtgtgaccaccagcttatccaggaggcgcttatctttgacaataagcacaccaactacaccatggagcacatccgtgtgggctgggagcagctgctcaccaccatcgccaggaccatcaatgaagtggagaaccagatcttgactcgggatgccaaaggcatcagccaggagcagatgaatgagttccgggcctccttcaaccactttgaccgggatcactccggcacgctgggtcctgaagagttcaaagcctgcctcatcagcttgggttatgatattggcaacgacccccagggagaggcagaatttgcccgcatcatgagcattgtagaccccaaccgcttgggggtagtgacgttccaggccttcatcgacttcatgtctcgagagacagccgacacagatacagcagatcaggtcatggcatccttcaagatcctggctggagataagaattacatcacagcggatgagctgcgccgcgagctgccacctgaccaggctgaatactgtatcgcgagaatggccccctacgcaggccccgactctgtgcccggtgctctagactacatgtccttctccaccgcgctgtacggagagagtgacctctaacctgcccctgccagtcccctacccccaccttggccctctgcgcgtgcgccccaccctgctcctcctcctcctccgcccagtccggctgcccgggtttggttttcagctcagccaccaggactagctgcggcccaggcggcggcaccaagcctccctgcccgcgaagtgacagtttacaaaattattttctgcaaaaaaggaaaaaaaaaaagttacattaaaaaaaaagtttaaaaacaaaaaaaaaaacaaacaaaaaactacatattttattataaaaaaaagtatttttttctccaccagtcttaaatggaaaaagaggaaaaatcaactatttgcaccgaaatgttttttgttgtgacataggaaaataaccaagcacaaagttatattccattctttttactgattttttttccttctacctgtaccgtctgctgtatttggtttctctaatctcatgtccacctggggggtgggagtaggtgggtgctcttgtcaaaggcacagtggtgcatgtgtgttggctagctcacttgtccatgagaatattttatgatattaaagaaaatcttttgaaatggctgcttttcaaagaagataattcctggcttctcatttttaagtctcctcaaacgtgtggctggcctgttttatgaatgcagactttaaaaaaaatatattttgaacattgcctattaaagatagggcaaacctggagatgatgatgttgcttggcacagactgtattaaaacaacactcccatga

SEQ ID NO: 141 - DNA, 3565 bp, Cricetulus griseus
agcccggctcgggccggcgtgtccaccccttgctcgggcgcggcgtccctcggggcttcccgctgggcctgggaaccaaggtgagcggcgtggcgggctcaggcccgcggcggaccagcagcgaggacctgcgggacgccacctccttgctggcggcgggcgagggcggcttgctggacgaggtagagccgctgcggcccgacgagctggagcgactgtcaggctgggaggaagaggaggagagctggctatactcatcaccaagaaaaaactcacaccaatgcagaaatctgttagtccgttagtttggtgcaggcaagttttggattacccaagtcctgatgtggaatgtgctaagaagtctcttatccacaaacttgatcaaactatgtcagctctcaagaggcaaaatttatacaataatcctttcaactctgtgagttatacaagtccttatagttcaattggatccaactataagctaaatgatgtaactgatgtgcagattctagcccggatgcaggaagaaaagtctccggcaagaatatgcagctaccacttctcggcgcagttctggttcatcttgcaattctacgaggcggggcactttcagtgaccaagaactggatgcacagagcttggatgatgaagatgatagtgtgcatcatgcagtatatcctgctgttagcaggttttctccatcaccacgcaattcaccccgaccatctcctaagcagtcacctcgaaattcacctcgctcgagatctcctgcccggggaatagaatacagtagagtgtccccacagcctatgattagtcgtttgcagcaacctcgcctctccctccaaggccatcccacagatttacagacgagcaatgtgaaaaaatgaagaaaaacttagacggagtcttccaaacctatcccgaacatcaaacacgcaagttgactcggtgaaaagcagtagaagtgactccaattttcaagtgccaaatggaggaatacctcgaatgcaacctcaggcttcagccataccttctccaggcaagttcccgctcccctgcagcaccatctccattggctcttcggcaaccagtgaaagcatttagtaatcataattctggttctggtggccaagaaactacacagttcacacagaccacctcctcaccaggacctcctgtggtgcagaacacagccccagcaaacccttccagcaatatcaatagcgccactctaaccagacctgcagggacaactgcaatgaggagtggcctgccccggccgagtgccccttctgcagggggcataccagtgcctcgaagcaagcttgcacagcctgttcgaagatccttgccagctcctaagacctatggtagcatgaaagatgacagttggaaagatggctgttactgaccagcagagacagactctgcagataagactcttggggtttgtaaaaccccagccctctctgtctaaaatagcacaaactggcagagatgatgaagcagcactttaataccatgtaacatcggatgtgtttggtaatcatgcaatcactctccatggagtcacttttagtttgttcactagaaacacggttcattttttattatttgacaggccgatatctgggcaaatacctaatggatgccaaagagaaatgcccatttgtaaagagagtacttttgtacacaggaagatggtgaattcaggctgtccaaaactcacgttcaacctactttactgtacaaatagtatcaataaatattgtatgtgtctttattcttgataaaacaacacctcagagcttacaacctgggctaaaactatagcgcaagaggaggggaaatctatgcatttaactacaataatctctggtggtgacagttgtactgttgctcttaagtgacataacggtctattatgtgatagtcgatcaactttaagctgaataactgtatgaagtatctttttaaaatactgtctcttttgagttagattctgccttacatcaatgttgcattgtttggtaaaaaccatccaactctaatttgctgaataacttgttcgctaatggcatatgagtgtatatatccccttgaaatcaactgtttcggttttattggattattagcaaactaactggagctgacttctcattcttgataatgaggtctgttttttaaatacttaatctggacagatctaaaatattggcagttgggtcacataaagatggagaggacttgaacatgtgccctgttagtagaggatgttctgtaagttggaagtagaaatgcagtgccaggacctgcagtgtagaaaggaagaactggtatcattgcatttgaaggtggtgagagggagaggaggggttatccataatgatggactgaaactgttgcttttcagaggaagatggaacatgtgctttgttggggagtgtctcatgtaaatctaagtaacaaagtagccactgtctccgtggaatcacatgtgcacacagcaaacaggtctctgtgtcagtgtaacatttcaaaaaaataataaatgctgcaatctaataatttaaaagaacttaatgaaccatctattacattttttaagttagataatcagtttcaaaaggaatattcaggttatttaacattgtttttaaatggctgcatcagaaaaaaatatctatttttttaattaaactatttcatcacttgtttaaaaatgtattttggatctgagtttggtgatattattttacctgctgctgtactaccacagactattggcttttagtttccttaaagagaaaaattagcctttttactagaaagcctttgtgtattgccagtttttctgtttgggaaaatctaaggatttactgtggtcactggtacagaagaaatgtggatttgataaactagtgcctatgattttaatttatgtttgatatatagtagtaaggggttatgaatgttgattattttgtgccaacagcccagaattgtcacttatatgtcagcagaaaactatgacctctgcttccaaaagttatttaattttctcagtgtttggatgttattttttgtaagtgtgtttaataaaagtgtaaaaaattggaaaatataaatattcttaagcaagcatttgctggatcattttttacaaaacttgtttgtatattataaaacactctgaagagttgacttttctcagttttcataccctggaaatcacattttgtaaaactggggaccattcataattgtcagatacttttttaaattatctcagaacatcacttttatatataaaaagtttttttgaaagaaaagaaaattaaatacatatgtggccccaggtatttgtataactctaggatggtctgcactctgtctgtttaaattgacttaactcactgtacaggtgttcagttttgacagtatgatgcatggtccttttagatcacatgaagtttgatttgcaaacatttctatagccgaacttgtaatatgtggttgcctccttaataaacagcctgaccataatgtttactattaaatc

SEQ ID NO: 142 - DNA, 3564 bp, Cricetulus griseus
caaggatgttgctggtctggacactgaaggccagtaaacagaaatggaagctgaaaatagtgaggttgatgaaaatgttccaacagcagaagaagcaactgaagccacagagggcaatgcagggtccagtgaagacactgtggatatctcccaacctggtgtgtacacagaacacgtgtttacagatcctctgggagttcagatcccagaagacctctccccggtgtttcagtcaagtaatgagtcagatgtgtacaaagatcaaatatcagtattgccaaatgagcaagacctggtgagagaagaagctcagaaaatgagcagtcttttaccaaccatgtggcttggagctcaaaatggctgacatttatacctactgttcaatggcacatgcacagctttgtttccatgggcaccgggatgctgtgaaattctttgtggcagtccaggtcaggtcattagcccacaaagtggtagtggtggagcagatctaacagctgacaaagcagggtcatctacacaggagcccagcacccagacacctttgtaagtccatagcttgtcatcagtgggggaggaaggctacattgacttccggatgggtgatgaaggtggagaatctgaacttcttggagaggatcttccactggaaccttcggtcaccaaagcagaaaggagtcacctgatagtgtggcaagtgatgtgcggcaatgaatgagtccataagagacaggtggagatgaggaagctgcctcttctgcatgatttattttccctttttgtagaaagacatttcaccacataatatgtgagcattttttttcccggttacctttatattacaaaatctgtcctatggtaacaatacagaggaagagcaagctagtttactgcacagtgttaataggcaatttcagtatatcatgaacaaatcaaaggatgtttactttctgcaaactagtgaattacagaaagcaatccacatgtggtttgctctgccacagtctaatgtcactcacgtaattgataaggtcactttttagctatcactaataatggaactaatggaaaagacttaataaatgaaactgtaccatgaagtacaatagagttttccccaatgtattatagaattgacacactaataacaggtggattatcaagatttatctaaatgtcccaagagggctaaaagctaactgtaaattcctttaactttcactttcaattctgacaaatcttgtttatatggtatataaaactttgttttcatcagattggggttttatattaaagaaattaaggctccactatttaataaatttcttgttcctatctcattagaactttaaagtttatgaagcctgcttctctgcatagtctcattttttagactagtttcaccgattttcatactagcatttaagaaatgtattatttgaagtttaggaaatattctgggaagcgtagaggacacttcaatactggaaggatgttctaagaagaaactgtgttttgtactccttgtcctagaggatggtggtagttgattgagttttttccatggaaaaaagtacctattagccagatgttcctagctgctcctaacctgttaaggaggggacactgtggtggctgtggattcaacctaattagctgaatacaagaataattaagaagattgatttattttgttctgtataaactaacaaacaactagtgtttgattggtataaataacacttcagcatttgtacccttgtcagcttaaaatgccatcttcgaagggaaatgcgaaggcaaatgtcatgcataagtcagcattagtcttttcattcccggtatgcatttgaaaaggtgggtttaaatctaaatttaactgataaccttatgagttttcaaaaaccatgatatgatatgtttttttcttctctcaagcttcctgaaaatatatgatttaccatttcttacccactgctacaagcaaaattgaacatgatttttatgtgctattttaaaaacaaagatatctgtaaaaagtataccagtgaattttttgcatatatgtgattaggctagatcctaaaacacatgggacttcatgagcatgggaggcttttgtatcaataagcacattgggcacactctaaaattgtggcccctgtatgttttaaaagaaaaacacctgttttgataaagctgtataaaggataatattttgtttgatctacatattcatttttcttcggagctgaccacttttccaaagcttgtttgctatatctttattttaaatatgagtcatttgaggcaaatacttaaaagcgttattaacatttattggaaatgttgtataaattcataaggagacaccaaagtttctgggagttttaatcccaagaagtttgtccagaagctctttacatgtgtgtgtggtccagtgtagctcaggaaaccagaagctaaagaagaaacgtgcaaatgtgttgttaccctagttataattgtttctttgaaacttaatggcattgacttcacacagactgtaggtgtatggtgattttagctaaagatcccaaattactgtggccctgtggactaatttcaaggacaggagagagcaggtgcacctgtacagcttgttttaagagctgtgcttatatttataattttgcttctcttcctctttccccccataacacatatattcttgtgatgtttattttggtcaagggggtaatctttggaagaaataccaggaagtaagctgctcacaaactgtaaagggtataaactgccatagcctccacagggcagaggaggcttgcatacctctcttacaagttgcagctttctgggagtgtaagatgcttgagcacaaggatactgagcaccactattcaggtggaatgtgtttgcagtagaaaggttgaagtatactctcagttagagcactgttcatctcctgaatttgagaagagaccacttaacatgcagcctttgtaacaaaacaaaatgcctcatattaacctcaaaagaatgtgtcttgcaaatgccatggaaatggagatttatttcctagtattacaactattaccaaaggactggaccagatttagggttcttcttaattgatcatgttaggaaaggggctgatggtgtcccacttggacacacgagaagagaaggaaataaatgttgaaatcataaatgcttttctaacagggatgtgctattctgtaacactaattgtctttttctttctcttaaaaatgaagttttattaataattttgtcatatttctaaatatttgaatatgttttaactgtatgtcctaaatttctttttgtcctagacatcagaactttactttgcctcataagattgggttctagagtgccccatttgctgtctcttagaggccgagacttctatgagtaaaaagctcattagcaatgtagttatttcagtatttatttctattatggaatccctggggttcagaatgtaactttgtacatgaaatatatataaatatgtatatgaaaaaaaaaaaaaaaaaa

SEQ ID NO: 143 - DNA, 3560 bp, Cricetulus griseus
aagcagttggatgggtcagagagactaacatgcttatttcaaataaagaggttgatgagcctctgttgcaggttgctgcaaaactgcagtgatgacagtttaaatgtcgcacttccaatgcgaatgcttgaggtgttttcatctgagaatacatacttacctgttttacaagattctagctatgtggtgtcagtgattgaacaaattttgcactacatggttcacaatgggtattatagatctctctacttgttgattaatagcaagcttccatcaagtattgaatattccgatttgttgtcgagttcctatagcaaaaattttagctggagaatgtggggttcacccatgtcttttgtaagattctagtcgaatcatccccctcttttacctctttccttgttcagtcattctctgatttccatacatgacaatgaatttttttggtgtattcccatagaagttgtaggtcagagacaatcatccatgatgccttttcactctggaggagctaatcctgctgtctcgatgccttcgggatgcctgcttagggatcatcaagctagcatatccagaaacaaagccggaagttcgggaagagtatgtcacgggcatttcagagtattggggtcaccaccaattctgagatgcagcaaatgcatacaaatggagcagaagcgatggggttcagcacaaggagaaatttctgtcctccaaacctacttggctgtcagaacaagaggatatcaaagcagataaagtcacccagctctatgtacctgcatctagacacgtgtggcggttccggaggatgggcaggattggccctctgcagtccaccctggaggtgggtctggagtccccacccctgtctgtgtctgaggaacgacagcttgccattctgacagaactgccttttgtggttccgtttgaggagcgagtgaagatctttcaaaggttgatttatgcagataaacaagaagttcaaggagatggcccatttctggatgggatcaatgtcacaataagaagaaattatatttatgaagatgcttatgacaaactttctccagaaaatgaacctgatttgaaaaaacggattcgcgtgcacttgcttaatgcccatggcctggatgaagctggcattgatggtggtggtattttcagagagtttttaaatgaactactgaaatctggatttaaccccaaccaggggttctttaaaactactaatgaagggcttctataccccaacccagctgctcagatgcttgtgggagattcttttgcaaggcattattacttccttggcagaatgcttggaaaggctctgtatgaaaacatgctggtggagctaccctttgctggctttttcctgtccaagctgctgggaactagtgcagatgtagacatccaccatctggcctcattggaccccgaagtctacaagaacctgcttttcctcaagagctatgaggaggatgtggaggagctgggactgaactttaccgttgtgaacaatgacctgggggaagcacaggtggttgaactaaagtttggtgggaaagacatcccagtaactggggccaaccgtattgcctacatccacctggtggctgactaccggctgaacaagcaaatccgaccgcactgcctagctttccgtcagggtttggccaacgttgtgagcctagagtggctccgaatgtttgaccagcaggaaattcaggtattaatttctggtgcacaagttcccgtaagtctggaggacctaaaatcctttacaaactattcagggggctattctgctgatcatcctgttattaaaatcttttggagagttgtagaaggtttcactgatgaagaaaagcgcaagttactcaagtttgtaacaagttgctctcgcccccctctcctggggttcaaggagctgtaccctgcgttttgcattcacaatggaggctcggaccttgagcggctacctacagccagcacctgcatgaacctgctcaagctcccagagttttatgacgaagccctgctgcgaagcaagctgctttatgccatcgagtgtgctgctggctttgagcttagctgagttgagcccagggaacttgatctgacccagaggcagccagcacctgccagacccccgagagcactcaggcgggacccgcggctctcctcaggccttctttctggcattcctccctttctgtattttttttttagataattttattgtgaacagtcacttacatagatggacattgcttttcacataacttaaccattgttatgtgccatgtgactggtttagtaattttgccaagaagagcacaggtgttagactagtggcaactcagtgaaattaaccaaagatgaagctttggccttgctgacccagttcatattccctctgggtcaggcagctgaatctggaatctggggctgatacaaagagccctgagccactgcttctcatgtggttgattgtttacaagcctaattgtaaaaactgaaggcatttttcctgctgccttttcccaaagtgattaggtttggaaaatggataacgctagtattattttatttgtgctttttaagccatgtcccccaggtgggactcgcatgcttgtcttcagactcctactgacctgcatcatgaggtttggacatggctgtgtgggtgtgaggtggctgctgccctcattgctcttttcctgtctctgctttgtacctggagagctttccgggaggcggaggaggaggagggtcggccctgtgcttcctgaggtactgtcacctgcagtgagttggtgactgggggatgtgagcactgcagcttttattaaagtcatttgaaccaaagtggcgggctgcgtctctccgtgatccacgcgccctcctggcccagcagtacagtactgcccatcatcttgggcatcttggggagacttgctaggcctctgcttcctgctgctgtttggatgagaagacagcatccctggagtgtgtcagggaagagcatcaggccaggtgattctcacttaggcactttatcagggtcccgcttgttgccaggtgaccacagcctctgcaaacaggaagcagggaagcatctaggaggccagtatgcaaggaccaacatggagctggtgaggactccaaaccccgaatctctgccaagtccagtgtctttgtgcctggaggctctttgtgctattgggttaggtgaccagaattagcaatatacttttaaatgtgggaaaactgaatgactcttttaagacaatgaccattatcagacaaaatgtataatttcttaatttgaataataaagtgtttaaatgctatttgtagtcttgatacataggaagaaatagcatttatccttgattttatttttgtttgggaatatttatgttgaacgtcctttatcttttattagataatttgtgtattagtattttagaagtgaagtatctgagactggagataaattggcagtttacatacttgtggttttttctgtctgctcttctgtagcttatttattt

SEQ ID NO: 144 - DNA, 3554 bp, Cricetulus griseus
  modified_base (721)..(721): a, c, t, g, unknown or other
  modified_base (723)..(723): a, c, t, g, unknown or other
  modified_base (3544)..(3544): a, c, t, g, unknown or other
ggaagacgatcggggaaatgttgtgctgtgtggggtgaaagaagtggacgtggaaggcctggacgaggtgctgagcctcctggagatgggcaacgctgcgcggcacacaggcgccacacacttcaaccgtctgtccagccgcccacacacggtcttcactgtgaccctagagcagcggggacgggctcctagccgcttgcctcgacccgccgccggccacctgctggtctccaaaatttccacttcgtggacctggcaggctcagagagggttctcaagaccggcagcaccggcgaacggctcaaggagagcatccagattaacagcaccctgctggcgctgggcaatgtcatcagcgctctaggggaccctcagcgccgaggcacccacatcccctaccgcgactccaagatcacccggatcctcaaagactctctgggagggaatgccaagacggtgatgatcgcctgcgtcagcccctcctcctctgacttcgatgaaactctcaacaccctcaactacgccagccgtgcccagaacatccgcaatcgcgccacagtcaactggcggccggaggccgagcgcgcccccgaagagcaggcggcgggcgcgcgcgggccgccgcgacaccgctcggagacgcgcatcatcccaccgcggccggcgcgcgcccggcccggcagtgggctcccaccgtagcggctgccggcctgggagccgngngcgcgcgctgccgcaccagcgccgcctacagcctcctgcgagaactgcaggcagagccgggggctgcctggcggtgctgcgcgcaaggtgcgggactggctgtgcgcggtggagggcgagcgcagcaccctgagctctgcctccgggcctgacagtggcatcgagagcgctccagcggaggaccacacagcgcaggggaacagcgggagaaagggggatgagggggcccagcagctgatgaccctgcagagccaagtggcccggttagaggaggagaatcgagactttctggcagctttggaggatgccatggagcagtacaaactgcagagtgaccgcctgcgagaacagcaggaagagatggtggaacttcggcttcggctagagctggcacggcctggctggggagcaccggggctcctgcagggtttgcctcctgggtcctttgtgccgagacctcacacagctcccctgggaggtgtccacactaacatgctgggcatggtgccccccacatgtcttcctggagaagaagttagctccgagcagcaggtgacaaatggcatggaagtcaaggcggaggtgctggcccaagtggacaagttgggaaatagctcttccactacctcagaggaggaaggggaggaagaggaggaaggggaggaagaggaagaggagccacccaggaggactttataccttcgcagaaatgggatcagcaactggagccagagggcaggggttcgtccagggagcccacctgacaggaagggcccagaggtgtgcctagaagagtcagctgctgccactccagcaccacaagttggtggcagcaaggtcccagttcagacccgccaggcccctgctgccatggcctctgagtggcgactggctcaggcccagcagaagatccgggaactggccatcaatatccgaatgaaggaggagctcattggtgagctggtccgcacagggaaggcggcccaggccctgaaccgccagcacagccagcgcatccgggagctggagcaggaggctgagcgtgtgagggcagagttgtacgaagggcagaggcagcttcgtgaactggagggcagggagccccaggatgccagcgagcggtccaggcttcaggaattccgcaagagagtggctgcagctcaaagccaggtgcaggtactgaaggagaagaagcaggcaacagagcggctagtgtcactgtcggctcaaagtgagacacggctgcaggagctggagagaaacgtgcagctcatgcggcgacagcaggggcagctgcagaggcggctccgagaggaaacagagcagaagcggcgcctggagacagagatgaacaaacggcagcatcgtgtcaaggaactggaactgaagcatgagcaacagcagaagatcctgaaaatcaagacggaagagattgcagccttccagaggaagaggcgcagtggcagcaatggctctgtggtcagcctggagcaacagcagaagattgaggagcagaagaagtggctggaccaggagatggagaaggtgctgcagcagcggcgggcgctggaggagttaggacaagagctccacaaacgggaggtcatcctggccaagaaggaggccctgatacaggagaagacagggctagagagcaagcgcctgaggtccagccaggccctaaatgaggacatcgtgcgcgtgtccagccgtctagaacacttggagaaggagctatctgagaagagcgggcagctgcggcaaggcagtgcccagaaccagcagcagatccgcggggagatagacaccctgcgccaggagaaggactcactgctgaagcaacgcctagagattgatagcaagctgcggcaaggaagcctgctgtcacctgaggaggagaggacactgttccagctggatgaagccatcgaggccctggatgctgccattgagtacaagaatgaggctatcacatgccgccagcgggtgctacgggcttcggcctccttgctgtcccagtcgtgagatgaatctcatggcaagctcagctacctctcttcctcagtgctgtgcaagtattttgacaaggtggttgacactccgagaggagcaacaccagcaacagattgccttctcggagcttgaaatgcagttggaggagcagcagcggctggtgtactggctggaggtggcgctggaacggcagcgcctggagatggaccgccagctaaccttgcagcagaagacatgagcagaatgtgcagctgctcctcagcagggtcgagaccaccttggtgagggcttagcaggaaatgaagatgggctccacccagcagctcctgaagctctctggcagtcctcccttttggagggggcaccccgtgcctgggatgagactcgggacttggtccatgccccactacccctgacatggaaacgctcgagcttgtgcagtgagcagagctcctctgaggagctgagggcccgggaaacaaccgagccctcaggagggcgggtgccacctgtgggtgaattgggcctttcctggaactttggacctttgcctaagccccggtgggaaccccgaagaaccagcccgtggatgatcgatgtcaggaaaaaccctttgtaggccttggccaggccctgcctctgattccagtcctgctgagaggagaggctgcctgttttgcatctgtgaaggacagcccttacctcacactgtaaatccagagtttcatctttacattaattggagtcagcaaatttgggacacagcccaaaagaactggataataaaaaagaacagtatctcaaaaanaaaaaaaaaa

SEQ ID NO: 145 - DNA, 3553 bp, Cricetulus griseus
ttctacgagcctggatcactcacaggcacagtggtggggccttgaatgtccgagggaggagaatttgctgcatgcagtagcaaagaattacaccctgctgcagacggtcccaccctttgaacggcctttcaaagaccatcaggtgtgcctggagtggaacatggactatatttggagcctctgggccaacaggatcccacagtgtcctctggaaagtgatgcagttgccctcctcagtttcccgtatgcctccagtggagaaaacactggcatcgtgaagaagctccccaagttccggaaccgagagctggaggccacccgaagccaacgagtggactaccccatggttacagtttcactgtggctttatttactccattattgcgaggccagtctctgtggaattctgtactttgttgattctaatgagatgtacggcacaccttctgtgtttcttacggaagagggtggtttgcatattcaagtgcatctccataatcagaccattagcttccatgaagatttctattacaacgacacagctggatacttcattattggagggagcaggtatgtggcaggaattgaaggcttctttggacctgtgaaatactatcgcctccgaagcctacaccctgcacagattcttaatcccttccttgagaaggaactggctgagcaaatcaagttatattatgagcggtgtgctgaggtccaagaaataatatccatgtatgctgccacagtccaggatgggggtgagagacgagaaacatgtgacgtctataactcctacctggacctcaagcacaggtatgggaggccagaggtgtgcagagccttgccctgggagaaggagctgagagacaggcaccccggcttattccagacactgctgcagatggacctgctgactgtgccatggaaccaaaatgactctgtattagaaatcggtgtcgggatcagatgcgagggcatgctatacagtctggttggaggccagggtggtgagaggctgtcgtcaatgaatcttgggtacaaacactaccagggtgttgacagctatcccctggactgggaactgtcatatgcctactacagcaacattgctacgaagacaccccttgaccagcacacactgcagggagaccaggcctatgttgaaaccattagactcaaagatgatgaaacactcaaagtccaaaccaaagaagatggagatgtctttatgtggctgaagcacgaagccacccgcggcaacgcggcagcacagcaacgattggcccagatgctgttctgggggcaacaaggggtggccaagaaccctgaggcagccatcgagtggtatgctaagggggccctggagaccgaggaccctgcactgatatatgactatgccatcgtgttattcaagggtcaaggagttaaaaagaacagacggcttgccttagagctcatgaagaaagcggcttccaagggattgcatcaggcggtcaatggcctgggatggtattaccacaaattcaggaaaaactatgctaaagcagcgaagtactggttaaaagcagaagaaatggggaatccagatgcatcctacaatcttggggtcctgtatttagatggcattttcccaggagttcctggaaggaatctgacgctggctggtgaatacttccacaaggctgcacaaggaggacacatcgaagggacgctgtggtgttctctttactatatcacgggcaacctggagaccttccctagagatccggagaaagctgttgtatgggcaaagcatgtggctgagaaaaatggatacttgggtcatgtcattcgcaaaggcctcaatgcctacctggagggattgtggcatgaagctttgctgtattacgttttagcagcagaaactggaattgaagtgtcacagacaaatttagcacacatctgcgaggagcggccagacctggctgggagatatttgggcgttgattgtgtttggcgatactataatttctccgtttttcaaatagatgccccttcatttgcatatttgaaaatgggagacctttactactatggccatcaaaaccagtcccaagatctggagctgtctgtgcagatgtatgcccaagcagccctggatggagactcccagggatttttcaacctggctctactgatagaggaaggtgctgccgtctcacaccacattctggagttcctggaaattgacccatcactccatcccagtaacgcctccattctccgggagctgtatgaaaggtgctggagcctcagtaacgaggagtcgcttagcccctgcgccctggcctggctttaccttcacctgcggcttctctggagtgctgttctgcactctgccctgatctacttccttggaaccttcttgctgtccgtagtgatcgcctggatggtgctctatttccagtgtgtctcagccagtggctcctctccagcaccagcctgggtcgtggcagaccccacctcatccgccccaagtccagctgtgcctccagctgcagatgcctccgaccatgacccacccatgatggctaacaaccctgagcctcgagggtgaacttgcacgtccagtctctccagctgagagatagtcctttcaatagctggttggggaaggctaaggccagggcattttgctgataaattaccttaaatgtcttgtgaactggatgccggttttgcacttggtgtctttttgtttatttttaaacaaggacatacccagagcagaatgtagttatcaaacaaattcaagaattaccttgaaacagggacatgtgaggaggtgaactgggccatcagactgtcattcctggtcattgttctgggacccacagtctccatggagaggcatttaaaaaagtcttagtctttgttcatcctctttgaccagagaacaggaacttctctccaaggctaatgatgcttcagtgtctgtgtttgccacatcctgctcccaaaaccccacctgacagattgctctctgagtcccaaaccgagcagttagaaggcgccttggagtgaacaaaacagcgtatacagggaaggcaatagcattgtacattggtttacattttttcccctgtgggtttttctagagtcgtagtgcttccaaatcatctgatgacattattggatatcgtttatgtttccatcacaacccatgcaataacatctagaaaatctttactatttaagtgtagttgtcttcttcatgaatcaccattagaatagactggcagcaatggaatatgcagaaaaacagctggtagctcatagtttcatcccaccccttctgctgcctgcctgtgtctgtataggtaggtgtgtgtgtgtgtgtgtgtgtgtgtaaaaggggcaaggaagaacagagtgtctgtgtactgtatgctgctacagtagtaaataaatcagtaatgcaatactgtgggttcaaactactctttgcactactttatttacagtagtaaataaaattatttttctacagttgaaaaaaaaaaaaaaaaaaaaa

SEQ ID NO: 146 - DNA, 3553 bp, Cricetulus griseus
agtcaaagttgggcactccctggcaaaacagcctgtgtatgataccacaatcagaactggcagagcacttaaagaaaagactttgcttgctgatgatactcagaaacttgacaacttgctaggagaagtcagagacaaatgggataccgtttgtggcaagtctgtggagcggcagcacaagttggaagaagccttactgttttcaggccagttcatggatgctttacaggccttagttgactggttgtacaaggtggagccacagttggctgaggaccaacctgtacatggggaccttgacctcgtcatgaacctcatggatgcccataaggttttccaaaaagaactcgggaagcgaactggcactgttcaggtcttgaagcggtcaggcagagagctgattgagaacagtagagacgacacgacttgggtaaagggacagctccaggaactgagtactcgctgggagtactgtgtgcaaactctctgtttccaagcaaagccgacttgagcaagccttaaaacaggcagaagagtttcgggacacggtccatatgctgttggagtggctttctgaagcagagcaaacacttcgctttcgaggggcgcttcctgatgacacagaatccctacagtctctcattgacactcacaaggagttcatgaagaaagtagaagaaaaacgggtggatgtgaacacagcagtggcaatgggagaagtcatcctggctgtctgccatcccgattgcatcacaaccatcaaacactggatcaccatcatccgagctcgctttgaggaggtcctgacatgggcaaagcagcaccagcagcgtctggaagcagctctgtcagaactggtggctaatgctgagctcctggaagaacttctagcctggatccagtgggctgagaccaccctaatccagcgggatcaggagcctatccctcagaatatagaccgtgttaaagctcttatcactgagcatcagtcatttatggaggagatgacacgcaaacaacctgatgtggaccgagtcaccaagacatacaagaggaagaacatagaacctacccatgctcctttcatcgagaagccccgcggtggtagcagaaagtccttgagtcaacccacacctcctcccatgccaatcctctcacaatctgaagcaaaaaacccacgaatcaaccagctctctgcccgctggcagcaagtatggctgttagcactggagcgccagcggaagctaaatgatgccttggacagactagaggagttaaaggaatttgccaactttgactttgatgtctggaggaaaaaatatatgcgttggatgaatcacaaaaaatctcgagtcatggatttcttccggcgtattgacaaggaccaggatgggaaaataacacgtcaggagtttattgatggcattttagcatccaagttccctaccaccaagttagagatgacagctgtggctgacatttttgacagagatggggatggctacattgactactatgaatttgtggctgccctacatcccaacaaggatgcctatcgaccaacaactgatgcagataaaattgaagatgaggtcacaagacaagtggctcagtgcaagtgtgcaaaaagatttcaggtggagcagattggagagaataaataccggtttggagattctcagcagttacggctggtccgtattctgcgcagcactgtgatggtccgtgttggtggaggatggatggccttggatgagtttttagtgaaaaacgatccctgccgagcacgaggcagaactaacatagaacttcgagaaaaattcatcctgccagaaggggcatcccaggggatgactccattccgatcacggggtcgaagatccaaaccatcttcccgagcagcttctcccacccgttccagctcaagtgctagtcagagtaatcacagctgtacatccatgccttcttctccagccaccccagccagcgggaccaaggttattccatcaacaggcagcaagctgaaacgaccaacaccaacttttcattctagccgaacatcccttgctggcgacaccagcaatagctcttccccagcttccacaggtgccaaaactaaccgggcagaccctaagaagtccgccagccgtcctgggagtcgggccgggagcagggccgggagtcgagccagcagccggagaggaagtgatgcctctgactttgaccttctagagacgcagtcagcttgttcagacacttctgagagcagcgctgcagggggccagggcagctccagaagagggctcaccaaaccttccaaaatcccaaccatgtctaagaagaccaccactgcctcccccaggactccgggtcccaagcgataacactgtacaagcaccccacaccactatccactttgaatcctactccatacattgggtgtatatttattctgaacgggagaagttatattgttaaaattgtaaaagaataattgtgttatgaagctgccttatttttttttcctttttgtaagttactattttcatgtgaatatttatgtagataaaatttgcctcctggtaaccctgcaatggatggggcccagagatgaaatatttgaggaaaacaaaaggtcaagacgaaaatgtgtattaaaaagaaaagcctctaaatagggtttcatgtggtgcagggttgtaaacctgctttatcttttaggattattcctaaatgcatctactttataaacttgacttgctatatcagcaagataaattatattaaaaataagaattccacaatgtttaaggaactcttctttttaaatcacagacacctcgattagcaagaactaaggagagggcacttaagattgcatttccattactgtcatgtaattttagctgaagagacagaacctcatctagatagcttttgcacatgatacagcaaagagttcattgcaatactgtcttaaaataatgtctcagtactgggtgtaaaggcacatagctgctaggattcaggggtaaaaggaaacttcagaacattggggttttaaactgattagtaactaactgtccagcctagccatcagtaactcctgtgctcaccaggccccaggccctggtgagggagactccttggtggcactgtgaattacagatttgtttatctgctctctttctttctttctatttatttgaatccctcaacctcccacaaactgaggaatgaattccataagcctattttgaaatgtggacctaagacaaatacttgctcacctttaagggagttcaccagcacacttgttctccactcccgtttgcttcagtcttttttgtgtgtaataaagtcagctgaccaattgaccacaaaggggggctgtctggggctcctgttttttagctgctgttcctcgtcagctccgaccatgttgctgtgtgattatctcaattggttttaattgaggcagaaattgaagctctaccaatgaactgtttaaaaacaagacacacttttgtattaaaattgcttgcagtaacaa

SEQ ID NO: 147 - DNA, 3550 bp, Cricetulus griseus
  modified_base (3147)..(3147): a, c, t, g, unknown or other
ctctcaagttgatgctatcacagctgggacagcttcagtagtcaacctcacagctggtgacccagctgacactgactacacagccgtgggctgtgcaatcactacgatctcttccaacctgaccgaaatgtccaagggtgtaaagctgctggcagctctcatggacgatgatgtgggcagtggggaggaccttctcagagctgccaggaccctcgctggggccgtgtctgatttgctgaaggccgtgcagcctacttctggagagcctcgacagactgttttgactgctgctgggagcatcggccaagccagtggtgatctcctgagacagattggagagaacgagacagatgagcgattccaaggtggatgtggccttgaagagcatcggggagtccagcaagaagctgcttgtagactcgctacctccgagcacaaagcctttccaggaagcccagagtgaactgaaccaagctgctgctgatctgaaccagtctgctggggaagtcgtccatgccacgagaggccagagtggagagctggcagccgcttctggaaagttcagtgatgactttgatgaattcctggatgctggcattgagatggctggccaagcgcagacaaaagaagacaagatgcaggtgatagggaaccttaagaatatctctatggcgtccagcaagctgttgttagccgccaagtctctctctgtagatcctggagctcccaacgacaaaaatcttctagctgcagctgcaagagctgtgacagagagcatcaatcagctcatcatgttgtcgtattgccaagcacacctcagctttatgcaacgcctgccgtatcgcctcatccaagacagccaaccctgttgccaagaggcactttgtccagtcagccaaggaggttgccaacagcactgccaatctggtgaagaccatcaaggccctggatggggatttctctgaagacaaccgcaataagtgtcgtattgctaccacacccctgatcgaagctgtggagaacctgacagcatttgcatcaaaccctgagtttgtcagcattccagatccgcccacctggtctgtgttggctggacattcccacaccgtgtccgactccattaagagtctcatcacatctatcagggacaaagcccctgggcagagggaatgtgactactccatcgatggcatcaaccggtgcatcagggacattgagcaggcctccctggcagcagtcagccagagcctggccaccagggatgacatctctgtggaggcagagaatggcgagacctttgcagatcacagggagaacatcctgaagacggccaaggctttggtggaagacacaaaactgctcgtgtcgggggctgcatctactccagacaagctggcccaggcagctcagtcttctgcagctaccattacccagcttgccgaggtggtcaagctgggagctgccagcctgggctccaatgaccctgaaacccaggtggttctgataaatgccatcaaagacgtggccaaggccctttctgatctcattggtgctaccaagggagctgccagcaagccggctgatcgacccctccatgtaccagctcaaaggagctgccaaggtgatggtgaccaatgtcacctctcttcttaagactgtgaaggcagtggaagatgaagccacccggggcacaagggcactggaggccaccatcgagtacataaagcaagaactcacggtgttccagtcaaaagacatacctgagaagacatcatcacccgaagaatcaataagaatgacgaaaggcatcaccatggcaacagccaaagccgtagcagctggcaattcatgtagacaggaggatgtgatcgcaactgccaatctgagcaggaaggctgtctcagatatgttgacagcttgcaagcaagcatccttctaccctgatgcagtgaagaggtccatgaaaggaacagagtgggtggatccagaagacccaaccgtcattgcagaaacagagttattgggagctgcggcatccattgaagccgctgccaagaagttagagcaactgaagccgagagcaaaaccaaagcaagcagatgagaccctggattttgaagaacagatcttagaagccgctaaatccattgctgctgccacaagtgccctggtcaaatcagcctcagcagcccagagagagctggtggcccaaaggtgaaggccgaccaggattcagaggccatgaagcggctacaggcagcaggaaatgctgtgaaaagagcctcagacaatcttgtccgtgcagcccagaaggcagcattcggcaaagctgacgatgatgatgtcgtcgtaaaaacaaagtttgtgggaggcattgctcagatcattgcagcccaggaagaaatgctaaagaagaacgagagctggaggaagccaggaagaagctggcccagatccgccagcagcagtataaattcctacccaccgagctgagggaagatgagggctaatacccgcccacgatggtgagccccaggaggtggtgccgcccccccccccaagaacctggacagagcagtgttcccaagagccaggcacttcctggaaactgctggccctccacctggagactgtctttgtcacttctcagtcctgttaccattggctgcatgatcatgatctcacacggtacagtgtcctacccacagctcctccagttccctcgtgcctcgtctcaggagagaggggcgcacatttcatggactgttaccaaaaagagagaagtcagtattatgtcgttctcagacacaccttagtcttggtcctccaagactgctccaaggcttctgtgacatcacactaggcaaaaaaaaaaaacaacaacaacggctcacaggaatcatcagtatcgtggacacagatattctctctctagagaggacggaagctggagttggacgctgttagtaaagccagaaaacactcccaggtggactctggggcctgcagtcacagaggtccttgtcagtttggagcactgattcgcccacaaggggagaaggaccccagtcccgtttgcacgcttttcttgcctcagtgtgtaagctccctgtacaatctacacccatcttgtattcttgtggcccngaaaaatgaagttatttatttttttttttctctccgcaatccaaagggcagagttgtggaaagtggtcagggttaggtgggcaggggccagaataaaatcctgggctccttactcaggtttctctgttatagccttggctgtcctggcacttgctctgtagaccaggctggcctcgaactcagagatcccccttgcctctgtctcccaagcgctgggattaaagcgtgtgtcccttgcttgcccatgctgtatccacatatgtgaatgccctcgtggctagtctgggtctctcctcatttcataaataatcacataaatttaattttatctaatcacattaaatttatttttttttattcatcaagaaaattaaaacttttaaaaggaaaaaaaaaaaaaaaa

SEQ ID NO: 148 - DNA, 3550 bp, Cricetulus griseus
  modified_base (399)..(399): a, c, t, g, unknown or other
tggaaaccaccagttctttcagccatgaaggcagaaacagtgtcccctacccaggagaatgcccccgagtccagcggtgtcttcggtaatctgtggagtagccggaagctgatggttgtgggggtcttgctaggctcgctacttgtcatccaccttctggtgaacatgtggcttctgatacttctgtgtgcatcgttggtggtgctgggaggatggctcggctccaatgccattgcaggggcttcgggtcaattgcacctggaacgattcatcacagtcaacgcctgtcctccatgcccccgaagcagaaaggcagctggaacgggagattaactgcaccatccagatgataatcccgtgaccttttgtgttatcctggtatcgttcagtgagccaggngccagcattcgaggcagagatgactggatccacattatacttgtgagtatcttttccaagtacagacatgacacagcccaaggaactaaacccccatgctcagccaatgtcctagagcagtcctcagtgcccacatctctgccattgattgttgaagtagagagtctgccaataggaaaagtgcctccttctccagtctcggccccagtacacataacctgcagtgagccagccccctccccagaggttgaagaaggccacgaagcagtagagggagatttgactgagatgcttgaagaaaggaaagtaggaaataacgcgccccattttctacagccagatattcgaggccccttattcttatgtgaagactctgagctggagtcaccgctgtcggaactgggcaaagaaaccatcatgctcatgacccctggcaacttcctctctgacaggattcaggatgctctttgtgccctagaggattcccggactctggagcctaaggatggtgaggggtctgaaggtatggaaggagcagaagctgaggaagctccaggaacagacacagacaccggcctgctggtctccatgcttaactgcccagagatccagattgacacagcagacaaggatgtagaacaagaacaagtcacccctcttacagctttgccagaggagccagaaaattcctgccccccacgaccttcatgcttagaaaaggatctcaccagtggtgtgagctcccttgatcctactctgccaccagttccactttcttcatctccacctggtcctctcagctcagccaccttcagctttgagcccctgagtagtccagatggcccagttgtcatccagaaccttcgaattactggcaccattactgcccgagagcacagtggtactggattccacccatacacgctgtacactgtgaagtatgagacagcccttaatgctgagaacagcagcagcctacagcagctggcctaccacactgtgaaccgccgctaccgggagttcttgaatcttcagactcgcctggaggagaaaccagatctacgaaagtttatcaaaaaaaaaagctctttccagatcttccatttggaaacatggatagtgacagagtagaagcccggaagagcctcctggagtcattcctgaagcaactctgtgccattcctgaaattgccaacagtgaggaggtgcaggagttccttgcactgaatacagatgctcggattgcctttgtcaaaaagccgttcatggtttctagaatagacaagatggtggtgagtgctattgtggataccttgaagacagcatttcctcgctctgaaccccagacgcccccacagaggagctgagtgaagctgagaatgaaagcaagccccagacagaaggcaagaaggctggcaagtccagactgaggttttcatccaagtaaaatcgactcctgcactgagtatagcagaggcacaggatagggttctctactctctccaggaaggcaattcggagtcagagatcctgtccatgtttgggatggaatcgttcattgaaaagcagacaaagttactggaaatgcagccagcagaagtcccagataaagatccccaacaagtccccaaagaatgtgtggatagttgtttgctggatacagatatagcccaagagctcaaaaacagtgacccaggaacagaaacagagttagccgacacggccttggatctgatcctgctgctgttaatggagcagtggacatggctgtgtactgaaagcatgcagaagttcctccgccttatttttggaactctagttcaaaggtggctagaagtacaggtggctaatctaacatgtccccaacgctgggtgcagtacctccggcttcttcgggaatctatctggcctggtggagtgttgcctaagtatccacggcctggaaggactcaggcacagaaagcagctactgagaagcaggctttgcagagcttgatgagtatcctgccagaatttttagtagagatcctgggggtgaacaagtgccagctgagctggagtctagtcttggaatcattccagcaacccctcatcaacagacatttgatttactgtcttggagacatcatcctggagttcttggaccttggtgcctctgttgaagagcctgccccagccacctctgcctcagattccccaagcagcctcaagagaatggctgtctccacctagctaaaagagagcttttcaaccacccagagaccgattaaaatgcctgtgccctctggagccaagctaccttagctggcctccatctcagtggctcagttctcctgtcaggtctcccttagtaacaagtgatggggatatatagcccaattgcatgcgtatctgtttccatagtcttatagcatgtggatttctactggtgagaaggtcttgtttctttgggaaaggaagctgtgaagcagaggtttctcctttgccttcttctcgccatcatagtttgccaacatcatggctctgtgcatgcatgcacctaatccacaaatgcagaagcattgggtaatacaggagaaaaactatagccagatttcctgggaggagaaacagcctcctgagctctcttttcccacgtggaaactgaacattcattcaggagcacttcctcaccctgcctagttccacagcaattccagaagagggaaggaaagtgtatttcaagggacttcctactttttagctattttcttacacagcagccttctagaggatgtcaggaatgctgcttcctctgctggctagactttttctgtcccgaaggcttcaaagcacactgttaaacttctggtaaatccaccccacccttcacaccctttcctgcaagggattacacctcagagtttcttaactctcctcccagctcctacccaagcacatgagttttggatttgtaaatttccctttgtcttaacagaatcacatgacaagttagatacatggcctcagtgtttccaacgagaagggaaagtacttgttccatggctgagagtatacaaagaatagaagtagggatgagtgggaatcttttcacaagactttggcaagaataagtatgtgatgagcacacaattaaagttgttaatagaaa

SEQ ID NO: 149 - DNA, 3549 bp, Cricetulus griseus
gctcatgatcttcactaaatgggatctgtttggtaattgctatagactgttgaagactggaattgaacatggagctatgccagaacagatagtcgttcaggcactgcagtgttcccattactcgattctttggcagctggtgaaaattacagatggttctccttccaaagaggatttgttggtattgaggaaaacagtgaaatcttttttggctgtttgccaacagtgcctatctaatgttaatactccagttaaggaacaggctttcatgctgctctgtgatcttctaatgatttttagccaccagttaatgacaggtggcagagagggccttcagcctttggtgtttaatccagacactggactccagtctgaactcctcagttttgtgatggatcatgttttcattgatcaagatgaggaaaaccaaagcatggagggtgatgaagaagatgaagctaataaaattgaagccttacataaaagaaggaacctacttgctgccttcagcaaacttatcatttatgatattgttgacatgcatgcagctgcagacatctttaaacactacatgaagtattacaatgactatggtgatatcattaaagaaaccctgagtaagaccaggcagattgataaaattcagtgtgctaagactctcattctcagtttgcagcagttattcaatgaacttgttcaagaacaaggtcctaatctggataggacatctgcccacgtcagtggtattaaagaactggcacgtcgttttgcccttacttttggattggatcagatcaagacccgagaagcagttgccacccttcacaaggatggaatagagtttgccttcaaataccagaatcagaaaggacaagaatatccacctcctaatctggcttttcttgaagtactaagtgaattttcttctaaacttcttcgacaggacaagaagactgtccattcgtatctagagaaattcctcactgagcagatgatggaaaggagggaggatgtatggcttccactcatctcctatagaaattcattagtcactgggggtgaagatgataggatgtctgtgaacagtggtagtagcagcagcaagacttcctcagtaaggagtaagaaaggaagacccccactgcacagaaaacgagtagaagatgaaagtttggataacacatggctaaataggactgacaccatgattcagactcctggacccctgccaaccccacagctcacctccactgtgctcagagagaacagccgtcccatgggagaacagatccaggagcctgagtcagaacatggttcggaaccagactttttacacaatccccagatgcagatctcttggttaggccagccgaagttagaagacttgaatcggaaggacagaacaggaatgaactacatgaaagtgagagctggagtaaggcacgctgttcggggtctaatggaggaagacgctgagcccatctttgaagatgtaatgatgtcatctcggagccaattagaagatatgaatgaagaatttgaagacaccatggttattgatttgcccccatcaagaaatcgacgagaaagagctgagctgaggccagacttctttgattctgcagctatcatagaagatgattcaggatttggaatgcctatgttctgaagtctgaagaaaatttacaaatctggaactctattatttagagctagaggcctatatactgtgatagcttgtatgggggaagaaacacttttgatgtgatctgatttgttttgtaatcaaatgattgaaggttggtcccttttgcagtgacagagcagcatgtcagttacccacggaaatgttggtgaacatcacctcggaagactgaccaaaaaaaatcatttgtactctaatgtcggacttagtacagatgtgtgtgtgcttttctgaaaggaggaagatattttaaatttttaaaacagctgtcaaaataaacactgttatacacctgttttatgaaaaatcagcattgagtaaaaaatatttttaactttattttcctgttgtacaatttaaaaaccgttttaacattttgcctttttatgttttaaaagctaaccatttttattaaactatgagtaagcagctcgttctcatcgccgaagagtgtttttggagctcactggatttggttgaccttataaaacagaaacactgaaggaacagagaatggacaagctaaaatagagttctaacatcgtgcgtctctgccaaaaaccacacaccctctgtggacggatgtgaattcccagattttatatactcttgaataaaaaggtttattttatttataagtggacataaaaataaatgtccatgcagccatttttccaacagatgctgtacaccgttcattttatatagaatagggagactcgaatacagtgcatttttctattggtctttattctgtgcatttttagcaacttctaccagcaaataaagtattctcagtaaaacaaaaatggttctcaagtcatcggtcttgctgtttctaactacttgtttcatgccctgccaaagtcaagttacacagacttccgttttcatgaaatgtttccttgccattcagaagtacttttaagacatagaagtctgtgcttagagggtgacgttcctaagcttaccttgaaatacagctacatttcagtgttaagtgtgcatagtaagaaaaattcttttggaggaagaaattctgaatcttcaggacagtcttcagtggtttagagttacatctgcttacttttatgacttgctattgtttttaaaagcccacttaactttttcctgattttaatgtaggcctccaaatttcccagccaatctattcacagctgtttctggggtggtttttaaatagctgcaacagaattgagaggctttccctttttaccaaaaatgaagagcttttttttaaaagtatgtgaactgattatcttttgtgtgggaaagcaaaacatgattttattcatccttttagtagacaagatttttctcaacatttgtacagttcagagaaaaaaatacacaaaaaccgtggtcaccaaaaatgttttacctactaactcagcaagtcctaggctccatttaagagatctgggaccttgctctctcctagaaatgtgggctcactggaactcaagagggagggatgaatggactgtccacctcagccctgtctggctgtggttctgtccagggacccatccctgaggggccctggaataagcacagattaatcctttgcttgacagtctccagtgaacacatgctgatttagaattacaaaccaccatgcaacagcaaagaaggcttaatctctactccaatgggtttccaagttcagtttgaagtcaatcaaatttttgtattttcagtgtctccttgattgattttgctagtaattctgtaaattgtacatttgcaatatgaagtttttttttccttttgtacaatttgaaactgatgcttcacctttcctttaataaactattcaaaat

SEQ ID NO: 150 - DNA, 3549 bp, Cricetulus griseus
  modified_base (3545)..(3545): a, c, t, g, unknown or other
agatgatgtgagacatgtggatttgtgatatgaattcagttgaaaagcgactttggggatatgaccgtgatttctgatgaaaccagattggaataattttcatgatatttgtatatttatatatgtatattttaaaattttacatttgacttaaagtgccatgagaaaatttgcatattgcaaggtggttctcgccacctccttggtttgggtactcttggatatgttcctgctgctttacttcagtgagtgcaacaagtgtgatgagaagaaggagagaggacttcctgctggggatgttccagagccagtgcagaagcctcatgaaggtcctggagaaatggggaaaccagttgtcattcctaaagaggatcaagaaaagatgaaagagatgtttaaaatcaatcagtttaatttaatggcaagtgagatgattgcactcaacagatctttaccagatgtgagattagaggggtagtaaaacaaaggtgtatccagataaccttcctacaacaagcgtggtgattgttttccacaatgaagcatggagcacacttcttcgaacagtccatagtgtcattaatcgctcaccaagacacatgatagaagagattgttcttgtagatgatgccagtgaaagagactttttgaaaagacctctagagagttatgtgaaaaactcaaggtgccagttcacgtaattcgaatggaacaacgttctgggttgatcagagctagattaaaaggagctgctgtgtccaaaggccaagtgatcaccttcttggatgcacattgtgagtgtacggcagggtggttggagcctctcttagccaggatcaaacatgacaggagaacagtggtgtgtcctatcattgatgtgatcagcgatgatactttcgagtacatggcaggctctgacatgacctatggtggattcaactggaagctcaattttcgttggtaccctgttccccaaagagaaatggacagaaggaaaggtgaccggactcttcctgtgagaacacctacaatggccggcggccttttttcaatagacagagattactttcaggaaattggaacatatgatgctggcatggatatttggggaggagaaaacctagaaatttcctttaggatttggcagtgtggaggaactttggaaattgtgacttgttcccatgttggtcatgtgtttcggaaagctacaccttacacgtttccaggagggacaggacagattatcaataaaaataacagacggcttgcagaagtatggatggatgaattcaagaatttcttctatataatttctccaggtgttacaaaggtagattatggagacatatcatcaagacttggtctgagacataaactacaatgcaaacctttctcttggtacctagaaaatatttaccctgattctcaaattccacgtcactatttctcattgggagagatacgaaacgtggaaacaaatcaatgtctagataacatggctagaaaagagaacgaaaaggttggaattttcaattgtcatggtatgggaggtaatcaggttttctcctatactgccaacaaagaaattagaacagatgacctttgtttggacgtttccaaacttaatggcccagttaccatgctcaaatgccaccatctaaaaggcaaccagctctgggagtatgacccagtgaaattaaccctgcagcatgtgaacagtaaccagtgcctggataaagccacagaagaggacagccaagtgcccagcattagagactgcactggaagcaggtcccagcagtggcttcttcgaaatgtcacccttccagaaatattctgagaccaaatttacaacaacaaaaaaagaaagaaggattgactgggctacctcagcatacatttctgccacattcttaagtagcaaaaaaggaaaagtgttttcctcttctgtgggatgtaaggtttatcagccattaagactcctctagcttttcacttgctgtgaaccagccttcctgtcccaggatatgagactgcaaagtagtcagactgtggcacactgatgtttacaagactggaagagtcctcatcgagaacagtggcaaatagccttcagatccccaacaggcacagaatgtgctctctggatagatgccccttccacagcttccgtgcacatcagccgtttctgctgaatgtgcctcctggagaagagatctcctgattagaaccagtagctgcaatattaaatattgatagaaaagtaagtggaaaagaactggaaccaggttcagcatcatgaaaacatttttacaacaataaaaattatatcaaacagggtttaaaggaaattaaaacagaattatgagaagtacaatttgttatagtatcagatttctatatagattttatacctcagtggggaaaaattgattctagtgacattcatttgttttcatctgtgatagtcatggatgcttttattttccttggggtgctgaaaaatgagatggggtcgagttctgaacatagttttgatttcttttttacaatatttttatttggtttttgagctgttggaattgtaagttttaattgccttcctttaaaacaaaagagtggttgtttatttgagtatttggagatcatatatctgatggacttttttgaaaacctttttcactccacacatagatgtgcttcactgtcaggtgcacatttagattagggttgagttgtgatgttggtttgctgacttttttaaaaaataaaaattgactgaaaatatttaattggcattttttaatgagttagccaaagaagtgcagctatgagtccatataacagtcctgcatttcgtccctaactccattttgttaactgatttctttactctggtttttagtgacagaatcaagtattaaagttgatgttaattaaagtttacttcttgatctcacagaaatctcattgtgacatttttccatagcaacccactgaccaaaatgtatacactctgcttcctgtttgtcaggttatatttaatggtattctttgctttgactatcaaagactcactgcaggaagtgctatttctttgcttaagaatgttcctggaaggcatatcaccagtgacactcagcattgaacctgtggatgcttggggtaaggttgtcctccaggatgcagagacttcccagaaaatctgaaacaagaagccagtgttggctggaatcgtttttcttctctgtgagctatgttaattctatctccagtgggcccaatgtttgaaaagtcagatgtctaataaattattttcatgctcagaattacagatttttgtaccctagcatagcatgatcttattccttattgtaaaaatttaacagcattgtgatttaaaattttgtctcacttttttaagtgggggtgtgagtgacttaactcatgggtacttttagaacctggtagatattctcattgcctttatttttctaattaaaatattcctaaatactttgaaaaaaaaaaaaaaaaaaaaaaanaaaa

SEQ ID NO: 151 - DNA, 3548 bp, Cricetulus griseus
aattcgtaacatcagtttcatggtgaaacgcataagaatcaatacaacctctgatgaaaaggacccttacaaatccttttcgtttcccaaatattggtgtggagaagtttctggagttgaattctgaacagaatcatgatgactactgcttggcctatgtcttcacagaccgggattttgatgatggagttcttggtctggcatgggtcggagcaccctcaggaagctctggaggaatatgtgagaaaagcaagttgtattcagatggcaagaagaagtctttgaatactggcattattactgttcagaactatggctctcatgtgcctcccaaagtctctcatattacttttgctcatgaagttggacataactttggatctccacatgattctggaacagagtgcacaccaggagagtctaagaacttaggacaaaaagaaaatggcaattacatcatgtatgcaagagcaacgtctggggacaaacttaacaacaacaaattctggccagcctatatgtggaaagtgggagtggtggaggcaaggtgaggaatgtgactgtggctacagtgaccagtgtaagatgagtgctgctttgatgcaaaccagccagagggagaaatgcaagctgaagcctgggaagcagtgcagtccaagtcaaggaccctgctgtacagcgcagtgtgcattcaagtcaaaatctgagaagtgtcgggatgattctgactgtgcaaaggaagggatttgcaatggcttcacagctctctgtccagcatctgatcccaagcccaactttacagattgtaacaggcatacacaagtgtgcattaacgggcaatgtgcaggttctatctgtgagaagtatgacttggaggagtgcacctgtgctagctctgatggcaaagatgataaggagttatgccatgtttgctgcatgaagaaaatggccccttcaacttgtgccagtacagggtcttcgcagtggaacaagcagtttggtggtcggactatcactctgcagccgggctctccatgtaatgacttcagaggctactgtgatgttttcatgcggtgcagattagtagatgctgatggtcctctagctaggctgaaaaaagcaatttttagtccgcaactctatgaaaacattgctgagtggattgttgctaactggtgggcagtactgcttatgggaattgccctgatcatgttaatggctggatttatcaagatttgcagtgttcacactccaagtagtaatccaaagttgcctcctcctaaaccatttccaggcactttaaagaggaggagaccgccgcaacctattcagcagcccccgcgtcagaggccccgggagagttatcaaatgggacacatgcgacgctaactgcagcttttgccttggttcttcctagtgcctacagtgggaaaacttcactccaaagagaaacctgttaagtcatcatctccagacgaaaccctcacagttcatagttgaagaaaaaatggcaagagatcatgtcctcagaccaggtggaattacttaaaatttaaagcctgaaaattccaattttggcgggggtggatggaaaaggaacccaattttcttatggacagatatttttaacataatggcacaaagtcttagaatattattatgtgccccatgttccctgttcttcgtttctgcattttcttcacttgcagacagacttggctctcgatgaacttttatcacaaattgaaatatatttttttcaactgccagtcaaggctgagaggctcaaccacctcaacattggatacatcacttgccaatgtacataccttgttatatgcagacatgtatttcttacgtacactgtacttctctgtgcaattgtaaacagaaattgcaatatggatgtttctttgtattataaatttttcccgctcttaatgaaaaattactgtttaattgacatactcaggataacagagaatggtggtgttcagtggtccaggattctgtaatgcttcacacaggcagttttgaaatgagaatcattttcccttttcttatgatggagttggttcttccatacatctttttccttgtcacatggctgctgtaagcaggagaggctgcgctgaagaatgcagtcgtttggggtgcaaactggacagcaacagcatttggcttcagagtcagttctttatgtaaatgtctgatttctgcttagtattttacacttcctaattcaattccctttttaaattgctaggtgaaattttattcatcccttggtaggaattatgtcagaaatgatttgtagcctgcttattcctttgtgtattccatatgcttaaagtctgttaattctgtttttatctgatatggaaaagaaaacccgtgtcttcattgaaatatttggacaggtcttcagtacaccatcactgatcattggtaaccactagagatgagtaatttgctccgcaggtagttgaaattgtagataggccttctgacattgtttttccaacccttaagccattttaacaacaatgaaggtagatagcacagtgtcccattacaaacttcttttttaagctgatataaataattggcatttttaaagaaagagaaagcaaaagcatgtaatgtattaacaggcttatcgctatgcagaaaatggagggggcattaaaaaaaatgtaagcttgtgacatattcattgcttctgttttccagctacatcacttaaattagaagtcaacagcagtgattttcctggctttacataggaggcaaatttagggaaggttgacaatattactgtgtttggctttctttttttttttccttttttcttaagagtctaaggtttacacaatcactcataatgtgacgtgagccagcaaggccaaaaacgctagagaaacaatgggatctctccttgtaaacttgtacagtacgtggtgacttttttcaaaacagctttttgtacatgatttagagacaaattttgtacatgaaaccccagatagactataaataattaattctaacccaacaagtaggtagctgtgtatgacactgctttaaatcattcaaatgcctttgtttttggactgtgcaaaggttggaagtgggtttgcatttctaaaatggtaacttttattctgcaagagttcttagtaacttcttgagtgtggtagactttggaacatgtacattttttgcttgtaatgttatcctgtggtagggttttgccctgttttattttgagtctaagttaaatgttttctgaagagatacatgcactgaactgtttccactgcaaatcaagatgtggtaaaaatgaaaggatcaggaccagtgagatctaatactactgtcagtttaatgtccactgtgttttatacagtatctttttttttgttgttgttcactttggaaatttttactaaaacctgcaaaaaatattgtgcaaagatgtaaggttttttgaaacttgaaatgcattaataaatagacttgatgaaatcaaaaaaaaaaaaaaaaaa

SEQ ID NO: 152 - DNA, 3539 bp, Cricetulus griseus
tcattgataaggatgtgaaaaaattaatgggagggtctgggactgaggttgtactggagaagcagagatccaccctctaaccctgtgccaagcaaagtgacaagcagcatcaccatctatccctctgagagcagtggccctagagctgtccaaggggaggccccaagggagaggcacacctccaccagcaacatccaggtggggcacccagagctcacatcagttagcaaccatgtcaactccccccttgagctctctattcataaacatgacatcaccttgcagctcacagaagctgaaagaatgggagatgggtctccaaagaatagaccagagacagtggtctctcggagcagcattctaatcaagccatctgattctgtggagtaggaataggtcatgcccccaagcggagacagtcaggtggaaaagccataatgcctcttcagataccagacacgtcactgtgcggaatgcctggaagagtaagcgagactttaaatgttcagaagacgtcccaactcgagtaggtaggcacatggaatctactaatgcctacacacagaggtcttccacagacttcttagagcttgaacagcccaggtccctcccttctgaacagggcactcgaaaggtaggagatgcaggggatgctcctgagctctcctctagaaggacccaaagtagcctcactgcatcagaggtgatcacccggaggaatcggatggagatgccatcactgccaccacttggaaccactcagcaagtttggaggaaggggaagacggcacatctgttaccagcaggcgaatgcacaacaccctggagcattctgaactgcctgggaagcagggattgccagaacctggaatctgggctgaggagcggctacagccagccaggccttatgctgaggaagactgagccagctaggtgaagtctgctgttttccctcctcctgcttctcagctcctcccctttcctggcctgtgaaggatccaaggccagttaatcaggctagacacaaggccttggctggagactggagagccagactatggctcaggtaatttttgccagttgcccagtatgatcagagactacaaaccagtcactcaggccagccttccctgatgcatgagtagtccttctcctatgtctcccctaagtaattatgggaccacccttaagttgaagcttccctgactcagcttttggctaaccagtttcttggaggcagagcatgataccaaaacggaatgataccatcctccaactccagcactcggctcaccttccaaaggcatcagaaacagagctcatgcatctcctttcctgggcaccaacattgctgctggtatcacctctattctccctaagacctggaaactccagccgacttcatcattctcttcttggggaaaattgctagactaagctggctgacccaacataccctgccttctaggaagtgcccagcaaataggaaagcaaataataagtgtattcctttagtcactccacaagcaatagctccatgaaaggcatggcctgactgctctcttccattcctcctccatcctgtggaggcctcgcactttaccatgctgactgctgattaaggcctgtcttcagtctgtggtgaaggttttagattgggtggtctcaggtctatgtggcacaggtgtttcccagtgccatgtttcctggctttcaagctaggtgctttctataacacaagtctgatagattcctgtttccgtgcctcttcctgtgaatttcctcgagacagggaagactcaggacatcctcaggaggactgagtagtctcctccacccttactcagcacacacacactggcactcatctgcccttgtctacatcagactcagccatcctgccagggtgtgaggagatctactgtgggttttttgttgttgtttatttttttttaatcccctagggacaggaacaacttgctagcacttatgtttcaatggagttttgctaacctgagggcattgccatgtgtcttgcctccacatcccaacttggtaactagggtagtgttttcaagatctgttcctgctgctgcttttgggttgctggctagatactctttcattcaaggctgcaacctctcacttgcagtccccctgccactctcctgtactagttggcagccctgagagttcaaaggaaacagacctctgtggtggtccactgaagagtataggaaattaggtctgtggctcttctctgctgatagaaacaggggcaccaagccctgtttcaaaagatctcgccaataatttttgtctttgggtgttgagccctggattctggtgctgtagctcctggtgccaaagtctggatctttccacattttagcagtaccgacacctgctgctattcgaaatgttccgtggaaaagggacagcgatgggctgcctttctgaaaatctgagtgcaatagcatttgattgtaacagttatttcaggatattatttctttaatctgcacacttttgtaaaccgttgtaaagtagatatatttttaaattagctggctaaattgagccagcaggtgtgtatctgagttctaagtcgaggaacctagttctagaacaacttggctggaggatgaagagctagttggctaaatgccaggagctggtatccttcacctgctgtgttacctgccacttgggtactgaaactgtcagaaaaggctgcagggtggcaggcaggaagctgtgccaggtctgtttctctgtgacagtgaacagttcagagtatgcattaaagggatttgtgtggggtcaaggctacaggcaagcttgcacaccagtcttccctctcatgcagaaggggccgatgcctagagtagtggacttcttgtcctgggcagtgttagttcatagatttagtgggtcagtaaaagagcagggatgcagaggctggcccctggccacctctgttggcatgggtttcttctctgacaaagactgctttgtaagagctgctttttagggattaccttttgaacaccctgaatggggaacagggttctcctcaacacctcaaccaaggtcataggaaagaggtcctattttcctgctgcttcacagctcagaacatgtattgaatggaatgtatttttaagagaataaagtctatttttttgtattttaaagattgggagggctaggaagatagcccttaaatcaacttacgcatgataggccctttgttggggcctcaactctgttggtccacatccacttgcctaggcaggtagctctggcttcacccctgccccttggagtctaggtgcagccgcttctacattcctgctccaagtacgggaccagaaaggccagaacctgcctgtggaaagcagggcacagccacgggcaggggctcagggctccttgggtgcatgtgtgtagttgaagctgcctgtctgcatgcgtccttaggctgtaatgctctctgttggctctgcagcacaatgtaaccaataaagctcccttgt

SEQ ID NO: 153 - DNA, 3518 bp, Cricetulus griseus
  modified_base (682)..(682): a, c, t, g, unknown or other
agcattatacagagacagccttggatgaattaaactagctcaaatagtgttcgagaaagtgaccccagtgaccaaacaaagacatggtagtccagctaattgatgatttcaagatttcaggcatgaatgggatacatgtctgcatggtttttgaagtacttggccaccatctcctcaaatggatcatcaaatccaactaccaaggtctcccagtacgttgtgtgaagagtatcattcgacaggtccttcaagggttagattatctacacagtaaatgcaagataattcacactgacataaagccggaaaacatcttgatgtgtgtagatgatgcatacgtgcgaagaatggcagccgaggccactgagtggcagaaagcaggtgctcctcctccttctgggtctgcagtgagtacagctccacagcaaaaacctataaggaaaaatatctaaaaaaaaaaagaaaaagctgaaaaagaaacagaagaggcaggctgagttgctggagaaacgcctgcaggagatcgaggaattggagcgagaagctgaaaggaaaaccatagaggaaagtgttaccactgccgagccatccaatgagcaagatgatgggtgtcacctggaggggaaactaaaggaagcagaattcgaggaggcagctgaaggagagatagacaaaggataanggtgaagctagaagacaggaagaaaagaagaccacttactgagcaagaggaaagtagcccatcccatgacagaagcaggacagtttcagcctctagtactggagatttgccaaaaacaaaaacccgggcagctgacctgttggtgaaccctctggatccacagaatgcagataaaattagagtaaaaattgctgatctgggaaatgcttgttgggtgcataaacattttacagaggacatccagactcggcagtataggtccatagaggttctgatcggagctggctacagcacacctgcagacatctggagtacagcttgcatggcatttgagctggcaacaggagactatttgttcgaaccgcattctggggaagactattccagagatgaagaccacatagcccacatcatagagctgctaggcagtatcccaaggcactttgccctgtctggaaaatattctcgggaattcttcaatcgcagaggagaacttcggcacatcaccaagctgaagccctggagcctctttgatgtacttgtggaaaagtatggctggccccaagaagacgctgcacagtttacagatttcctgatcccgatgttagagatggttccagaaaaacgagcttcagctggcgaatgccttcgacatccttggttgaattcttagcagattctacaaaatatagcattctgagctagcaaatgtttccccagtacatttggacctaaacagtgactctcattctttaacaggatcacaagtgagctggctctaccctcagacctttgttttgctttgaggtactgtttgacactttgcttcctgggcaccatgatcctggggaagggcagtctctgtcttcagctaagtagtttactggccattttcttctggaaacaataacatgtccctaagcattgtttcttgtgttgtgtgacattcaaatgtcattttttgaacgaaaaatactttccctttgtgtgttggcaggttttgtaactatttatgaagacatattttagctgagtattatataatttacaatcttaagaaattatcagttggaaccaagaaagagtgaggaaatatacaatattttcttctggcaaagggaaatcattctgtattataatagtgtatgtaactgttaatttacataaatagggaacaagggttcacattcagcaaagctacccctcctgagtgcttcttagcatacattgcatgttgcagagttccactgcttcaagaagtcacacaaacttttcattccattaacagtcctagtggttctggtctaggtgccacagcactataagttaaatatgtagattaaattggacaagagaaatatgttcagtgtgtggaatgaaaataatatatttttggaaaagcatgatggtgtttgtctaaaacacaaggtgtggcttatacagtttgcagcacagtgaacagaacactcctcccagcttacaggtgacagtgatcatgttccttccataagcagctttacttgctacagcagtttacttgccttttcgttgttttttcatgaatgagaaaattttccctttgcaggccgcatacagttttagtttatgcattttcttaaaataaattgtagaatccaggatacaaaccattagtaggcaatacaactttagaatataacatagagaggtatattagcctcttagaagtcagtggattgaatgtcctttttattaacatttatccatatgcctttgcaataattagattgtagaaaagctaacaagtgttgtaacaataatcctttgtttgggtgcttgcacttgtcttaaaaattaaagtgtttggggtttttttcctagacattgcctttgtcattgccctgtatttgaagtgacagagtcaacatacatttgctctcagtagtgtcaccaaagctaaaggagatacagatgaagtcacagaacatatattaaatattctaaagtgtgcaaattaattcttcctgtgttttaggtaaattacttcttttcaaactcgtaaactgcagtatgtaactgcttagtatgtaatgtataaatgatctggattaattttgtaattctgtatgatgttagattgttatcgataagtataagtcacataggcttggctatttaattacctgtgactcatgcctatcaagaaaaggcaaatgataggaaggactgtgggaaccacccagactcactgctggtagcctgcctagcaattgaggtagtagttactaaagaaaatggaaggttctttccttacaaattatatttgaaaatcgttaacttttgtaaaatcattaagcagacctcaatctcagaagttgtacagaacaatttagtaaaactgacataattgtgatttattaacaggaattaaaatgtccaaccagtgcttcaatgtgacagcatatttgaaataaaaaggaaaggtctgtacttactgaactactttcacagagatcacacttttgcaaaagacttgtcatatatacaatgctatacaccaaatgaaaagagctggaagcaattatatatgcaaaagaaatgcagtatttacagtctgtcaggggtcactagaaattatcttacattaaattacattttgcttgcaaaaaaactgataaaacaaaatgagccatgtccacaccaaattataaaaacctgtattgcattttcagacctaagatgcactctcagaactgctgaccataaaaaaagaagaaaaatcctcatagtgctttccttacttacttaatgcatatgtataaaatatagaaaatattcacgaaatgaattgaactgc

SEQ ID NO: 154 - DNA, 3517 bp, Cricetulus griseus
  modified_base (512)..(512): a, c, t, g, unknown or other
  modified_base (1164)..(1164): a, c, t, g, unknown or other
  modified_base (2521)..(2521): a, c, t, g, unknown or other
  modified_base (2525)..(2525): a, c, t, g, unknown or other
agtcccaaattatggtttagtgcaaccacataatgtgccatctattgttcattcacaagtttataggtccagcagggttgagaaattgccatccttatataaaacattgactttttctgggtcatctcagcctgtaacttctgaaaatcagacacttagttattcatccagtcagcaagaagtgttatctttagttacaaatgagaattaccctgctcaaacaagagacctgtccattcagccagtcagtctcaaaattattcatctggtcactaactacagggtttatcaccagttagccaaacacttgaaggtagtgattcgaaatctccttttcagccatcattagatgtcaggcatgtgaatgcagatttcaactccataacagctacagtaggaaagccacagaatattaatgacatttccttaaatggaaatcaggtgactgtaaacctttcatcagtacccagccttcagtcaaaaacatccttgatcaacagcacatggaaacncctaaaagttgacaatgaacttaaaaatttagaacaattatcttccttttctttctgatgaggaagatcctggcatgtgtggccatgatgcctataagaacatctctgctcccttaactgcattggatgctacttctgataaaacaaagaaaacagtttcagaagctctatctgtgccaactcctggtgcatctaccgagactgctggtgctgctcccacttcctccacccctggtgcacagtaaaacaagaccttcatttgacttcatctacagcaaacaccctggaaaaagcaaactccacagaagcccccaaagccatcgaacttgatagccttccttcagaccagtttgacaaaaggacaagagacagttgcaatagaaggttttacagatgaaggaaaatataagaaagtggaggagaaggccaatacagagaacgtgatgaatttgtggtaaagatagaagatatagagacatttaaggaggctttaactataggaaaagaccccagctatttggaaagtacagaaagctttgggaagaaataggaaagaagaattttctatcatcacaatcggaatcatctcctgaggtccgttctagcagtagtgaggatgaggaatttaatcctcccagctccctttgtcacncgttttctgaacacaagagcaatgaaggaaactttcaagagttacatggagttgcttgttagcattgctctggatcctgacacgatgcaagccctagaaaagagcaatgatgagctacttttaccacatatgaaaaaaatagatggaatgctgaatgataaccggaaaagacttcttgtgaatcttcatttggaccaaccattcaagaatgctttggaaagttttcctgaactaacaattattactcgagactctaaagcaaaaagtggaggatctgctatttctaaaataaaaatgaatggcaaaacttataataagaaaactctaaggacttctaaaacaaccactaagtctgcacaggaatttgctgttgatccagagaaaatacaattatattcattataccattcactccatcattataaataccatgtttatctaatatgtaagaatgagatatcgtctgtgcagaaaaaaaatgaagatttaggacaggaagaaattgttcaactttgtatgaaaaatgtgaagtgggtggaggacttatttgaaaagtttggggaacttctaaatcatgtacaacagaaatgttcctaacattgccacaaaaatcccaccttttttcctgtatgagaatgtcttcagtttaaaacatgaaactcagaagctgcgctctgctctatggagtcctttaacatggccaggaaactgggtgtgaactgtgcaattctgtgactgctttttgtgtcaagttatattgtgataaaaaaaaaaagtgacgtactattttccctgtcttaaagaaaagtatttttgtttatagtgtgtttttcctttgaaaatttttcaattgtacattttattttactaatagttgtatttttcacaaagaagatgtggttttaattttctttctatcctttattgttttcagtaaactctgtgtaggtacatgtcatttgcattatagattctatcttaagttggccatttttgttgtttttgccctagtgttactcagaatattcatttggtgctagaattaggttagcttgataaatgggactgtgtgaaacactgcactaatttcatatttcataaaataaatttcttaccaaactagtatgcagtgttacacacagctttcctagttcacagaactggaagtggagttctcctttggtgcctttaaccccttcgcacactagtgtagctttcttaagtttgacagcatttcaagtggtttagagacagtgaatgtattaggttcatcatgaccttgcatcgtttcttttgttgccaacaggatgccttgtttgtgaggatttaatagtgtcattctaaaaacttttttttntttnaccaccaagtaaactgacaacaattgaagttaatatgccacttgatttaagactaaaacactgttaacattgggtgaaaatgagcatctgagttatgctaacatatttatttctggtgattattaaaagcaatatccttaacatttgtacctggtattagacttaatagtaccaagtaatagaagtttctctccagggtcaaatgtatcatttctgaaagttttaaaatgcttatttgagaacaagaacaagctagtaggcttattttatgtaacccatatgggagatgccagtggcagggaaaaatcatgagattcattttataagcagagtagagcaggaaacagccatattccattctgataatattgaccctgcactctagcccaggctggacctggaactcatataatataggaaaacatttaggttgtagataaagaggtgaagcacacgttgccataggacagatgttaagaaagtttgggctctcctacctatagagctctggagggttggggtgtagctgcagattggtcagatgggaaataatcctatttttaaatgtttaatacaatttctgttaattttgaaaagttataaaatttatttaaaatttctaaaaacttgaaaatttatagatgggtttacactttaggactattttcaaaagcttccattttaaaactaatttttctatttactatttattttccttgaagcagataaattccaacctataggtctaaggatataactgttgcattaactcagttgcacaacttttgacatctgtgttcacaaatgcttgtttttgaaaaatcacttcatatttataaaacaactaagcctaaggatacaaagaaacctgcatttgtagtccagaattttcaactggtccattttaccatatatggaaatgtgaaagacaattttgtatatttgttactaactcagatcattaaagtgaaaacaatttttttaaaacaaaa

SEQ ID NO: 155 - DNA, 3514 bp, Cricetulus griseus
acagttacctccacctagagaaacttctgtagcatcaatgagtcagacaagtggtggtgaggcaggctcgcctcctccagctgtagttgctgctgatgcttcttcagctccctcctcttcctccatgggcggtgcttgcagctcctttaccccctcttccagccctaccatttattctacctcagtcaccgacagcaaggcgtatgcgaagtggagagctgctcctcagccgtgggggtaaggtaacaaagagggtaaggtgaaaagcagttaaccggtaacacagttcagcagcatccatcaaccccgaagaggcacacagttttgtacatctcaccaccacctgaggacttgctggataacagtcggatgtcctgccaggatgaggggtgtggattggagtctgagcagagctgcagtatgtggatggaggattcccccctccaacttcagtaacatgagcaccagttcctacaatgataacactgaggtacctcgtaaatcacgaaaacgaaatccaaagcagaggccgggggtcaaacgacgagattgtgaagaatctaatatggatatatttgatgccgacagtgccaaagcacctcactatgtgctttctcagcttaccacggacaacaaaggcaactcaaaagctggaaatggaacattggacaaccaaaagggaactaggagtaaagaagagccctatgttatgtggacagtatccggttaaaagtgaggggaaggagctgaagatagttgtacagcctgaaacccagcaccgagctcggtacctgacagagggcagccgaggctcagtaaaagatagaacgcagcaaggctttccgacggtgaagctggaaggtcataatgaaccagtagtgttgcaggtgtttgtgggcaatgattctggtcgagtgaaaccacacggattttatcaagcctgtagggtaactggacgaaatacaactccctgcaaagaagtggacattgaaggtaccactgttatagaagttggtcttgatcctagcaacaacatgacactggcggtggactgcgtaggaatactgaagctgaggaatgctgatgttgaagccagaataggaattgctggttccaagaaaaagagcacacgtgccagattggtttttcgagttaatatcacaaggaaagatggatccactctgacattacaaacgccctcttccccattttgtgtactcagccagcaggagttcctgagatcttaaagaaaagcttgcatagctgttcagtgaaaggagaggaagaagtgtttttaattgggaagaactttctgaaaggaactaaagttattttccaagaaaatgtttctgatgaaaactcttggaaatcagaagctgaaatagacatggaattgttccaccagaaccatcttattgtgaaggttcccccataccatgaccaacatataactttgcctgtatcagtgggaatatatgttgtgaccaatgctggaagatctcatgatgttcagccatttacttacactccagacccagcagcagctggtgctttgaatgtaaatgtgaaaaaggaggtatctagtccagcaagaccttgctcttttgaagaagccatgaaagagcagcagcaacaacagcagcagcagcagcagcagcagcagagcattttattcagtaatcagaatgctatggctacaatggcatctcagaagcagccaccaccaaacatgatatttaacccaaaccaaaacccaatggctagtcaggagcagcagaaccagtcaattttcatcagcaaagtaatatggccccaatgaaccaagagcaacagcccatgcaatttcagaatcagcctacggtttcctcacttcagaacccgggtcctgcacagtctgagtcaccacagacacaaaatgagggccaggcctctgtgacaacacttctttctcagcaaatgccagaggcttccccactggccgcctctgtgaacagtagtcagagcatggagaagattgatttgcttgtttcattgcaaagccaagggaacaatttaaccggctccttctaatgagatgtaaattccatgaagaaagtaatgatgattccaagatgtcttgagaacttgtggttccatgaagattactgaacttctgtgtgtgtgtgtgtgtgtgtgtgtgtgtgtgtgtgtgtgtgtgtgtgtacgtgtgtgtgtgtgtatgattccttctttatctatgttcagccttacctcataatctgtgatcatttatcaacattggtaatttattcccagtactgcctaagaaatgtatatgttttatgtatatacagtgtagttaatgataattcatttaacttagtttggcattttcctaccactgactaaaaagtttacatcaactgactgatttcaatatatatatataggtgcaatgttctgtatttctttaattgttgtgacatttacttagctaaaataattgatgggtgctacagtctcctgtttatgcataatatgggtacattgtgggcagtgcaatacaagctttctcttcattgcctcttactttaccagcagaccacggttttgctctggctagaccagctctcagaacagaattaccattccttatatcctttttgtatctgagatagtaaatcagatggctggccaggccaatgtagcaccctgtttaatttcttctcttagctggtaaggattcttttcaagtagcttacttggcatttgaatgctgcagtagtgatggttctccttggaactcatgcttcaggtgaagtacataacaaaataacaagacagttatattttataacgtgggtatttctcccttctcagttgtgtgcatcctaacaaataagcaggtttattcatattttcctttagaattcagcacttccatcattaatcttccttccactgtttacaaatcaactgatgagttaactcatgaaagattcacttttcagaataaaactaaatgaatacttgctttctgagaatcactgctctctgtcccacactagcagtgctaagtggcttactctacaaactggtgctggaaagtaagtaggcaaactgttgggatgttctagagatgcccttcctcccctgagctgtcctgcaccaaagtgatcacgattccactcattagagaccttctgcagtgcaattgaactaactccttctgtctaatgactatatctgctcaccttgttccttccaaggataagctccaagtgattgctgctttcctggcaacttgactgagtttcatactcttcttttacttcgtgttttaataagtaacttggaatacttcattaacctgttctcaagtgatttagctgccattctgccattttgagttttttatttaatttttattttgtctttgagcacattgatcaacctactgacctgccttcttgcattgtcctgcaatgatgtaagagtgacatttgtgtatatggcttcatagttggaatttcag

SEQ ID NO: 156 - DNA, 3512 bp, Cricetulus griseus
cagggtaaccaggagccaacaacaactcctgacgcaatggttcagccttttactaccatcccgtttccaccacctccacagaacggaattcccacagaatacggagtgccacacactcaggactatgctggccagaccagtgaacataacctgacgctctacggaggtacacaagcccatggagagcagagtagcaattcacccagtaaccagaatggatctctcacgcagacagaaggtggagcacagacagatggacaacagtcacagactcaaagtagtgaaaattcagagagtaaatccacccccaagcgactccatgtctctaatattcccttccgcttccgggaccctgacctccggcagatgtttgggcagtttggcaaaatcctagatgtggaaataatctttaatgagcgtggctccaagggattcgggttcgtaactttcgagaatagtgctgatgcagacagggccagggagaaattgcacggcaccgtggtagagggccgtaaaatcgaggtgaataatgctacagcacgagtcatgaccaataagaagatggtcacaccatatgcaaatggctggaaattaagcccagtagttggagctgtgtatggccctgagttatatgcagcatccagctttcaagctgatgtgtccctaggcaatgaggcggctgtgcccctgtcaggaagaggaggcatcaacacttacattcctctaattattcctggcttcccttacccaactgcagccaccacggcagctgcattcagaggagcccatctgagaggcagagggcggacagtgtatggtgcagttcgagcggtacctccaacagccatccccgcctatccaggtgtggtttaccaggacggattttacggtgctgacctctatggtggatatgcagcctacagatatgcacagcctgctactgcaaccgcagccacagctgctgcagccgctgcagccgcttacagcgacggctacggcagggtgtacacagctgacccctaccatgccctcgcccctgccgccagctatggagttggcgctgtggcgagtttgtaccgaggtggctacagccgatttgccccctactgaagtgacgtgagaccctgcaaatgggacagcccccagttcatgaggcctggctattgcaatatttactagtagaggactctatagcaagatgaagaggaaaacaaacaaaaaagagagaatacttttttatacctcactatgttctttgaatatgtattttttcctttaaatttctgtccttttaattcttttgttccaaagattgtgctctttgtttgttttgttttgttttgtgtttgagtctcctgcccttgttgaccactgcacccagcttcactctgtcctccagagtcacagccaagcacctggagcccttggagaacattaacaggacaggccatggaattcaagcctgccttggaaggagggtgtcaaatacaaggtcctcctgcagggcccatggcagtgaaacctggcttcagtttcatttccaaaggacttcttccccagatctgaggtgtaccctaaataaggcagggatcccacagaggctccaaaatgtaggcattaggaaactggcatgtcagctagctccctggtcagtcacctaagagctccctgctaaagggagttcagagacacgagctttgagctgcctgccaaaccatcccctttggcccagccggttctccactactcgaaactctagcatggcaatgtttgcagaactgcagacttttccccagatattaggaggaaagggactttggggggtggggaaggggttgtggtgttttaaggcataagttacctgtttgcactgttttcagataggaaacaatagtgggcacggtgaacatctaatgtaaacgtgtgttttattttgtcatgctcttgagaatgtctgaccatttgtagtatacaccagtgacacttgattctctgttgcataaaacactatatttttggaaatgttgctgtccagaagcctcttcccagactttccctctcctgtgtacttccttcacccttgctttcctcatcagccaggcaattgccatgcccgagccagagcgggaaacagggccccgtcccaagcaggctctgggtgtcctaaccagcatgtgtcctctaggttactgagtgcaggacagtccttggcaactttccttttaaaaggctcaccaactaccacagattgccaaactcttcagtgaggcactggaagtgagccagggggcacaggtccctgaaatattgtggttggctgtggaagccatgttcttatgcaagttaccgaaactgtagccagttacagtgtactcaggaaaaacagtagatgagttcagccatggtggtgctggctggcagggattggtaactgagaacttctcatcagccaaaactcgagcttgccttgacaaagacctccagcctagggggcagcccttgccagcactgggagggctgcgttcaccctggcaggcaaaaagggaacagcgacgctctttcctcccctccccttccggttaccaatgccagattcccaggagcacgcaaggttttgagtttttcagaaaatgcttttggtttggtttttctggggactgacatgctctaatggctgtctgtacccatcaggactcctagcttagctgttttcttatattttctgttcacagtatttttgtgtgtgcgtgcttgttgggcagctcattttggctgcattatatatcgagtgatgaactgacccctcttttcccctaaggaacatgaattttccccttatgtcaccattatgcttgtgaatagctagagccaacccggggctgacacatacaaagctagagctgcagagcaaactgagactcaaaaacctagagcctcaatcttttcaaggctcaaagtcccgcagaacctctcttctccacacccatgtggcaaggagtggcctgcctagcacgtgcagtttccccatggcaagacaggtaccactggggtatgggggcatactcggatgcttgtacaattgaccatctagccatgtctccttccctcctgtcctctctcacaatcaccccctaggacaccggagctgcttgcccagggtcttgtttccctgctaactccagagaagcaccagggctttgtgacagtctctacttccctccctctccccctctccctaagaaccatattgtatagtagctttcagaccatacagtattcattgggttactcctattattatcaagtagctggaattgtgaaggttggagtagttagatctttagcttttattccttattttttgtattactctccatgtgtataaattattgatcatgttgctggcttttataaactctaagcaaaggaggggcactgcctcagcctttgcaaatggtaatgaagcactgtttttaaataaaagagagaaacaccaaaaaaaaaaaaaaaaa

SEQ ID NO: 157 - DNA, 3508 bp, Cricetulus griseus
tgagcggattgcaacacatgcagctgcctggagagagggagccggtgtcctacgtcagagccgccgccgccgcggagccgccgccggggaggagcagccgctaccgcccaggactgggcccttagggaggaggaggcgagaagatggcggacgaccccagtgctgccgataggaacgtggagatctggaagatcaagaagctcattaagagcttggaggcggcccgcggcaatggcacgagcatgatatcgctgatcattcctcccaaagaccagatttcacgagtggcaaaaatgttagcagatgagtttggaactgcatctaacattaagtcacgagtaaaccgcctttcagtcctgggagccatcacatctgtacaacagagactcaaaactttataacaaagtacctccaaatggtctggttgtttactgtggaacaattgtaacagaagaaggaaaggaaaagaaagtcaacattgactttgaacctttcaaaccaattaatacatcattgtatttgtgcgacaacaagtttcatacagaggctcttacagcattgctttcagatgacagcaagtttggttttattgtaatagacggcagtggtgctctttttggcacgctccaaggaaacaccagagaagtcctgcacaaattcactgtggatctcccaaagaaacacggcagaggaggtcaatcagccttgcgttttgcccgtttaagaatggaaaagcgacataactatgttcggaaagtagcagagactgctgtgcagctgtttatttctggagacaaagtgaatgtggctggtctggttttagctggatcagctgactttaaaactgaactaagtcagtctgacatgtttgatcagaggttgcaatcaaaagttttaaaattagttgatatatcctatggtggtgaaaatggattcaaccaagccattgaattatctactgaagttctctccaacgtgaagttcatccaagagaagaaattaatagggcgatactttgatgaaattagccaggacacgggcaagtactgttttggagttgaagatacactaaaggctttggaaatgggagctgtagagattctaatagtctatgaaaatctggatataatgagatatgttcttcattgccaaggcacagaagaggagaaaattctctatttaactccagaacaagagaaggataaatctcacttcacagacaaagagactggacaggagcatgaactgatcgagagcatgcccctcttggaatggtttgctaacaactataaaaaatttggagctacactagaaattgttactgataaatcacaagaaggatcacagtttgtgaaaggatttggtggaattggaggtatcttgcggtaccgagtagatttccagggaatggaataccaaggaggagacgatgaattttttgaccttgatgactactaggtagtcgacatgggtccggcaaaatgtgcctcaccctccagcattcaacccaaggagcatacccgtggtggaatccaaacagatccctgccttacaattggaacatttccagaacttaatccgtgagcattggatactgaaaagaaaagcgaaacaaaaccagacccaaccctacactttggtttgtcatggtgtcagcgcagcagcctacaactaagttcctaaatgccacttcggactaatttaacaaagaatcccagtttttacttttacttgatggtaaaattggttgctcttgtattttatgaaaaaaaatgatttttttaaccttcatacatagaagcaaaaatactttaactgctgtaaaccttcaaaaattagtagaagtgagatcatactggtttgtttcttattttgatcggagaataagtaaattgctgcatttcgcagtgacccatttacatggcattctcagcttagactgcacaagaagaaatatatgtggtgaaatattggaactgtttctctcttggtctctgtttaatgttgaaagggtgagctaataggcaatttcagcttcactccctcacacttccccactcccagactgtttcaaaggtgcaggttgtgtggcaaagtcagactgagtgctgtaacactgggccagtgcactctcgacttccatctatttgaaggcacatttgagccgagcatttgggagccctttgtgtcactaacattaatgaagacgctccctatagtctcggcctactagaaaccagtttgggatggacatgatagggcttctgtgctattgctgggattgggagaaataaaacatgcaatttaagtggaaccaaaaaaaaattcaaaggtagattttagcttggatctattcttgataaaaaaatgggacttacaagcacctctcagatgaggaagtatgggaggaggggtggggagggaatgggaattggggagggatgggacacagcttctggcaccatggattaaaccatgttagatccaaaagttggccaaaaacctgaagcaatgcttcacagctgggctgtaagttggatttgaacccagttgaagtacaaggtcatggtgtgttcaaggtggtgacagtaaacaaagcgtaggatgtgcccagtggtagcaatgggggaaagtataccaagtggactttgaaggaccaaaggtttttaaagtcagttggtatcacccacactcaatcagggtggtgggtacattgggtttcaaattgggtacttttaacactttcgtgcctgactgccgttcttcacggacttgactcagtcacttgtagctttattggtctgaaccagctctttgttcccaggttacagacctgcctatcgttccaataatcctgtttcacttgaatgaagggagtatgtcttacatgtaaagctttggttctcacactgtactctgaggtccaaatgactgtctgtcgtgtaacctgatgtctcaacccccagggagaagagtcaattctttggtgttcaccaacatgggaagcttcaccagaacaggcttttgctttgggctctgctgttggttcgcagaacacccaagagcaagcaccacactcttcccagcagtaccttggttttgccattgtaaatgggtctaatgtgatatgacaagaccagagaaactggatgtaaattgacatgtttggatatgcttgttgtttcacaggatacatttagggtatgcagctccttttgtagtttttatttttactatttaagtttggaaatgatgccaaatttttgtatttctttaatcaatgtgttctccttggtgatatatattgcattatatattgatgtgtgtatcaatatataccgatatgtgttacacttacgcatacaaacacacataagtgagaggggtgaaaccgtagcctgcactccctagcctctgcagagagaccctaagagcagaatctcggtgttgtgatgtacagaaatggagaagagtattaaaccatatttaagaataaaaaaaaaaaaaa

SEQ ID NO: 158 - DNA, 3507 bp, Cricetulus griseus
  modified_base (3504)..(3504): a, c, t, g, unknown or other
aaaaagattttgtaaaatattgcgttgaagaagaagaaaaggcggcagagatgcataagatgaaatctgcaacccctgcaaatcggatgagcgtggatgctgtagaaattgaaacactcagaaaaacggtggaggattacttctgtttttgctatgggaaagctttaggcaaatccacagtggtccctgtgccgtatgagaagatgctacgtgaccagtcggctgtggtggtacaggggcttcctgagggtgttgccttcaagcaccctgaacattacgatcttgcaaccttgaagtggattttggagaacaaggcggggatttcgttcatcattaagagacctttccttgagccaaagaaacaccttggtggtcgagtgatggcatcagatactgagcggaccatcctgtctcccagtggaagttgtggcccgatcaaagtgaagactgaacccacagaagactctggcatttctctggaaatggccgctgtgacagtaaaggaagagtcagaagatcctgattactatcagtataacattcaagcattcaagatgatgattactccccacccaccaagaggccaaagagcagtgagccgcccccgcctccaccggtccccgagcccgccaacgctggcaagcgcaaagtgagggagttcaacttcgagaaatggaatgcacgcatcacagacctacggaagcaagttgaagagctgtttgaaagaaagtacgctcaagctataaaagccaaaggtccggtgacgatcccataccctcttttccagtcccatgttgaagatctttatgtagaagggcttcctgaagggattccttttagaaggccatcaacatacggcattcctcgccttgagaggatattactggccaaggagaggatccgctttgtgattaagaaacacgagcttctgaactctacacgggaagacttacagcttgataagccagcatcaggagtaaaggaagagtggtatgcacggatcactaaactgaggaagatggtagaccagcttttctgtaagaaatttgctgaggccttggggagcactgaagccaaggctgtaccataccaaaaatttgaggcccatcccaatgacctctatgtggaaggacttccagaaaacattcctttccgaagcccctcgtggtatggaatcccaagactggaaaaatcattcaagtgggcaatcgaattaaatttgttatcaaaaggccagaactcctgactcacagtacaactgaagtgactcagccacggacgaacacaccagtcaaagaagattggaatgtcagaatcaccaagcttcgaaagcaagtggaggagatctttaatttgaaatttgcccaagctctgggcctcacagaggcagtgaaggtgccctatcccgtgttcgaatcaaacccagagtttctgtatgtggaagggctgcctgaagggatccccttccgaagccccacctggtttgggattccacgccttgagaggattgtccgtgggagcaataagatcaagtttgttgttaaaaagcctgagctagtagtgtcctacttgcctcctgggatggctagcaaaatcaacactaaagcattgcagtccccaaaacgaccacgaagccctgggagcaactccaaggttcctgagattgaagtcacggtggaaggccccaacaacaacagtccgcaaacctccaccgttcgaactcctacccagaccaatggttcaaatgttcccttcaagcctcgagggagagagttttcctttgaggcctggaacgccaaaatcacagacctgaagcagaaagtggaaaacctcttcaatgaaaaatgcggggaagctcttggccttaaacaggccgtgaaagtgccatttgcattgttcgagtccttcccggaagacttctatgtagaaggcttacctgagggggtgcccttccggcgaccatccacatttggcattccaaggctggagaagatcctccggaacaaggccaagataaagttcatcattaaaaaacctgagatgttcgagacggccatcaaagagagcacctcttccaaaagccctccaaggaagataaactcatcacccagcgttaatactactgcatcaggtgtggaagaccttaacatcattcaggtgacaattccagatgatgacaatgagcgactgtccaaagtggaaaaggccagacagcttcgtgagcaggtcaatgacctcttcagtcggaagtttggtgaggctattgggatgggcttccctgtgaaagtcccgtacaggaagatcaccatcaacccaggctgtgtggtggtcgacggcatgccccctggagtgtccttcaaagcccccagttacctggaaatcagttccatgagaaggatcttagattctgctgagtttatcaagttcactgtcattagaccatttcctggacttgtgattaataaccagctggttgatcagaatgagtccgaaggccctgtgatacaagaatctgctgaggcgagccagttggaagttccagccacagaagaaattaaagactcggatgggagctcacagatcaagcaagagccagaccctacgtggtagactttgtctgcaggttcagcttccagtgagagtggtggagaagatctttcggacccgccctgccagctctgtaatatacttgtataacagaaataccttctatacaaaccttcttttctacttctagatagaaatgtctactttctcagcagttctgtgaattgaagtacgcagcgtgacgagatgcgcgtgcctggctggtttgggaatgcactagaaggatttcgcagcagtgctgggaagtgacagggagtggcagggacaactcttagattttttttatgcattgggcagagccttgggctgcggtgtgtattccagtcagtggagatattcctactgggcatcttggcttctgcagccaagaaaacccctgtgctaggcagtgctttagtttttctattgaaaatcatttctgtgatcttgcacttggcttcccttcctgcctgagggagggctgctgtctgtccctctgactaagcctttgactaagctccatcatggttcctcttgttttcactgctcagagcctccctcacccttacttggcagcaagtaaatacggggtgtaccctgatggtcggaggtctggtgtgcatgctttagcagctgatgactaaaccctccccggctgggccccaccatagcctggggtgctctgggaggcagctctgggtgggagtcaggctgggctgtgggtctgcctggttggttagtctctaaccacctgtctgggcacagttctcagtagtggcaccacgatgttcacaatgggaaattatatcacacggtagcaaagataggcatttttatgtgttccttatattttacctcaaattgtagatatagggtaataaataaaatccatccatgcctttcaaaaaaaaaaaaaanaaa

SEQ ID NO: 159 - DNA, 3497 bp, Cricetulus griseus
caagcaatctggggtacagcagaagagcactaattaacttaagtccacttccatggtggtccagaaaccagactaccttaatgattttacccacgaaatcccaaatattcagactgctcctatgaaactatggcgaaaactacaccaactggtggcctgccaagggacccacaagaactcatggttgacaaccctttgaatcagctctcaactttagcaggacagctgtccagcttgccaccagaaaaccaaaaccctgcctcccctgatgtagttccctgccctgatgaaaagcctttcatgattcagcagccctctgcccaagcagtagtctctgctgtatcagcaagtattcctcagagctcctcccccaccaagcccagaacctcggccatcgcacagtcagaggaactacagtccagtggcagggccgagcagcgaaccaagtgcccacaccagtacccccagcataggaaacagccagccaagcactccagctccaaccctgccggtccaggatcctcagcttctacaccactgccagcactgtgatatgtactttgcagacaatatcctttacactattcacatgggatgccatggctacgaaaatccttttcagtgtaatatatgtggatgcaaatgtaaaaacaagtatgattttgcctgtcattttgcaagagggcaacataaccagcactgaacacaatcaacattgtcctcacttggtttggcctttggggggtttgtagtttggtctttagttttgatcatccctaataaggtatctgctaatttaaaatttatacattctattcataaactagtaatttgatagtgaaaaggggtttgttaacttttcatacaagtctggtcagggttatttatgcattagatagttagatgcattgatatctttttcacttagacatgtaagagttgaagtacagtaggaatcagttatttcagtgtaataaacctttttcttcaatgggaaatacaaagtaattcttttcaaatttaaattataaaaattaaagtcctggaaatttttggctaaattgaaaaattgtgtttgatattggagatatctcttcatttaatgtttagtttaaacatgttagtttttcatttttatatatatatatatatttctaagtattattttcaagtcacaggtaaatataccagagtgctagatgcctttttcaatctgaatctttcgtttaaattctgcattcagctattagtggtgtcaggtaagactgacaaccacactgataatcttattcttcctaatctcagatgaccaaagaggaagtggggttaatctgtcttattaagatgcttcaaaacaacctccagagtttccttttctgcctcctgcccataatttccaagaaaggtaggtatagaaactcagaaaaatgtgataattaggaaatagctatgaaaatgagaacatgcccacacagatcctactttcctctgaagagtaggccatgtaaggtacttcctgtgcatcttcacagacagtgacagtgggatagtcaccacagtgggaaaggataaagagtggaagttaatacaaagcacatttaaatgtgacattaaatttgtttataattagagcggtccattttacataggaagctgttatttttgtattgtgtaataggtagcttactctgaagagagcctggacaaaacaataaaacattgtcacttactcttggtttctgtgtattttgctaaaattttcattttaaattttgttaatatcttgaaaatattcctaattggcttcttaaagaaatatcctatcaagtatctattaaccaaaatggcctcttacagtaaataagagggaaatattaatggtgtctacccattaagccccaagtgccctgttaatggatctgtgccctccctcccagtgctcaaaagccattcagagggtgcctgtgcttgcataaccagtcttggctcatcccaactgcactgctaaagcacagcaccaaagacatttctagaagatgtttgtctattgcttaaattactcactggttagtttagttttagtgcaacactttccaaatgcataacttgactgtagtgcttatcagctgccagaaggaaacaggttgttgtttggaaactgctattttttaagtttgattcaactaaaagcaatacccccaaacagactatgaaaacttccctgaaagaggaagaagcccagtgtggtgctgcacacctgtaatcccaggtgcttgggaagcccaggcaggaagaaagattgctagagcccaggagtttcctgccaggctgggcatcactgcaaaactcaagagtctcaaaagccaaacaacctgtaagagctcgccataaagccagctttatcatctttacattctgggccaaacagtgacatgtgctttttgttttttcctaacaactaaagatgaatgttttgaaagtacatttcactttaaatatggaagagacttttcataattacaaaccagaaggaaaaatcctaattttctaataccataaagagcacagttggtcttccaaaggtgttgatgcataaagctacaaataaatgcactaaaattttgaagcaaatctaccttagaaacttttttgaaattgtacttttaaagatttaggattttgcttaaatattctgagttaaattctgtattaggaaagatgttagattctttccttaaatactaagtatgttcctcattttatttttaaccagatgttttatagaaatgagttgagaaaagtttaacatgcactatttatagtactttgccattaacaggcaatgttctaaaactaaatttatttttgttcagtgaacataagtttagatttttaaagttggtaatttatctccactaatattttttaagaaactgtgaagagattaacggaataattttcagattttactaatgtaatgtgtagctacaacttcttgacattcaagtgaagactagacttttattttgaattttttccattgggtagttccagtgctgtttcattttagaaatgagtttgctgttcatctgcagaattgtttgacaaagggaatattacttaaaaagaaaaacaaaaaacacaacagaggtaactgcaaaaaatacttaatcaaagtgaagaaaaattggaaaactttaaattccctgctaacgatgttttgttagccttagcgggtaggtgtatgctttctaacttctttttgttgatgcctggatgtatgggacatgttgtctacacaaggtgtaaaatcttgcatttcagttgtaaggtacattatattgtttagggatcaagaaagcagtttatgaagtaactatatctagtatgtagttcctattgtgaataatgctttgcttttgtaatatatgaataaagtaccactttctaatgaaaaaaaaaaaaaaaaaaaaaaaaaaaaaaaaaaaaaaaaaaaa

SEQ ID NO: 160 - DNA, 3496 bp, Cricetulus griseus
gaatgttttgagctacttcgggtacttggtaaagggggctatggaaaggtttttcaagtacgaaaagtaacaggagctaatactgggaagatatttgccatgaaggtgcttaaaaaggcaatgatagtaagaaatgctaaagatacagctcatacaaaagcagagcggaatattctggaggaagtaaagcatcccttcattgtggatttaatttatgcctttcagaccggtggaaaactctacctcatccttgagtatctcagtggaggagaactatttatgcagttagaaagagagggaatattcatggaagacacagcttgcttttacttggctgaaatctccatggctttggggcattttacatcaaaaggggatcatctacagagacctgaagccggagaacatcatgctcaatcaccaaggtcatgtgaaactaacagactttggactatgcaaagaatctattcatgatggaacagtcacacacacattttgtggaacaatagaatacatggcccctgaaatcttgatgagaagtggccacaatcgtgctgtggattggtggagtttgggagcgttaatgtacgacatgctgactggagcacctccattcactggagagaacagaaagaaaacaattgacaaaatcctcaaatgtaaacttaatttgcctccctacctcacacaagaagctcgagatctgcttaaaaagctgctgaaaagaaatgctgcttctcgtcttggagctggtcctggggatgctggagaagtccaagcacatccatttttcagacacattaactgggaagaacttctagctcggaaggtggagcctccctttaagcctctgttgcaatctgaagaggatgtgagtcagtttgattcaaagtttacacgtcagacacctgttgacagccccgatgactcaactctcagtgaaagtgccaaccaggtctttttgggttttacatatgtggctccatctgtacttgaaagtgtgaaagaaaagttttcctttgaaccaaaaatccgatcacctcgaagatttattggtagcccacgaacgcctgtcagcccggtcaaattctctcctggggatttctggggacgaggtgcttcagccagcacggcaaatcctcagacacctgtggaatacccaatggaaacaagtggaatagagcagatggatgtgacaatgagcggggaggcatcagccccacttccaatccgacagccgaactctgggccatacaaaaaacaagcttttcctatgatctccaaacggccggagcatctgcgtatgaatctatgacgaaacaatgcttttattgatgcaaaaagaaacagaaatcgggggagggatgtgtgagcatcctgcaagataaaaatgagaatcaaagtggcagtcttaaagagtcagtgccgttacctagaatgctttggatggaggaaagaaaaaaaaatcaatcaatggtgcaaaaaaaaaaacaaacccacaaaaaactcaagcaaaatagtattgtataacccacagacacagcgactgactggttcctatctagtgacatctcaacattagcaagggttttcatgttgatggctccaaactgacagtattaagggtaggatgttgtttctgaatcaccgttgaagcctgaagatgtcaaagaagggttatcctttcataggcaaagtatgagatgttgtaatacttgcaactaaggacaaattagcatgcaagcttcgtcaaactttttccagcaacacggaatcaaagacaaaagaaacttattgattgatgttttatgtgcaaacaacctgaatcttttttttatataaatatatatttttcaaatagatttttgattcagctcattatggaaaacatcccaaactttaaaatgcaaaattattggttggtatgaagaaagccagcttctgtttcttctcttgatgaaataaaatgcaaatgaatcattagttaaccacagctgtggctcttgtgagggcttggggtggacctggggtgtttttggtttttgtttttgtttttgttttagtaacctagctgcaatacctgtctgtaatactagaagaaaaaagtctgtttaatcatttctaattgcagtactgcagtgtgctaggcttaactgcaagccttggggacaggtagaggttatatgttctacattgcatccttgtcctgggcctgcactacactggagaaaaatcatcacttgttcttataccagtatttgggtcaagcccatggccaaggaaggacagaagagagtcaggctaaagtgcataactagggcagtaagcaggggagatagagacctgcagggaagagggtagccatggtctactctcagtctgtctcttctcagcatattggtaaggttttcagttttacttggtactgttttttgtctgtttaccttccttaacaattttttccctcaagagtttaaaaaagaaaaaaaaaatggtggtttttccctcctatactggggctacattttttaattgtaaaaataactgatggccttttgatgaatgtcttccatagtgaataagaaaacttagtgacttaatttaggaaacatgttaacaagactgtttttgaaattgtaacaaaatctacataagtgatttacaggtacaaagaataaaaataaaggtaactttacttttcttaaataagactgcaaatggcttgtgctactctgatatctgtttccaaatgtgtttctaactatagcgttgactgcctggccaaaattccagtaaaacttttacaccaaacaattcttcctcagccctagttgttagtaatatgtgcactgtgaccaccctgtagttaaactgtttcgtattagtactgccagcaatagtggcaaatactgctaacttttttgcatagaaagcattataatacacctttcatctacacaagtatatagcttttctatcacaatatttattaagtgaaattgatttctcaaattgctgtggcaagttcattgagaaattgtttcataaatggatattcctactatgactgtgaaaacatgtcaggtgtcacatgagtgtcacagacgaaagcacacgcctatgcaatatggcctactctatttatttgtaaaaactgaagcataatttaaagtatatgtcgatattagtttgactttctaaaagaggctagcttacaagggctagatcgaagattttttccatgagaaatgttgaatttatgaagaatgaattttgaggctttgaaaatggttagtatctcaaaagattcaatacgcaaatatctgcatttgttgtaggaacagatactagttagctggacaaaaacagtcataatgatatttgtcacccaggacttgtggtctgttgctgattaatacagtacctttctcatgtgactcttaacactacagcacaagtattatttccctggattctctggagaagcacctaaaag

SEQ ID NO: 161 - DNA, 3491 bp, Cricetulus griseus
  modified_base (473)..(473): a, c, t, g, unknown or other
cagaggaagaatgtatgtaatatttataatatagagcaataacatccttcttgtttgttacatttaactacttatgtaaccagatgtttacatgcaagagttataggaaaatgctaccgcagtttcttccctgaggttttaacgggcagagctctgcctgctgacaaccttcccagtgctttctcatcaagtaacctcagagtatctttaccaaagatttttaaaagtgaatttctttttaatatagacttatacttttataataacgaatgtgcacatatacatatacagaaatatttagaattagatgtttttctttcacaaggtctaataagtataaaggatcctaccactttattcatcaatttctttaatatgtgatttgcattgctttcttgttttctcctactacaacatttgatttaaacaataccacgccactctattctttactcttttagctgtatagtttnctactgtagagaattataaagatcttaatgattatacacattgtcttttgatatattgtcttactatcatttaaatacataaatagaaaaaaactataagtctgtaacagaaaacttgtaaaattctatctgaattgtttaaatatcaagagcacaaacatttagttattctgtgtaaagtgaaatacataggaatgggaaaaaaaacccactgtcatgggctctgcagagaacatttcaaaataagatttcctctctatttctatagtggtggggatggatcgccgagctttgcataaaatagacaagtgctctaccatagctaaacctcccatccagaaaaaagatttttgtagctgtttagtttcccatctcagactggctcagtctggagatgggcaaaccaaattgccttcaaaaactcaaaaatatatgtcctaggtcaaggcctccacattaatgaaataatgtcatctctgcagctcaaagatgtgggtttttttctgttcactagcaccctgatttttgggggatgctagaccaggcaggccttgaactcataaagatccatctgcctcttcctcccgaatggtgggattaaaggcgtgtgccatctacaaccctgagcttaagtctgaatctataccttgatcatcacttaaggattgggggcttttctttctctactgctaagtatgggaatgggagggggcaactaatagatgaactttctaagtagtaagcctgtgccacaaagtagatggtattcaaaggcacagcctaggaatagcaattttgccccaaactgtgcacaggctcttatttcacggctttgtcacaggcttttctccttctgtgccatcacctttgagaaaaatgattacaccttctccaagtctgcctttttaacagttacagttgagttggcaagactctcccagctctgaatagagccgcttgccgactccggcctctgagagactgattccaatgtgctcttctgttcagcacacacatcagcaaagtgagaaagacggggggctaaatataggctctattaactttacttttagatgcactgccttccaaaatgcctattctgagaaacagaaacgttatccctacatatgtatgtacacacggtacccagagtcgtactgttcagccttcaaaaacaccatcagaaggagtaggtgctgagatagtgaagcatcgccaaatggaagcaagtggctcgtttacaatctcccctaccatggctaccatgaaatggggctgtaagagtgtccctggaacctcctgctgatactgccactttgtatttctatgccaggaatcatggcaaagtgctgaggaacctgtactccatggaagtaatatgctcatgaacattcagtcaagagaaaaaaaggcaattaatatgtgtcatgggtgtgtttataaactaagtactgctaagtttagcatgtcagcaggtttcttttatgtcttaggctaacttagagaaaactaaagaaaagtcttggctatagggaatgtagactcggggggccaagtgtccctgccagatccttgaagcatttttactccagctcctaagaatactagcgcatgctatttgagtgcttttgttcctggagctctgtcagtgacagggaaactctagatgtttgtgatgaggcaacaacatagccaggaaggctgagttttcacccagtgtggcaatcggagatgagccaggtaaatatgctgaggtacatacagatactgtatgattggagaagggttgaagggaggacatgtttccaaaaaagattgttctcaatgtgtcgtctgactcaaccagctggcagattacacttgccaagtcgtttcctttccttctaagtcacttggctccactttcctttaaatatgcctatgagcaaagtaagatgtgtccacttagcctttctgaaaggacgcatagtgatgtcctcttggtcacaaagctactatgaaatgtctcctctcccactcagttctgccaaatgaaagtaaaggtgacaaactgtggaagacacatttgatggcattgcagtcatccgccactctgctttccatataggagcccagcaactcagacctgagctgagggaacaacaaggcactgatgagagctccaggactatagccacgcttctttaatagcatcatgattggagccaggttgaattttttcatttctcctgtcggcaatctttttatcactatcaatttcaacactaatcattttctaattttgacatgatcaaatttcagtactaaaaaaaaaagaattccaaaatctctatgtgatgccatcaggtctttggaagacatggcttctcttccttgagaacaaacaaaggaattgcaacagacacaatatagccttgctctgagtttcagtccggtgacttgtgaccatgagagatagcttgatatgaaaactaagtcatgtttaatgggacgggtcaaggacaggggtggagaactgccaagctttctctgtgcttggtgtatctgctgggagcaggcacttcctcctagctaatcacaaccacagcccaccagtagcactgcaagtctccgtaccattttcaacttagggaaagttacacaaaagcatagagaacaggacttttcatttgtgtgatactgatcgagccatggtatttccaaggtgtaagcacagtgcatggattcactgccttataaaccatccctgatgtttgcacagcagctcacactgttccttatgaaaatcagaacttgtgttataagaccgtgattcggatgatttcttttgtatttacacattatccaattatattaaaacatgttcttatttacattctatcagttttgattatgttttcccagtgctctatgagaataaatatgaaaatcacattgttttttctgtaaaagaactactttatatttagatatccaataaacttctcattccacttaaaaaaaaaaaaaaaaaaaaaa

SEQ ID NO: 162 - DNA, 3488 bp, Cricetulus griseus
gcgaacggcgacaacgacggcggtggcggcaccatccgggcgggcagcatgggcacgtccgcgcgctgggcgctgtggctgctgctcgcgctgtgctgggcgccccgggacagctgcgcctctgcaagcgggaaaaagccaaatgtgataattcccaattccagtgcacaaatggccgctgcattactctgctgtggaaatgtgacggagatgaagactgtgttgatggcagtgatgaaaagaactgtgtaaagaagacatgtgccgagtctgacttcgtgtgcaaaaatggtcagtgtgttcctaacagatggcagtgcgatggggaccctgactgtgaagatggttctgatgaaagcccagaacagtgccatatgagaacatgccgcataaatgaaatcagctgtggcgcccgttctactcagtgtatcccagtgtcctggagatgcgatggtgaaaatgattgtgacaatggagaagatgaagaaaactgtaggcaacataacatgtagtgctgatgagttcacttgctccagtggccggagtctcttgaactagtgtggccgccagccagtgatacatatgaaatgtcctgccagcgagatccagtgcggctctggcgaaagtgcattcacaaaaaatggcggtgtgacggagatcctgactgcaaggatggcagtgacgaggtcaactgcccctccgaacctgcagacctgaccagtttgaatgtgaagatggcagctgcatccatggcagcagacaatgcaatggcatccgagactgtgtggacggctctgatgaagtcaactgcaaaacgtcaatcagtgcttgggccctggaaagttcaagtgcagaagtggagaatgcatagacattagcaaagtgtgtgaccaggagcaggactgcagtgactggagtgatgagcccctgaaggaatgcaatgtcaatgaatgcttggtcaataacggtggctgttcccatatctgcaaagacctagttataggctatgaatgtgactgcgcagctgggtttgaactgatagataggaaaacctgtggagatattgatgaatgccaaaatccggggatctgcagtcaaatttgtatcaacttaaaaggcggttacaagtgtgaatgtagtcgtggctatcaaatggaccttgccactggcgtgtgcaaggcagtaggcaaagagccaagtctgatcttcactaatcggagagacatcaggaagattggcttagagaggaaggaatacatccagcttgtagaacaactaagaaacacggtggctctagatgctgacattgcagctcagaagctattttgggctgatctaagccaaaaggccatcttcagtgcctcaattgatgacaaggttggtagacattttaaaatgatcgacaatgtctataatcctgcagccattgctgttgattgggtgtacaagaccatctactggactgatgcggcttctaagactatttcagtagctactctagacggagccaagaggaagttcctgtttaactctgacttgcgagagcctgcctccatagctgtggacccattgtctggctttgtttactggtctgactggggcgagccagctaaaatagaaaaagcagggatgaatggatttgacaggcgcccactggtgactgatgacatccaatggcctaatggaattacactcgaccttgtcaaaagccgcctctactggctcgattccaagctgcacatgctatctagtgtggacttggatggccaagatcggagaatagtgctcaagtctctggagttcctagctcatcctcttgcactcacaatatttgaggatcgtgtctactggatagatggagaaaatgaagcagtgtatggtgccaataaattcactgggtcagagctggctactctagtcaacaacctcaatgatgcccaagacatcattgtctaccatgaactcgttcagccatcaggtaaaaactggtgtgaagaagatgtgcagaatgggggatgtgaatacctctgcctaccagcaccacagattaatgaccactctccgaaatatacctgttcctgtcccaacgggtacagccttgaggaaaatggacgagagtgccaaagtacttcaactcctgtgacttacactgagacaaaagatatcaacacaacagacattctacgtactagtggactggttcctggagggatcaatgtgaccacagcagtatcagagatcagtgttcccccaaaaggaacttcagctgcctgggccatccttcctctcttgctcttggtgatggcagcagtaggtgggtacttgatgtggcggaattggcaacataaaaacatgaaaagcatgaactttgacaatcctgtgtacttaaagaccactgaagaggacctctcaatagacattggtagacacagtgcttctgtcggacacacatacccagcaatatcagttgtcagcacagatgatgatctggcttgacctctgaacaagtcttgactgctgaggtctgaaccagtaacacccactccagaacgataaccgagcccacgctgaagtctcctttcttcctcccatctggaagaacatcaagatatctttccgtggatcaagtttgtgtgcttgaccatttttatattacttttgtaaatattcttggccacattctacttcagctttggatgtgggttaccaagtatctgtaacccttgactctctagacagtattgccatctctggccaaatatgcactttccctagaaagccatattccaggaatgaaccttgtgctatagtgactctcacctgtacatacattgtataggccacctgtacatatcccagagaacaatcactattcttaagcactttgaagatatttctatgtaaattattgtaaactttttcaatggttgggacaatggcaataggataaaacgggttactaagatgaaattgccaaaaaaaaaatttgtaaactaattttgtacgtataaatgaaatctttgacctctgtggaggtttgcaaagactgacttcaaactactgtacatttttttcaagtgactaaaaaaaaaattaaaacacacagcttaaccataagctaaggctataaaccatgtgagattccaaactaaatacactgccatggtctcgggagagggtgctgtccctgtacttggggagaaaagaatgtttttgaacaaaatgactggttctcacaaaaactgtcttgcctcttctaaacatcacacttgatactaacgataggatttaagagcatgtgatgccttgggaggctcatgcatacaaaacctgaccattgccttaggattggtcactgttgtagagacacattggaacacatccagtcctgctgacctttagattaatttatttttctcttaaatgaattgtacatttatcttaaataaaatttatttttagaaagtaaaaaaaagaaaaaaaaaaaa

SEQ ID NO: 163 - DNA, 3477 bp, Cricetulus griseus
ccgggagccggcagcgttgatcggccctttagggcttaattgggaagctccgcctttgcttgggtctttctggaaagacagttttgatctggaccgagtggaacagcgtcccgggctcctgtgtgtctcccatggcggatacgaccccgaacggcccccaaggggcgggcgctgtgcaattcatgatgaccaataaactggacacagcaatgtggctttctcgattgttcacagtttattgctccgctttgtttgttctgcctcttcttgggttgcatgaagcagcaagcttttaccagcgtgctttgctggcaaatgctctcaccagcgctctgaggctacatcagagattaccacacttccagttaagcagagcgttcctggctcaggccttgttagaggacagctgtcactacctgctgtattcactcattttcgtcaattcctatcctgttacaatgagtattttcccagtcttgttattttctttgcttcatgctgctacttacactaagaaagtccttgatgcaaagggctcaaatagtttacctctgctgagatctgtcttggataaattaagcgctaaccaacaaaatattctgaaattcattgcttgcaatgagatattcttgatgcctgctacagtttttatgctctttagcggccaaggaagtttgctccagcctttcatatactatcggtttcttactcttcgctattcctctagaagaaatccatattgtcggaacttgtttaatgaactgaggattgttgtcgagcacattataatgaagccctcctgcccactgtttgtgagaagactttgtctccagagcattgccttcattagcagactggcaccaacagcttgcgtagtttaacatctagttaggctgtgggtagaagataagcagtagtagctggtaattcagataggggtctcaaatgacaggtctaacaccgacctcacttcaacttatatgatttacataaatgcatctcagtgcaaaaataatcattttcctggcatgttagtcaaacccttaacagtttctgagaaaattttaccgtacattattgtttgtggttatgtatgtttgcatttagtgataattgttactaaattgttttagatgcttctgtgcctacatcatgaaatacacttatttcttttaaaaagaattctgaaatttgtttcaccctaaccattaacccaagttatgtctggaatgagttcattatggtaatagatgaattcagtatattttgagacagtatttttccattcagtaattttggttgagattttaacacaagcccatttccctgcagtttcctttcatactgatcttgtgctgctctgctaggatacatgtgtttagcctgtaccgcttgaaatgtcctagagatttgcagcagcagttctgatgcctttgaaaggatgtgattgaagattgagcatgtgattgcacttgtatgttctgaaataatgaagaatgttctctagattgcattcttatccagcaaatatgattcaaaaggttaaatggaaaggtttataggtaaggtaattaaataggcctgggtaatagttgagggggataatgggtgttccagcttggtagtgcatacatgaatttggagggattggatgtataatgcatctgcatctgtgattggggctggataaatatgtccaagtcttcaattgagttcccatcattcctttataaaagtcattttgatccttattactgttgcatgattggaaatgcttaaaacgctgtacaattttagtatagagtaatgtaatatggtctttttttgtaaccagttctcttctatctgcatgtaatttggatttctcaactacattcattagtgacttgtaacatcagttttctttttgtttaagctcctaatctataggaaggtgatagtcttgggataaaattccagaaaaaactacttgacagcttagctttaaccaactacttttacatttttatgatatttatccactgagttggagaagcaacctcataatatccatttgatttttttatgtatgtgtctagcctccttatcactatctaatcatggaccattttagattcataagaggttcaaaatagtgctggaagtttctgtgtacctcttcgttaactatttttatattagcgtcttttaattggtaggacatttatgcaaagtaagataataaccttggattaactaaaatactaaatttatttggattttaccaatttttgtatttgttgtatgtgtgtgctgtgtttctacctggattaccttttatgtgtcaaattggaacattactaagattgtttgcatggaaatcatagttagaaatatcacattgtgtgtgaatatgtacaatcagctgatcttgaatctgaaattagtgtttccatatacacctatcaaaaactcagggatccgcctgcctctgcttccctatcttttctagctttctaaagctacattaaaaaaaataaggcttagaatttttgtaaactaacatttgttcttaacatttcattccaagcttttactgttctcttttgtaactttaagaacaattccttttgacattagtttttgtctgcatgcatctgtaagttgagaccaaaagagcaaaataggcaggtaacatttatgatgtgtatatattgggacaaatatacaaggattgcaaagattagaaagagtcatggaaactgcttgatttataaatgcatcacttctggtgcttgataaaatgggatatattgaactaagaaaattgtatatacagtatgtcagcatttcttactaacttctcttgaatccatttttaatatattgtacaggttggggagttatatatactcttcaagccaatactgtccagactgtagatttataaaataaattgaaaaattcatcattctcctgtattcaggaccaaagcacataatgctaatgtagggctcagaggggaaatatagttctcctgcatatttgagaaaatgtgaagtcctttcaagaaaatgtaataaacataataatcatagcctgctgacactaaggaaaaagggcctcattcactctttcttttatgcagcgattcactggtctctgctgatttcaaattgaatcattgtagtgaattatccatgctggtacctatgaaagtaagccctaggatccatatttgttttgtgttctgcttaaatcagcaagaatgataaatttgatggtgtgaaattggaagtatcaagggctttctttgatgattgagcaaagtcttgtctccacctgtaattttttgtgacccttttcactgtgtgtgcttcatatgtctaatatttatttcaatgcaaattaaattgttcttccttcatctataatgttatacctaacattttactgatgtaaaatcaaattgtataataaaagtcttcctggatttaa

SEQ ID NO: 164 - DNA, 3470 bp, Cricetulus griseus
gggatgccgtcagtggtccccgggaggctcgaggtagatcatggaagggaagtggttactgtgtttactcctggtccttggaactgtagctgttcaggctcatgatggacatgatgatgacatgattgatattgaagatgatcttgatgatgttattgaagaggtagaagattcgaaatcgaaatcagattccagtactcctccatctccaaaggttacctacaaagctccagttccaacaggggaggtttattttgctgactcctttgacagagggtctctatcagggtggattttatctaaagccaaaaaagatgacactgatgatgaaattgccaaatatgatggaaagtgggaggtagatgaaatgaaaggacaacaaagcttccaggtgataaaggacttgtactgatgtctcgggccaagcatcatgccatctctgctaaactgaacaagcccttcctgtttgataccaagcctctcattgttcagtatgaggttaattttcagaatggcatagaatgtggtggtgcctatgtgaagctgctttccaagacctcagaactcaacttggatcaattccacgacaagactccctatactattatgtttggtccagataaatgtggagaagactacaaactgcacttcatctttcgccacaaaaaccccaagacaggtgtatatgaagaaaagcatgctaagaggccagatacagatctgaagatctattttactgacaagaaaactcatctttacacattaatcttgaatccagacaatagttttgaaatattagttgaccagtatgttgtgaacagtggaaatctgctaaatgacatgactcctgctgtaaacccttcacgtgaaattgaggacccagaagaccagaagcctgaggattgggatgaaagacccaaaataccagatccggatgctgtcaagccagatgattgggatgaagatgcccctggtaagattccagatgaagaggccacaaagcctgaaggctggttagatgatgagcctgagtatattccagaccctgatgcggacaagccagaggattgggatgaggatatggatggagaatgggaggctcctcagattgccaaccctaaatgtgagtcagcccctgggtgtggagtctggcagcgacctttgattgacaatcccaattataagggcaaatggaagcctcccatgattgacaatcctaactaccagggagtctggaaaccaaggaaaataccaaatccagatttctttgaagatctagaaccttttaagatgacgcctttcagtgctattggtttggagctctggtccatgacttctgacatcttttttgacaactttatcattagtggtgaccgaagagtagttgacgattgggccaatgatgggtggggcctgaagaaagctgctgatggggctgctgagccaggtgtagtggggcatatgctggaggcagctgaagagcgtccgtggctctgggtggtctacattctgactgtagctttgccagtgttccttgtgatcctattctgctgctctggaaagaaacagtccaatgctatggagtacaagaagacggatgctgcccagccagatgtgaaggaagatgaagggaaggaagaagagaagaacaagggggatgaagaggaagaagaagagaagcttgaagagaaacagaaaagtgatgctgaagaagatggtggcactggcagtcaagatgaggaagatagaaaacccacagcagaggaggatgaaattttgaacagatcaccaagaaacagaaagccacgaagagagtgaaataatctaaagaacttgatctgtgatttcctctcccttcccttcccttgcaagtgtggtcctaggagagggcctggtataccttaggtgggaactcagaaaacctcaagacgtcaccatctacaggttccagtgaatactagtctgtaattttaaacatctagcagtaaataattgcagttgtaatgtaaaggaccctgtttctgtagaaaagaacatttaacataatggttgtgaaatgtaacatgaagcaactaacttgtgtttttgttgtttttaaaatctttgggttctcttcccccctttcctttcacttccttttttagtattagtaatgatagaatatttgccagtttaaaatcttggcttaatttaatatattaatctgttcatgcagaaataacaccaacattaggaatgctagggagaatgaattgcagtttttataacaattttttttaagtttggtattaaaacattcatgtgtctctgtccttaaaattgtaatcacgttcaagtgcagtcatttgtggttataatcttgttttgtgtgcttccttaattcctcctaaggacataggagaggaattggatggaagcccaaatttatatcaaagttccttttgagttgtattgactagacccaaaatgaactaaaaggagacttttcagttggtgttggtcagatcataaagtgcagtgttctgttgcccttgggactgctccattcacagacagctttgcagaggagaggagctggcttaatgcagcagtttgcactgtacttcccacataggaggccagactgctcacatccttgggagcacacggctttttaaggaatgctggtggtgcctaagtagacaacttcatcacttgttccactgtgttgacactgttctcatggatctcctcagtccccagctttctctgctatgcatttttcttcacagcgcagcttgcagtccgttgctgaaaattataagctctgcatagtgttagctttactgtgattacatctgtttcttattttaagcaggcccgtacctttccagggtccaactacaggatagattacagacttcattagtgtctatttcttttactctgtgtagacttaagaaagtctaatccagaggtgggccaattcagaattgactgtaattgaacatagattaaaagtgttgatgggaggcttgacacatagcatgagttatttgacttttgtaggatatttaaaatcttcatttgcagttcatgtaacagttgcgtcttaaaattcacacaataaagcagtcctgttcaaaaaaaaaattttttaatgtggcttgaagagttttttaaaagtgaatttagagttgttttgtttttttgttttgtttttgatgtgaaatgcagatgggtgctagaagagcctcttccccatcactacagtgtaataatattacaccatactgaaatgtattcggaaacagatgtttcaacttcattctttctctagaggcgttccaattgtaccgatgatactgttgcttgcactgaatatatataaacacgactttgtgtttatattggggagatactgaggaagaaatatatttgtaaaggatgtaggctgtgttatttgttgtactggttaaaacaactggttc

SEQ ID NO: 165 - DNA, 3467 bp, Cricetulus griseus
tcttaaatgatgagatatattgcccaccagaaactgcagttcttttggcttcatatgctgtccaagccaagtatggagattataataaagagattcacaaaccaggatacctggctaatgacagactcctaccacagcgtgttttggaacaacacaaactgacaaaagaacagtgggaggagagaatacaaaactggcatgaagaacacagaggaatgctaagggaagattcaatgatggaatacttgaagattgcacaagatctagaaatgtatggtgtcaactactttgaaatcaagaataagaagggcactgaactgtggctgggtgttgatgctttgggtctgaatatttatgagcatgacgacaagttaacacctaaaattggttttccctggagtgaaatccgaaatatttcatttaatgacaaaaaatttgttataaagccaattgacaaaaaggcacctgattttgttttctatgctcctcgtctgagaatcaataagcggattttggccttatgtatgggaaaccatgaactgtacatgcgaaggagaaagcctgatactattgaagtacaacagatgaaggctcaggcacgggaggaaaagcatcagaagcagttggaaagggcacaattagagaatagaaaagaagaaaaagggaaatagcaagaaaaggaaaggaaagaatagagcgtgagaaggaagaactgatggagcgtctgaggcaattagaagagcagacaatgaaagcccaaaaagaactagaagaacagactcgaaaagctctggaactggagcaggagcgccaacgagcgaagaggaggcagagcggttagacaaggagcgccgggctgcggaggaggccaagtcagccatagccaagcaagctgctgaccaaatgaagaaccaggagcagctggcagcagaacttgccgaattcacaaaaggaagaggaagctactgagtggcaacacaaagcttttgcagctcaggaagacttggaaaagaccaaagaagagttaaaaactgtgatgtctgcgcccccaccccctccccctccaccagtcgttcctcccacagaaaatgaacacgatgagcatgacgagaacagtgctgaggccagtgccgagttgtccagtgagggcgtgatgaaccacagaagcgaggaggagcgggtgacggaaacacagaaaaacgaacgtgtgaagaagcagctccaggcattaagttcggaattagcccaagccagagatgaaactaagaaaacccagaatgatgtcctgcatgctgagaatgtcaaagcaggccgtgataagtacaagactctgcgacagattcgacaaggcaatacaaagcagcgcatcgatgagtttgaagcaatgtgagagctgttcttgtgatacatgtccttcataagctgaaccaccaccagagaaaagcaggcctttgcagatgcgatggaatgcatcccaccttgccaaagcactcatgccagttgactgtgctcactagtagaattctgaagggtgctcttcagcattaaggcagtgtaatgtcatgtatggtcatttttcttttggccagggaatggataatgctattctgtcacctctttgtacattttcattgttttgtttctgtttcatttttttcagttgaatattagcactaatgaccatgtctgataaatgtgtgtgtgtgctttgagcactgtgtacatcttaggataatggtggacatctcaatgcatgcttagttaatgaactcaattttgtttgccctttccatgtttgaccttcatacattttcatgttcactctcatgttttttcagtgtggccttctcatgccctgtcatgacagagccataattctggtgtcatacagatcacttactggaggtgtttaaaatgaggtattgaggtaaacagacagggtggctttccttgcctgccactttggagatggagcctgcaggcagcagttgtaggagaattcattgatgaagcgctgccttcgaggaagtggtctctgaaaaaaattcagtgtttattcttaggttgcttcagaaacacgatgtctaatgaaaactgctgataactgattttaaatggtaaaaaaacaaacctggaaaattcttgcaaaggcagcagatgcaagtatcagttttaagaaagtaatactacctcactacacctgtggtgactgttcacacatactgtgtgtgtacaatgcatgtctgttatccatagacagtctcaatcatgtccttcattgagtgtactttggagattccagtgctaatgttttaactgcctttctgttgaattgtggggctttgatgtgttcagattatatgttctcactggtatgctgtttcctgaggggtgttctgtgtctgaggaagtggagtggccctttgggagacagaccctgcctttgcagcatgtgaaggattctcatcctttattcttgatgaatagcacaccatcttagcgtatttggtttctaaatcactgcttatttgtttgcagtctctaaaaacaaatctcatttcaattacgtcttattgaagaatctttccagctagaaagatactcttatgttctttgatcatgaagtacctgagtttgaagatgcagaaaaagccttgttttctctgtgtggttcagctatgttccatttggtattatgcactcaaacttacatttatctattacaattgccattttattaagcagttttcatgcacagtagatttcaacttgttgctgtttttttgattttgctgactttaaaaagaataatctgggcagacattatgaaaaggaaaggccttgcttaatatatttttttgaactttgtaggacaaaagacaactggttaaccttgaagtgactgttgtacagtggttatacacatgcttcaaaatcatttgtgagggagtgttttctgctttccatacatgagagggagagatggtaggccttactactctactttgaaatatgagccttcactttcccaaagcactagagcaatagtccttactgctaaaagaattgatttcccatggattttcactgatttcccgtttgcattgtgtacattatcattactacaccagttgttacagtgttgagaggctaccagttatatttgctgttaatagtctatttgtagattaggatttaaatgggtttaatccatttttaaagttgtatggatttttctaaacaggaacagccatttgcaatatgagttttcatagagattaaactaattctaacgtttatcattagcagttgagagcacatgttcatatagcaatgtaaaaacacactaatgagatgagtatttgatattttcccattagcataatttcatgttgtacaagtaaattacaattacatctctaattttggataatattcattggttaacaataaagtgacaaaagctc

SEQ ID NO: 166 - DNA, 3461 bp, Cricetulus griseus
  modified_base (2043)..(2043): a, c, t, g, unknown or other
gaggaggaggaagatggcgggagggcggcactgaggagacctcggcggcggcggaggaggagagaagcgcagctccgcgcagcgccggggcccatgtggggaggagtcggagacgctgttgccgccgccgcctgtagctgccggagcctggtgggagtgagggggacacggcaggatgaagttcgccgagcacctctccgcgcacatcactcccgagtggaggaagcagtacatccagtatgaggcattcaaggatatgctgtattcagctcaggaccaggcaccatctgttgaagttacagatgaggatacagttaagagatattttgccaaagtttgaagaaaaagtttttccaaaacctgtgaaaaaggaacttgccaaaaatcaaacacaattttactggggtctcttcgataagaatgcaggagaaaacactttcctccgggaagaaattgtataccctcaaaaggcctactactactgtgccatcatagaagatgtgatactgcgctttgcttggactatccaaatctctattactgctacagcttttcagcctcatgttggagacatcattgctactgtctttgctccccttgaggttttccgacgatttgtatggaacttcttccgtctggagaatgagcatctaaataactgtggtgaattccgtgctgtgcgggacatctctgtagccccactgaatgcagatgatcagacactccttgagcagatgatggaccaggaagatggggttcaaaccgccaagaagaatcggtcatggaagtacaaccagagcaatatctctgcgccggcctcgccttgcatcccaatccaaggctcgagacactcttttcttttcttctggtttaatcttcattttctatttttaaaacaaatacttcattttgccaatcagaggatgttttaaggaacaaaacctaatatcttatggattgtttacaatcacaaagacacagatgcccatccggatgaagaacagccattgggaggaggcctctgatagacggcatggacgtaactcagcttccgcctggcccggttttgactgtttgaaaccggacactggttttaaatttctgtcagtttctgtggagaattttttcccttccttcctagccagcatagaggcactggcagcacttgcagggaaagtgctgcttggagcagcaccccactccacgaagctactttttaattttttaactttaagccaaagttttattgctaaattttaagttgctgctctagagtcccaagtgttactgtcatgacctggcaccccacttgcttcccactagtagacattcagtgcaaaggttctgagagttgtgtctttaggaacaggtgcagggtacatccacccatataccagtcaacagtgaagttctgccctgtgctctgcatgcgggagaagtgtagcctaagttttactgacggaatggaaagacaatccgatctcagactcttcacaactctattcagtatttccccttctggtgtcatctaccttagccagaatttgatcaaattcaaagtctttgtgggaatgtactttgagcatgtagaaacaaatccttcaatgttgtaggttctgttgcttcttgtgttttgtcaagcatgtcccttgccccaacactaaagaacaaacatttatttaagaaaaattttaaataaactgtaaactttataataatcagtggtaacaatttagagacccttggtagattaaggttgcattatttctatttagaaattttttcctaacaattctgggttttgtactttaaagcaggtggtagatttcactggtctctgaggtgacagcagcaattattaagaatataggaaaattccagtggcaaatcatttcttgtacaaataaaattagtggtactgtgtatccagagccatgtgaattatcagcttcttagctctaaagagattacttaatccaaagaatttgggaaacaaagtatacattacggttttccttagaaaaaggcaatgtgcatttttcnctcctcactttcatctgccctaggcactgtgagcactgtgtcttgctagtgttcacttgggtaatcctgtgccctgtgggttagagctgattatattatagcatcagtttgtggaatgcagtgtgggaaatcagccttctagccagcattaaccacactctactcaataaatagtagaaaaaaagcaaaagcatctcattagatttgagagctaaagttagacagtacaaaatttgccagaaggagaagaggtgcttctgggtgtggcccctgatgcctttctcacatgaactttcaaaaccgatactgagttgccccctagaaacaactttcagaatatatttccttatgaagaatgaggaaataagggagacaagatgggtttccctaaagtgtggagaatcatatcaatttacaactgaacatgtttccttgtagcaaaccttcggtttattttattaaaccattgccagcttcatttttttttgtatggtgccatccacctacggaggacaatcaaatgacctattgtttgccttggattcagtgtgtattgattgagtctcatcttgtgtacctttgaacttaatttctacttgatgcctatccatgtgaaccaccacaagtcagagggcagccggcagcactttgttggacagatggggacttgtgagaaatggcagggtcctgcctcactgtctctcaaacactatccctaaagttcttacctgcacttctgccatcatccttaggaactctagtgtgctgtggatagggagaaagaatgtctgtaacattgttactgtttttgaactgttatggtaaaagtgtaagctactcctatttcagttgcaaaaaaagctggtatcaatgaagagtaggaaggaaatagggtaaaacttgttattttcctttaaaccctctccctctactgtgttacacacacacacacacacacacacacacacacacacacacacacacgtacgtgttggtcagatgatgctgtcctgtgactccctgagctatagttgtcaagagtaactatggattgtgattagtcctctgtgggtgactcttgtcccatttcgcccccttgctttctttcctactctccactctggtgaatggaaaaggtgacgtcaaggaatcaatgcttgcttggactcacgtcgtatctgtgactatgctattagctgtctcctttttccttcttatatgggtagaattcttatgacctgtggagttcccttctgaataagtagactaaatgcacaatgtggtactgttctatagtttctagatggtgtaaaaagcaaaaaaaaaaaagttaatgtgcttatgtggttttaaaagaaaataagtgattggttacaaaactctggcctttttcattattacaaagctctgttttccaa

SEQ ID NO: 167 - DNA, 3461 bp, Cricetulus griseus
cttcccatgagcctggcggctccacagcttccaccagcctcccccagccagcagcttggaccagacgcctttgcgatcgtggagcgagcccagcaaatggtggagatcctcacagaggagaaccgtgtgcttcaccaggagcttcagggctgctatgacaacgccgacaagcttcacaagtttgaaaaagagttgcagaggatttcagaagcctatgagagcctggttaagtccaccaccaagcgtgagtctctagacaaagcaatgagaaacaagctggaaggcgagatccggagacttcacgacttcaacagagatctccgagaccgactggagacagccaacaggcagctatccagcaggactacgatggcttgaaggaaaaggaaaagttggaaatggagttggcagcagtgcggaatgcaagcgaggagcatcggaggcacattgagatcctagaccaggctttgagcaatgcccaggccagagtgatcaagctggaggaagagttacgagagaagcaagcctacgtggagaaggttgagaagctgcagcaggccctgacccagctgcagtctgcatgtgagaagcgagagcagatggaacgcaggttacggacctggctggagagggagctggatgctctgaggacacagcagaaacatggaaaatggccagccagccagtctaccagaatataacgcccctgccctcatggaactcgtacgggagaaggaggagcggatcctagccttggaggcagacatgaccaagtgggagcagaagtacctggaagaaagcaccatccggcactttgccatgagtgctgctgctgccgccacggctgagagggacaccaccatcatcaaccactcgagaaatggcagctatggtgagagctcactggaggcccacatctggccggaagaagaggaggtggtacaggctaacaggaagtgtcaggacatggaatacactattaaaaacctccatgctaaaatcatagagaaggatgccatgataaaggtccttcagcaacgatcccgtaaggatgctgggaagacggactcttccagcctgcggcccgcccgctctgtcccttccattgctgcagccacggggacacattcccgccagacttcacttaccagcagccagctgatggaagagaagaaggaagagaagacgtggaaggggagtatagggttcctgctggggaaggagcatcagggacaggcatctgcccctctgctgccaaccacacctgcctctgcactgtcccctcctgcttccaccacgttggccagcagcacccatgccaagacaggcagcaaggacagcagcacacagacggacaagagcactgagctcttctggcccagcatggcttccctctccagcagaggcaggctgagcactgccccatccaacagccccattctgaaacatccagctgccaaagggaccatggagaaactggagaactctcctggtcatgggaagtcggcagaccacagaagccgcgtgagcagcttgttgcacaagcccgagttcccggatggggagatgatggaagtgctcatctagcctcgtcctgtgggtagcaactacaaagccagagcaggtgtggacgcttcataatgttaccaaaacagccggctcacaggactgcagagggagggagagaagatgtatacagacttggaagcagagttgagaataggagggattgtccattgtagagaaatagtatgtctggggaggccccatacttcccctattcttggtttataaacagatgaagaagagctgggccttccttggaatcaccccattccctttgcctcttagcaggtttggtttaagaagtaatctgctaagaaatcctagactcagaagaggtgtctcagccacaggctacacagccttgaacatgatgtgcagagctgtgtctggtgctctatggccccatttgtgatacttgtgtgcatacagggaagctgtcacacctcttggggcctgagaacaggactaaacccaaacctgtcactaccaaaccactactacatcctcagttggggatggaagtcttcatgttctgttaaaggcacaactacaaagcagatatttaaaaaacaaaaaaaaaaaaaaaacttcctcacagagcagaggtctagtcttcaggactcccagggcatttgctcatagaacctgaggctcttgtgtcagggtatagggtaaaggcagtggctttcagtgatgacttcaccagcatcccactttgtccttgagtgggccgtgcagtgatgtctgtgtgcctccaggtagaagatcctactgtttgccatgagctttctgcttgggaggaccacagaggtccccagctaaaacctgttgttgactcctgcagcagaatggcctccagggtctggcacattcctctgattccccgggaggtgagaggtccttgtctattgaagatggatttaagttggggaataatcccaaattgttcacatcgaaagtggatgaacacagaaggtaattaatcagaataagagtcccaggaccattaagatgcctcagtggaaaaggcattgccaccaaagccaagacctgagtttgatcctcaggactcacatggtaggaggagggatccagctcctgcaaatggtcctttgacctacacacacacacacacacacacacacacacacacacacacacgcgcatgcacgcacgcacccagacagacacatacacacatgcacactcacacacacatgcaaacacacacacacatgcaaacacacacatatgcaaacacacacacatgcaaacacacacacatgcaaacacacacacactctgccctccctccaaggtagtgcgtatacagcagtttctagactcagcttctccagttttactgcctgtgttgtgtttgctcgtgactttgcctgggagtctgctctcacgtacatacctgtgagtatttattgcaaagcaggacagagacaggcttagccacagtactggtatttgaatgttttctaggagggacggtggtgccttctcctcagtgaggcactgacagactctgtcaaattctgtgaaacagggccagcactggcccagcttcagcctgactgagtgccctggggccactgccctttccacttgccttgtgtgtgtgtggttgtggttgtgtgtgtgtgtctttgctgggggtatgtgctgcactgcccagcatgctctggcatccatgtgtaatctttggcatcttggtgtcactgcgctgtattgagaggtggtgtacagatctgtacagatgagtgtgcggggagggggagtcctgcacagtgaatgtgaatacagttggtcagccaaagattttcctgtcctttgctgcttaaactttgtgccttaatattgtaaataataaatgggtcaacagcaaa

SEQ ID NO: 168 - DNA, 3455 bp, Cricetulus griseus
ccttggagtataagacaaccaaggctgacatacaaatgccattcacctgctctgtgacatattatggaccctcaggccagaagacaattcattcagaacaaacagtctttgatatttactatcctacagagcaggtgacaatacaagtgttgccaccaaaaaatgccatcaaagaaggagacaacatcactcttcagtgcttggggaatggcaacccgccccctgaggagttcatgttttacttaccaggacagcctgagggaataagaagctcaaacacctacacactgacagatgtgaggcgcaatgccacgggagactacaaatgctcgctgatcgacaaaaaaagtatgattgcttcaacaaccatcacagttcactatttggatttatccttaaacccaagtggggaagtgaccaagcagattggcgatgccctgcctgtgtcgtgcacaatatctgctagtaggaacgcaactgtggtatggatgaaagacaacatcaggctccgatcgagcccatccttttctagccttcattatcaggatgccgggaactatgtctgtgaaactgctcttcaggaggttgaaggactgaagaaaagggagtcactgacactcattgttgaaggaaaacctcaaatcaaaatgacaaagaaaactgaccccagtggactgtctaaaaccataatctgccatgtggaaggctttccgaaaccagctatacagtggaccattactggcagtggaagcgtcattaaccaaacagaggagtctccttatatcaatggcaggtattatagtaaaattatcatttcccctgaggagaatgttacattaacttgcgcagcagaaaaccaactggagagaacagtaaactccctgaatgtctctgcgataagtattccagaacacgatgaggcagacgatataagtgatgaaaacagagaaaaggtgaatgaccaggcaaaactaatcgtgggaattgtagttggcctcctcctggctgccctcgtggctggtgtcgtctattggctgtacatgaagaaatccaaaactgcatcaaaacacgtaaacaaggaccttggtaacatggaggagaataaaaagctggaagaaaacaatcacaaaacagaagcctaagagaggagtggtcccaggtctccagagaaaaaccatgtagacaaattgaagcatgaacgtggattgtatttaagacatatacaaagacaatgacagcaattcatggttcaagtattaagcagttcatcctaccaagctgtcacaggatcttagagaattatctcaagtaaaacaatgaaacaaagttataaaacaaaataacaacaaaatttggcagccatgataataggtcatatgttgtatttggttttctttttgtttctgtaaatgtctgcactaaggatttcctttcagtttgccttttatgtaaattttttacgtagctatttttatacactgtaagctttgttctgggagtggctgttatttggatgtataatgtaatgttttatttcaattgtttatatggatagtcttgagcaggtacagttctgattctgattgctatcaataatgccccaaactttcttaccaggacctgaaacccaaaggtggcagtttgtgaaattggagacacataccttgcccagtcagaagccagtttcttagaatggtacaccctaactgacagttttgtcttctctgagaaagacgaacacagaattggggtcccatttacttattgacacctgctaagaaattacattcagtcaaaagaaaaattagaaaaaaaataaggaaaataaaacacctaatgtgtcagagaaagttggagaaatacagctagcattcccattttcacagatcacaatgtaaatctctgtaattagaattggtgttaaatcctttgggttatccactgccttaaaatgacacttatttcctttaaaaaataaaataaaagatatcagtcagaattgaagatttttaacagtggtcattattaaagctgtgttattttccacagaatatagaatatatatttttttcgtgtgtgtttttgttaactacgctacagatattgaatgcaccttgagataatttagtgtttttaactggtacataatttatcaagcagtacatgaaagtgtaataataaaatgtctatgtatctttagttacattcagatttgtaactttataaacatgttttctgcctgaggaactttttaaggaggtagtgtacatggaaactttttgaagtagactggataagggccagtatcggtttgtgacttcaatctttgctctttcaggtagaagcttggtttctgggatcacactgcacagccattttgtcccagatttacgtgtataactttaactggaaaaaaagaaaaagaaaaatgactattagatttccaggtatagaactctgttctttgagagaaaaggaaatgtggtgtttgcttttagactcaaagaataaactgttttgaaggcaatgagaaacgaatcaaagattaatctctgatggaggttgggaataatcttttgccacttctgcatactgagagatgtgtctttgtacatttgtaaccatttgatatctgagcaatagtgtctcagcctaataaaagcttcctatagtacattggtatggattaaatgcataaaatattctattagaatcaatgctgtaaagaaaacatgttattttgcctctaaactttgatttattgaagtttaatttggcaagaaaaaaattgaatcttgatcaatatttaaaccaaagggaaaagggaaaaacaaaacaaaaccaaagttctttgttttgcatggctaagccattctgtttatctctgtaaatactatgattttctttttgttttcttttctttttgaattttgttaaagaaattctaaaagtttttaaaaacacacctgcttttccataataagccatgaacactacaatgagattagttccgtattattattttttctttgtttttttttctttgttttgtttgcattttattttcttcttttggtatgggaggtcaaaggtttaaagtcttactctaagatgtgtttgcagaaaaaggaggaagctcactctctcaagagcaactccgtgtgctgtcaggctggaaggaaggtaattcgctgtcttcaactcctggagtttcttctctccagttgtactcgttggcaacaggtttttaaccagttcaaggttcactccctatatgtaattataggaattgtatgtggaaatggattaacatatccctctatgcctaaaaaaaaaaaaacgaaatatgtcttcacatatccttcatagctgtctgcctcttgtctgcaataggatgttcatgtacaaaagtgaatttctttaataaaaagtgaaaaagttgaaaaaaaaaaaaa

SEQ ID NO: 169 - DNA, 3449 bp, Cricetulus griseus
atgcaagagttcaccaaattccctactaagactggccggagatctttatctcgctccatctcacagtcctccacagacagctacagttcagctgcatcctacacagatagctctgatgatgaggtttccccccgagagaagcagcaaaccaactcgaagggcagcagcaatttctgtgtgaagaacatcaagcaggcagagtttggacgccgggagattgagattgcagagcaagacatgtctgctctgatttcactcaggaaacgtgctcagggagagaagcctttggctggtgctaaaatagtgggctgtacccacatcacggcccagacagcggtattgattgagacactttgtgccctgggggcccagtgccgctggtctgcttgcaacatctattcaactcagaatgaagtagctgcagcactggctgaagctggagttgcagtgttcgcttggaagggcgagtcagaagatgatttctggtggtgcattgaccgctgtgtcaacatggatgggtggcaagctaacatgatcctggatgatgggggagacttaacccactgggtttataagaagtatccaaacgtgtttaagaagatccgaggcattgtggaagagagcgtgactggtgttcacaggctgtatcagctctccaaagctgggaagctctgtgttccagccatgaatgtcaatgattctgttaccaaacagaagtttgataacttgtactgctgccgagagtccattttggatggcctgaagaggaccacagatgtgatgtttggtgggaaacaagtggtggtgtgtggttatggtgaggtaggaaagggctgctgtgctgctctcaaggcccttggagcaattgtctacatcacagagattgaccccatctgtgctctgcaggcctgcatggatggattcagggtggtgaagctaaatgaagtcatccggcaggtggatgttgtgataacttgcacaggaaataagaatgtagtgacacgggagcacttggaccgaatgaaaaatagttgcatcgtatgcaatatgggccactccaacacagaaatcgatgtgaccagcctccgcactccagagttaacatgggagcgagtacgttctcaggtggaccatgtcatttggcctgatggcaaacgggtcgtccttctcgcagagggtcgtttactcaatttgagctgctccacagtccctacctttgttctttccatcacagctacaacacaggctttggcactgatagaactctataatgcacctgagggacgctacaaacaggatgtgtacttacttcctaagaaaatggatgaatatgtggccagcttgcacctgccatcatttgatgcccacctgacagagctgacagatgaccaagcaaagtatctgggactcaacaaaaatgggccattcaaacctaattattacagatactaatggacgcattacagtgaccagtccacatgaaccacccaactctaatagagtattttttaagataacttttattttcctcttattactttctttttgattttttttctataatttcattttgttttctcatctcatcattcaagttttgcagaccacacaggaacttgctccatggctctttaggtgaagctgaggtcaaaggtttctcaccctagtcactaaagaagggtttaactctgcagcccagaaagttaattctttaaccatttctggggactttggttatatttaattaccttattaacaaaaatgctaaggtatcgtctatgtggaacaatctgcagtgtctaaattgccttaaaagagccagtttcttagcggctggaactagtgctctttcacttcttcagaagagccagggtggtacttcccagccaggtaggttagacgtaggtggtgcatgtcaacttcccctagaacctctaagccctgtttcctgtttaaggtggcatgtctggcgcagagatgtgttgttaaactcagtaggtttacttggatttgtagttcagtccttccaccagtctctcgttgttctagtttttaactaaactgcattctatcaagttgaatttcgtcccttagcatttatttctgttgtatcttaattaaggaaaatttttagtgttaacactgaggaacagctcagatggttagttaccagtatctcttttgaacctttaaagcaaagtgtgaagagttgaggctagaaaaatacttagtctccaactctgatgtttccagcccatagtttattatagcatcagcgaactggagccataagcaaaatttcttagctgtgcctcatgcagcttatgctgacggccaatttcttgagccattactcagtataaaacactgagccctgtctttagggcttatcctttaagagcaaacttgtgggcagctgtgcttctgcaacctaaactatttgaagggaagtctgtatagatgggaagaaataaattgggccaacgtgaaacaacgataactatataatctgtccagaactgtaggccttgtctggtgttagttttatagacatggtgccacttttgattgacacttgccacaaaaataaataaaaaaattataaactgagatcttaaggaagagttggtagaaaaagtacatcctgattcacgctccaagataattccaagaggccctctaacgatgagagatttactcccaggccactcagcccgcttgccagctctgcatggttgaatgagcttcatgctcacaagctttaagtatataattatccaggattttaagtcctcaacgtgttctagcttgtgatccttcaaagacagacgggttatgcgttaattctaggtactagaaatgttcacttctctctttccactgatcagagaaacaggcatcaaaaacagaaatacaagaaaggaaagcttttaccctgtaccttcctagcagggaacaattatcttgccaaaacttctttacctttcctcacccatttctccctacccagtcccttcctgctccttgccaatgtgatcatgctttcttctctatatatgctaacatttgaagatccctttcctagggcacttaaccagccagtcagaacaccacattcagtagggacttatcttggccaacaacagtgtatccatctggtgagctctgctggagggaagggcccagttcttgctgccctttaatctgccctctggtcctgtgtctattactgtgtccataggaataataggtaagggctcgtctctgtcaagccatgtaacaaaggacactggaaaatgtctggcatcagagggaacatgcggagaccaacttgggaggaaaatattcattttgtattgaatgatttttaatgaatgcaatattaatccttgcagatgagcaataatcattaaagtcaattacaatgtaaaaaaaaaaaaaaaaaaaaa

SEQ ID NO: 170 - DNA, 3445 bp, Cricetulus griseus
  modified_base (816)..(816): a, c, t, g, unknown or other
aggccaaaaagacaagcgaaacctgccgcagacgaaggcttttgggattgtagcgtctgcaccttcaggaacagcgctgaagcctttaaatgcagcatctgcgatgtgcggaaaggcacctccaccaggaaacctcgcatcaattcccagctggtggcacagcaggtggcacaacagtatgccactccacctccccctaagaaggagaagaaggagaaggtggaaaagcccgacaaagagaaacctgagaaagataaggacatcagccccagtgtcaccaagaaaaataccaacaagaaaacaaaaccaaagtctgatattctgaaagatcctcctagtgaagctaacagtatacagtctgctaatgctacaacaaagaccagcgaaacaaatcacacctcaaggccccggctgaagaacgtggacaggagcaccgcacagcagttggccgtaactgtgggcaatgtcaccgtcattatcacagactttaaggaaaagactcgatcctcctctacgtcctcctccacagtgacctccagtgcagggtcagaacagcagaaccagagcagctcggggtcagagagcacagacaaaggctcctcccgttcctccacgccaaagggcgacatgtcagcagtaaatgatgaatctttctgaaattgcacatggaattgtgaaactatgaatcagggtatgagattcaaaccctccacctgcccttgctgcttgcgccctcgagagtcttctgtggacggccttgtagtgatgccaccaggagaggttcgggctttgaccatttggaagtaacaaactagntccagaatgccaagtattcgtgtaaattacggttacatgttaacattgctgttcttattaagcactcatgaaatacgtgttctgtatcttgaattccggcctttttcagacctctgctcatgcctgaggcacatctagcagctgtctcttagttctagggttgcagtagtgcatttttaatccacaccatctagggaagcagtcccgtgtctacttcccctgtgacattgcagtggtggattttgtgatcatggtctgtttgccaccccacccccaccctccaaaccctcaccctaccaatgcagttgttagtttgttttcttcttaaaaccttctatggttcattttactcaacaatggttgtcaaccacacatctagacctgacagagatcttccagtctctggggtcatttcttcgctccttgtgtggaaaaggactgcagggtctgctttgctcttagattcagggtatctctcctatctgactttaccttcatatccactgagtttgtagtacttaagtcactttaagcatgagaacgtggtgttaaccttcctttatttgatcacactcttaaggactcgtggaagagtgtgtaaggaaacaccacattttggtgttaaccgggtttacttaataatagaactaatttctatctgtggaggcaacaagttaagaacatattaacagcttgaattgagtagccaacaggaacggttccattcacatttacattaaaaccagtcatttgatgcgccgtagtctacgttctgtccgcaaaggcagtgctatttgtcgctgggcccctgttcgcagaagcatggacaatgctcccctctttttaaaacagtgcttgtgtctgggatacaagctgtacttacctttttaaatacctttttaaagtatttattaatgaaccaaaggaaatgaggtgctttctgtaagcatcagaatatataatacatagtgatttgactatgaattttaaatccacattttaatattagtggggtattgcaaagacattccttctaaagttttaatattccttttattaagggtctcagggagggttaattagtcagccatatttattttccagaggtgtaaggaattgctaagttttttaattaactttttaaaaaatttaaatgccaccaaattcatgtggattgcactgctctttgaaccaataagtgttggtatgcactttgttcagaaacactgtgtactttttcaaaacgagtttcatgtaaagtgattggaccccctagattagtgggaaaggctgatttaccagctcctcataggctactaattcattcatcgctggtgtcttggtttttcagttttgcctccgtgataaattaatgaggagaagtgaagggagggaaggaccacttcagaactagtgaacttgccttgaggtagaaactgcagctgacagctgcggagtctaagcaatcagatgttcctggctgccctgtcgctgctgtcacaggctctgttggggtggagaggtgtggtaggtgctaaacgatgacatcctcaggcatgcattctggaaatggaattcctattagcttcctgcatttacagtttgccctactatagtactcagtaggtaaaaacactagtgtagcttacaaagagactttaagaagaccagaaatacttggtattcagtggcacagaaagcatattaaaacaaaaagcacagtgttaaggcttgcaagtttcccgtatgtttagtacatgatccttcacactcgtgtgcacatgcacagagctgacctgacttgctctgcccgagtcatgcagttgggagaagataaaaagacatcttgatacccacaaaaatattttaatcaaaacctttcagtttggatctggatacttcaaaatattggcagaagcttctgtgagtttagctccactaagatgtctcgcctgccttatcaagaccattctcagtctacatttgtaagctaccgtatctttaaattattgagaatttattaattgctgaatatataataacctttgcttgtatgttaccgaaaatggtttaagagccaacatttagagtgtgacaatggagctgaacagtttctaacgcgcaagcagttctgttcttgtgtatgacttgtaaccttaatttactgtgtaaagatggttacattatttccttagctttgtttgttggagacagatagcgaatgcttgttaagtatgtcagaacataatcttcccttgtgaacttttgttaacgtcttatacgagctctattttccatttgcccagaaagatggcttgtataatgctttggaagtttctgctccgtccgtcttagagctgacagtctgttaggtttgttttctcttcatgctaaagtgtcggtggttttgtgaactggtcagaaattcacaggtcttaaatgtttgggggaaatttatattggacactgctctttgtctagcaaataaaagatgttaatatattcctgttattggcatgtgcacgactatgttattagaagccactttatcattttcctgctttaaatagaaatgtctatttatgaattctgcttgtagttttttcacaaataaaataagtaaaattta

SEQ ID NO: 171 - DNA, 3445 bp, Cricetulus griseus
gagtctaaagttgtgtggagacactaccctcaacaatatgcagcgtcagcttgccctcgaagtgattgtgaccctgtctgagactgcagctgctatgctgagaaagcataccaatattgttgcacagactattcctcagatgttggcaatgatggttgatctagaagaagatgaggactgggcaaatgctgacgagctagaagatgacgactttgacagcaatgcagttgctggtgagagtgcgttggaccgtatggcctgtggacttggtgggaagcttgttctgccaatgatcaaggaacacattatgcaaatgcttcaaaaccctgactggaaataccggcatgcaggattaatggccttatctgccattggtgaggggtgccaccaacagatgggaaggaattctaaaatgagattgtaaatttgtcttgcttttcctccaggatcctcacccaagagtccgctatgcagcctgcaacgctgtgggtcaggctactagattttgtcacctggttttctaaagaaatttcatgagaaggtgattgcagctttgacttcaaaccatggaagaccaaggcaaccagagggtgcaagcccatgcggcagctgcactcattaacttcactgaagactgtcccaagtcactgctcatcccctatttagataacctggtgaagcacctgcactccattatggtcctcaaacttcaggagctgattcagaaaggcaccaagttagttttggaacaagttgtgacctccatcgcatcagttgcagacactgcagaagagaagtttgtcccctactatgacttatttatgccgtccctgaagcacattgttgagaacgcagtccagaaggagctgcggctcctgaggggcaagaccatcgagtgtatcagcctcattggcctggccgtcggcaaggagaagttcatgcaggatgcatcagatgtgatgcagctattgctgaagacccagacagacttcaatgatatggaagacgatgaccctcagatctcttacatgatctcagcatgggcaagaatgtgcaaaatccttgggaaagaattccagcagtaccttcccgtggttatggggccactgatgaagactgcttcaattaagcctgaagtagcccttcttgacacccaggacatggagaatatgagtgatgatgacggttgggaatttgtgaaccttggagatcagcaaagttttggtattaaaactgcaggactggaagaaaagtcaactgcttgccagatgttggtttgctatgctaaggaactaaaggaaggttttgtggaatacactgagcaggttgtcaaactgatggtgcctctgctgaaattttatttccacgatggggtgcgagtggcagctgccgaatccatgcctcttctgttggagtgtgcgagagtccggggtcccgagtacctcacacagatgtggcacttcatgtgtgacgccctcatcaaggctatcggcacggagcctgattcagatgtcctctcggaaatcatgcactcttttgcaaagtgcatagaagtgatgggagacgggtgtcttagcagcgagcactttgaggagctgggaggaatactgaaagccaagctggaggaacatttcaaaaatcaggaattgcggcaagttaaaagacaagatgaagactatgatgagcaggttgaggagtcgctacaggatgaggatgataatgatgtttatattctgactaaagtgtcagatattttacactcaattttcagtagctacaaagaaaaggtgttgccgtggtttgagcagctgcttccattaattgtcaacctgatttgtccacacagaccgtggccagacagacagtggggattgtgtatcttcgatgacatcatagaacactgtagtccatcctcatttaagtatgcagaatatttcttaaggccaatgctccagtatgtgtgtgacaacagcccagaagtcaggcaagccgcggcatatggccttggtgtcatggcacagtatggtggagataattaccgccctttctgtacagaagccctcccactgcttgtgagagttattcagtctgcagactctaagaccaaagagaatgtcaatgctacagagaactgcatctccgcagtggggaaaatcatgaaattcaagcctgactgcgtaaacgttgaagaagtcttaccacactggttgtcttggcttccactacatgaagataaagaagaagctgtccagaccttcagttatctgtgcgacctgattgaaagtaataacccaattgttcttggcccaaacaataccaatctacccaaaatattcggtataattgcggaaggagagatgcatgaggccatcaaacatgaagacccctgtgccaaacgcctggccaatgtcgttcgccaagtacagacttctggaggcttgtggactgaatgcatagcacaactcagtccggagcagcaggcagccatacaagagctcctgaactctgcctgatggacggccttaataccacctgccagaaaactaactccaaataaacgtttacccttttgtttaggtttctttgttttgtttttgagcaagagagcagtagtgttgtgtgtaggccattcttctggagccgcgagtgcacaggaaaagcagccctgtgtgcaaagtggactgtgtggatctcatctgacccacggaggaggtccttgtaagccccatggtagcactgcagagtgttttctattgctgtgtcgagtggagagtatggggggatgggcccttgaatgtgaagtgtgtttggcatgtctgcagtagtctcattcactcctcaataaacagcattgaaataccaagaggctcgtgtaagacttgagtgccgcctgtctttggctcctttcatgttttaatacaagagtgatctgatatttttttaaggtgaatgttttacctccacattttctctctgcagtgcagccttgaaagtgtgtctcgtctttgctgtgttaatttaagctcagttatgatgcgactattctgttcacaactggtgttcttgaggtttgcaaatccacccagctttttaaaactaggattgttctgattagatcaaaaaaattttggcttattttttcatcgcaaattgtaattgctttggagccacacacagcatttgaattttttaattttgcaagtattatggctaaaattatttactgaaaatttcagtaaaatgtgtgaattttttctttatgtattaatctcagaaaagtaactgattagctgttgtttctttaattttctaagggatcttcatagatttctgtggaaacctcagtgttaacattttcatagtttgtactaaatttaactgtgatacaaaatgagttttatgcataaatcagaatttaaaattaaacattttttactttaaatga

SEQ ID NO: 172 - DNA, 3434 bp, Cricetulus griseus
gttattgaaaaactgttgacctcttacggatttattcagtgttcagaacggcaagctagacttttcttccactgttcacaatataatggcaacctccaggacttaaaagtaggagatgatgttgaatttgaagtatcatctgaccggcggactgggaaacctattgctattaaattggtgaagataaaaccagaaatacatcctgaagaacgaatgaatggacaagcgctgttcctcacaacttagagagtaaatctccagctgcccgtaattgataacaataaacacactggtgctgttaagttgctcgtaacattatgcttttagaaaaaagaaacaagctcgctgtcaaggagtagtttgtgccatgaaggaggcgtttggctttattgaacgaggtgatgttgtaaaagaaatattctttcactatagtgaatttaaaggtgacctagaaaccttacagcctggagatgatgtggaattcacaatcaaggacagaaatggtaaagaagttgcaacagatgtcagactattgcctcaaggaacagtcatttttgaagatattagcattgaacattttgaaggaactgtaaccaaagttattccaaaagtacccagtaaaaaccagaatgatccattgccaggacgaatcaaagttgactttgtgattcctaaagaacttccctttggagacaaagacacaaaatccaaagtgaccctgctggaaggtgaccatgttaggtttaatatttcaacagaccggcgtgacaaattagaacgagcaaccaacatagaagttctatcaaatacatttcagttcactaatgaagccagagaaatgggtgttattgctgccatgagagatggttttggtttcatcaagtgcgtggatcgtgatgctcgtatgttcttccacttcagtgaaattctagatgggaaccagctccacattgcagatgaagtagagtttactgtggttcctgatatgctctctgcccaaagaaatcatgctattaggattaaaaaacttcccaagggcacggtttcattccattcccattcagatcatcgttttctgggcactgtagaaaaagaagccaccttttcaaatcctaaaaccacaagcccaaataaaggcaaagacaaggaggcggaagatggcattattgcttatgatgactgtggggtgaaactgactattgcttttcaagccaaggatgtggaaggatctacttctcctcaaataggagataaggttgaatttagtattagtgacaaacagaggcctggacagcagattgcaacttgtgtgagacttttaggtcgtaattctaactccaaaaggctcttgggttatgtggcaactctgaaagataattttggatttattgaaacagctaatcatgataaggaaatatttttccattatagtgagttctctggtgatgttgatagcctggaactgggagatatggttgaatacagcttgtccaaaggcaaaggcaataaagtcagtgctgagaaagtaaacaaaactcattcagtgaatggcattactgaggaagctaatcccaccatctattctggtaaagtcattcgtcctcttagaggtgttgatccaacacagattgagtaccaaggaatgattgagattgtggaggagggggatatgaaaggtgaagtgtatccatttggcatagttgggatggccaacaaaggggattgcctgcagaaaggggagagtgtcaagttccagttgtgtgtccttggccaaaatgcacaaactatggcctacaatatcacaccccttcgtagggccactgtggagtgtgtgaaagatcagtttggctttattaactatgaagtaggagatagcaagaagctctttttccatgtgaaagaagttcaggatggcattgagttacaggcaggagatgaggtggaattctcagtgattcttaatcagcgcactgggaaatgcagtgcctgtaatgtttggcgagtctgtgaaggccccaaagctgttgcagctcctcgacctgatcgattggtcaatcgcttgaagaatatctccctggatgatgccagtgctcctcgtctaatggttcttcgtcagccaaggggaccagataactcaatgggatttggtgcagaaagaaagatccgtcaagctggtgtcattgactaatcacacccacaaagcacatcattaatccactatggtcaagttggggggattctggtgaagggttctgaatatctttctcttcatccctcccaaaacctggaatacttattctattgagctattacaccagttttaacaccttcctcgtgttatgtttaaaaaaaaaataaataaatttaagaaaccattttaaaattatgcacagttgcagcctgggaaacttaaggtggcgccttatagtatcaatttaggagctttatttggtgcatttaacgcaactggtaattgcaaattccacttcgcctgtgtaaatgaacaatacagactgttaccttgttggccctatgaaattctgcactctattcagtatatactctaccttcattacttagcactcagccgcattcttttccttttctttcctgttcattatgctttaattctgaggaccatatgaaggtagaatatattacctttaaaaaaattacaaaaatttatatagcaaacgattttcttaagttgatggccaaatgttaaaatgttattttcatatcatttataatcttgtcacaatccacttaacgagtttgattacatttcagtgaaaattatcttccagataggttttttttttttttcttcctgggatgggggtaaataactttactacaattagtatgtgtggtgcagaatttcatgcaaatgaagtgtgccagcagtgtgataatttaaacatatttaaacaaaagacgaatgcacaaaattgctgctgcttagatcactgcagcttctaggacccagtttcttttactgatttaaaaacaaaacaaacaaaaaaaaaaaaataaaaaagttgtgcctgaaatgaatcctgttttttttataaatagccccctggttccagtgtcctgttgaatataggcacttgatcctggtgtagcttctgttcaactttgtatcacgggaatggattggcctgatttctctgccctcttgaattggccccaaacagggtctctggcaagtggagtgagtgaaggctttttgtctaaagatgacaagagtcagctcaggggttgtggggagggcgctttcatcttccccgttgtcgtttgagtatttgatctctgggtaaagaggccatttatctttgtaaacacaagacattttttgctttctccgtttttctgttaatggcgaaagaatggaagcgaataaagttttactgatttttgagacacaagca

SEQ ID NO: 173 - DNA, 3427 bp, Cricetulus griseus
ggatggctggtggtagcggctcggggaggttctcgctctgtcggtctcgctccgtctctcgcttccccccggctcccttcgggaccccccctccccggtcgccggcgtgtggcggagtgtgtgcgagggcggggcgggcgtcggggggcgggcgccgcagcccccgggacggcggcggagggaggcgccggcggcgagggactccgcggcgccatggacgtcgagaggctgcaggaggtttgtccgtgtccctggatcagtttctctgtcatgtagcgaagaccggaagaaacctttgatgaaatgaaggaaagaatactgaaaattgtcactggatttaatggtatcccttttactattcaacgactgtgtgaattgctaacagatccaagaagaaattatacaggaacagacaaatttctcagaggagtagaaaagaatgtgatggttgttagctgtgtttgtccttcttcagagaagaacaacagttctaatagtttaaatcgaatgaatggtgttatgtttcctggaaactcaccaaactatactgacaggtctaatataaatgggcctggaacacccaggccacttaatcgaccaaaactttctttgtcagcccccttgacaacaaatggtttacctgagagcacagatagcaaagagtcagatctgcagccaagtgaagagaaagcccacagtgactctccagcatctgaaccagaagtttcctcactgagccctgttaaaaataaacatccggatgaagatactgtggaggctgaggggcatgaggtgaaaagactgcgctttgacatagaagacgaagaccaagagacagttagccacacggtgtccagtgaaggctcagctggcactgaggaagctgaagcagcatcttcccctccggagaaggacagggaaagtcaaagcaggcagcactgtacagacgaggaggaggaggaggacgaggaggaggaggaagaagaggaggaagaatcttttatgacaccgagagaaatggtctcagaaaaaaaaaatcaagaaaaagaatctgatgacgccttagctgtgaatgaagagccttcagaggagggtacgcacatggaggactctgatgggtctccagctcagagagatcctcactcggaacggagtgacattgcaggggctgtgagtagtggttctgactgccctgagacagaagagccaggagggaccacttccaggaaaacgggagaaagtgtctccgtgtcatccatggaaaatgatgaaaccacagaaatgacagatgaaccaatggaacaagacttaactacttagaaacatttagaggcagtattttacatacagttctggttttacactgtataaaacttttaagtaataaagtggacctttagttttacaagagaaacaggctgtaaaataaacttaagaataaaccctgaaagagttgtgcgtcgaagagctgtgaataccggctcctctgggtcctggttattgctgattttcttgttttgtttgggtttttgtttgttttttcctggtgtactcaaatcagtggtttgtgtatagattttttttttaattttagaattaaagtttttaaactggaagataattataattttgaaaactttttaaagatgatcacatttggtttatacatacacaagggagatttttgtcttgtctctagcggtttccatatttcagtcatagtttgaacatgttaacatgtgaattatagggtttcatgtggtttcagattttattgttcaactgtccaatggaagtttaagtcatatatacatatatagattattctaagggggatgttatatttttctgtttctataagagatgactacagtggatacttttttattggtaatgactgagttcacttccttcagaagatactttgtttctcttctgagtaatttagataaaatctggccctggaaaaccctgggaatctttaagtctattcaaataccaggttaaacacattccaacagatctgtgcaaactaaaattcttttgtatacttctaaggtgcctgaggggaaaaaaaaacttcattatttatgagaaaatgtgctttatcttgggatttgcgtaggagctttagctcactgtttggtagaaggagtgcttaggagactgacaggaaaccatctcagaagagcctgcaggtcccctaacgtttcacttgcttttctgaacattgtgaacatcacacctttgtttctgagttatcctgtatgcacatggcactggtgtgaaagagcactgtactggaagaataagtagattacttcagtaatgtacctgagctttaggggtacacagaccaccatgatttgtacaacattttgaagtgaattaatatttttgaacatgcttcttagacagccagtgttatatttttcagatcaacacaaagcacaatggttactactctaaatattttcaaattcacatatttaaagtcatgcaagctgcaacttccctgtcaaaattactggctgccaaatttatacctgtttcttcagctgtaccttttgatatttagaatttttaaatttctgtaaagtagattttgtagactgtaatgtgttcactgcctttgtgaagcggtataattgtataatttcgtgtgtaaactgaatgcttgggctttcaatacagtattcatataaagcaataaatattaatgttatgaaatattcgagtacatttttatcaaaatacaaaagaatccctttttttagtttcagacacctgaggtacacagatggacttatagtaggtgatgcaaacagcatctcacactgtatcataagctttgggggatttggaggggaaccacaaagtttgcattttgactacttaattgctatgactaaaaatacaagatatttggctccatttgttcatagagtaatatactactgactgatgaccttcaggttcacagcagccagacaatatatgagtctaataaaattgaacgttgatttactgtacccaagacgggtgaaaatcaaatgtaattttttaaaaaaatttggcaaaatgttaaaatgaagcaaattttggatgtgacattcatatgtagtggacctgttactctattttgttgagggattgctagtgagagcaggttttaaactattttaggtttagaaacaggttttccttaggatatttatgagattgttgtcaataaacctgttctctaagctcctgtgacctttgatagtctttatttgtggtgccatggaccatttgtaaacaaatcagtttgctgctggttaaaagttgaagatttacatgaatggtggtctgtggttttatttgtaaacttgcaattgctatctttgcaagggaaaatgtatttctttattaaataaagtacaat

SEQ ID NO: 174 - DNA, 3423 bp, Cricetulus griseus
aagaagagccgtgctcgagagcggaggcgggagggccgctccaagacatttgactgggccgaattccgccccatccaacaggccctggctcaagaaagggccaacactgtggggtcctctgaagctggtgaacctgggcgtcctgaagccgagccaggtgagctggagcgtgaaagagctcgacggcgagaagagcgccgaaagcgctttgggatgctggacacagttgatgggccaggtgtagaggatacacccctacgtatggacatagatcggagcccagggctgctgggaccccctgacctcaaaacgcagaatgtccatgtggaaattgagcagcgatggcaccaagtggaaactacccctctcagggaggagaaacaggtgcctattgcccctctgcacctatccttggaggacagaagtgagcggctatctacacatgagctcacctctctgctagagaaagagctggagcagagccagaaagaggcctcggatcttctagagcagaaccgacttttgcaggaccagttaagggtggccctgggccgagagcagagtgcccgggagggctatgtgctacaggctacatgtgaacgaggctttgctgccatggaagagacacaccagaagaagattgaagacctacagaggcaacaccagcgggaactggagaagctgcgagaggaaaaggaccgcctcctggctgaggagacagctgccaccatctcagccattgaagccatgaagaatgctcatcgggaggagatggaacgggagttagagaagagccagcggtctcagatcagcagcatcaattcggacatcgaagccctgaggcggcagtacctggaggagctgcagtcagtgcagagggagctggaggtcctttcggagcagtactcccagaagtgcctggagaatgcacacctggcccaggcgctggaggctgagcggcaggccctacggcaatgccaacgtgagaaccaggaactcaatgcccacaaccaggagctgaataatcgactggctgcggagatcacacggttgaggacactactgactggagatggtggtggggagtccactgggttgccactcacacagggcaaggatgcctacgaattggaggtcttgttgcgggtcaaagagtcagaaatacagtacctgaagcaggagatcagctccctcaaggatgaactccagacagcccttcgggataagaagtacgctagtgacaagtacaaagacatctatacagagctcagcattgcaaaggccaaagcggactgtgatatcagcaggttgaaagagcagctgaaagcagccacagaggccctgggagagaaatctcctgagggcactactgtgtcaggatatgacatcatgaaatctaaaagcaatcctgacttcctgaaaaaagacagatcctgtgttacccggcaactcagaaacatcaggtccaagtccgtaattgagcaggtctcatgggataactgagtcgcgcccgcttccaagtcccctgtcgtagtctgaaggaaggcctgacggtgcaagagcgcttgaagctcttcgagtccagggacttgaagaaagactagctgcgtccttatccacctgacacatccttcccagctggtggcagcataagcccagggcggctttcatctgcatctgtgcttttcactgttgccgtcattaactgtgggtatggatgcatgagagactgctgtgtggggtatttgctccattcccttccctgttgaattcgacttccattgtctttatcacagcttttcccccatggtattcaagattagccacgctcaagcagtagtggggagggcttccccactgacatctgagcaggaccccctttgtcctcccaccacactcactgtcagtattaaggcacagcagcctgttaataagctagccctgcctcagagtatacatgtggggacctgccagtggctttgctctactgcacccagctgagcaccacccctgctggttagagcagagccaccgaatgttctagtctgccctggttgttgaggggccttggatagtgtccagcctgtccccacttccttttgaccagggaggacagcattttgtatttggcccactgatgcagcttagacccaaaccccagataatcctggcaaatctttcacaacctggaaaatgttgaaagcaaccattcctattttggttttttattaaatcttgcacaaaagccccggcccctctcattccttcctccgctcgtgcctcccttgcctttctaactctggtcctctggtggctgacaatagtgacctgcagcctgcaccttcaggcttgtcaagtgtgatgatcctaccctgggtcatctagaggggacaaattgctgggttttaacctgtctgaaaagttgcacaatgttgtttggagaagggatgagaggacacctgtgtgtgaagacagggctgctaagaatagcagcatgtgctcagaaccctgatttgtctgagttctggaagggtcccttgaagtgtctgcttctcatggagccattaacagagagcctgtgctaataagtttgcttttctagctgccaggcatgctagtgcacgtctttaatcccagcaccccaggaggtaaggcaggcagatctgagttcgaagccagcctggtctacacagtgagttccacgacagcaaaagctacagagaagagaccctgtctcaaaaaaaaaaaacaaaaacaaaaacaaaaaaaaacaaaaaaaaaaaagtttctatcacaaacttcaatttaaatagattttaatctactaagatttacctttggtattaatgctttaatgccaagattcaaaaccagttctgtggtacttaaccagtgtggctttctgtgggtgtgctatgtagaaatagtaagcatcccagttacagtggctccttgacaatcagaactctaggtgaccttccattacagctgcttgactgggctggggtgcatgtctgtgaacaggacatcttgcagggccactttgcagcagtcacaggcttgtgccatctcacctggtatttagtgtagaagaaaatggagcctcactgagccaagggaggctgtgagtacagcttccagaaccagcttaggcctcagtgtatgtgcatagggtgtggccttcctgcagataaagtgtcccctaaactcctcattcaaacattttatggtttagtataaggcgtttcctacaaagtttgtggtcaggtgttcactataattgaaatgttaatttgtagaaatatttattcctttgtgtgacaagctagagtccttggctatagctaaccatttttattgtgtaaatactgcttgattttacatgaactgtatcataataaactatttttgcattgccctctg

SEQ ID NO: 175 - DNA, 3419 bp, Cricetulus griseus
gggatgcagtctgtaccgacaccggcgcggccaggcggggagatgagcttcttcggcttcgggcagagcgtggaggtggaaatcttgctgaatgatgcggagagtaggaagcgagcggagcacaagacggaggacgggaagaaggagaaatatttcctcttctacgacggggaaaccgtctcggggaaggtgagcctatctctgaagaaccccaacaagcgactagagcaccagggcatcaagatcgagttcattggacagatcgaactctactatgaccgtgggaaccaccatgagtttgtgtctctggtgaaggacttggctcggccaggagaaatcacccaatcacaggccttgactttgagtttactcacgtggaaaagccgtatgaatcctacacagggcagaacgtgaagctacgctatttccttcgagccaccatcagccgccgcataaacaagaagttctctgtgcgctattacctcaacttggtgctgatagatgaggaggaacggcgctacttcaagcagcaggaagtggtgttgtggcggaagggtgacatcgtacggaagagcatgtctcaccaggcagccattgcctcacagcgcttcgagggcacaacctccctggggtgaggtgcggacccccggacccctgtctgacaacaacagcaggcagtaggccccaggggccaagaagttgctgggcttccactgcagcacccccatctaccaaacaccagccgacctggggagggggaggtcggtatgaggctcaactgaccgttacttgcaaccttgaaaacaaatcatgtgtttacctaaattcttttctctgaagaaccttaaggggctttgggttgggcagcagtctcccagggattctgcagcctaggtagggatagggagaggaaacattctggaagctagtctctcccttgggaatgagagctgtctgtcaaggctatctcaagccttaaagcagagttgagagcacacatccttggctccaggttctctgggcttcctgatacagcagctgagcgtgtccctggcattcatttgccagcaagactctgggtagtcacgtcttgcactcccttcgactgtccctgaggtagtggcaggagttgttgggcctgtctcatctaagttggatgaagactcaagatcgggaagctacctctctgggcatctgggacgtggtgctctgaagtttccagtcacctctggcctcactactgagaccagacatgcctcttctccatcttttctagcttgtcaggaaccatacaggagcagagcctaaggaagggcgtagggctgactgtcctctcacttgtgagagatatgggcacagagaagccctaagattggtgtcacacatggatggccaggaggctggctaggcctcctaggggaaacattaggcaaggcaactgtcgtgccttcaccacatgactccgcatggcaacccaaggtctgggttgttctagggaattatttgaagttacccaacaagccctaagcagagggtctgtttcctttggatccttagacaaggctaagatccatttgcctccctaaaagttatctcttgttaccccttgtcctctacgtgattcctggaattggacttggtttcagacacttagaagttttgttcttgctcccacccaaaccctttcatcccacaatctacacatcaagggaggaagggcctctgcagaagactctgttaccatagcgtcagaacagttctgcttgccaaattatgtctttatcttcaccaattcactgactcaagtttagcaccactagtgttttgtttttaatttaaaaataggaaaactggtggatgtcgtaacactagaggggaggcagttcttcctcctgctctgtgttggggcctgtaagtagtaaaggggttgactgtcttctttgccttgtctggggatgaccaggaattaatctcccattggccgccctcccctctatagaaagatcaagaggctgggccctagcatatgaggaaggtaggttctgtgctctggcctttttcagggtatgagactagactctgctgtgcctccttttaatagctaattaaaagcatttgtcaatttctctgcctcccagctgacaatacaaattcattttccaactttgctaacatcggaagcctttcttatgggagaactagaaggtagaatatgctttgtttctctcaggagctgtgcacaagccaggtcttgttttctcttactgcccccattttcttttctctgccaactgtgaaagtgtggggaggctcccatccccattccataaggttcccacacctggagtgcataggtactaaaccaagcagtgcaacttgtaattaagaagctgcagtgtttacatgtttcttaatgtgttgtcttttcgatggctgtattttaaaagaacatttgttttaatggtgtctctaattaaaggaagccctgtggccttggaggcattgtgcccacagtccaccagattctgtggtcttttccttcttaacacttgtctcatatctgacacagaaatttccaaggtttcacagttgttacctatttaagctgtgggctttcatgagtaagtccctaaagggaggaatccaggctaaaatgtgtgcacctaaccttcataagtcccacgatgcctggctgtttgcagttgctatggtagaagaaggcttcctcctccaacttcatggccctgaggaagttccgagcctgtgtcagaggagaagaaataaggattaccctcttaccagctcggaagcaatcaagtctgcttttagaagatgttttttcctggttgtgcttctctcagattcataacagaatctatccctttattcagagtcctagccttgttctaggacactagccagaaccaagccacttgcagactgcatgctgttacagtgattatgttatttctgaagacattttcaggatagggttccgagaaaagcaattttggttcaaagaccttgctgctgaagagcacagtaggggaggcaggcatatatcctagcctagggttcagggttcctgacccttgactctgtacctgatagttgcgaactccatcccagcatgctgtctgcttgggctgtgctttgagatcctcgatgctgaactaggcaagagaaaataaagttattcactacattgtcattggccaattgataagcttctatggaaacaagaagttctctctttaattctgaaaagtgctacaggccataaagaaactaggtggattaccaggaattagttccagggcaccacggatgttgaatgaatgtaagttaagcctcgggttttacattgtgatctttgctaattaagatgattaattgaatggataatcaggataataaaa

SEQ ID NO: 176 - DNA, 3412 bp, Cricetulus griseus
cggctgggtctggggcgcggagcctcggcgggaggaggcggacacgtggcagcggcggcagtagcggcggcagcagcggcggcttcggtcccgggcgccagccgtcctccctctttcctcccgcagcagccctagttcccgcctctcggctccccggcccgctctcccggccgggagctgctttctcctctttctagtctccagccacaggacccggcgcggggcccgaagcgccgccaccatggggaaggggttggacgagacaaatatgagcctgcagctgtatcagagcatgtcgaacaaaaagggtaaaaggctaagaaggaaagggacatggacgaactgaagaaggaagtttcatggatgaccataaactcagccttgatgaactccatcgtaaatacggaacagacttgagccgaggcttaaccctgcaagggctgctgagatccgtggcccgggatcggccccaacgcccagcaagcgcttgtgattcgaaataggcgagaagatgagcatcaatgcagaagatgtcgtagttgggggatctggtagaggtgaaaggtggagaccgaatccctgctgatctcagaatcatatctgcaaacggctgcaaggtggataactcctcactcacgggtgagtcggaaccccagactcggtccccagatttcaccaacgagaaccccttggagacgaggaacattgctttcttctcaaccaactgtgtggaaggaactgcgcgtggcatcgttgtgtacactggggatcgaaccgtgatgggcagaatcgccacccttgcttctgggctggaagggggccagacacccattgctgaggaaatcgaacatttcatccacctcatcacgggcgtggccgtgttcctggggtctctttcttcatcctttccctgatccttgagtacacctggctagaggctgtcattttcctcattggtatcatcgtggccaacgtgccagaaggtttgctggccactgtcacggtatgcctgacgctcactgccaagcgcatggcaaggaagaactgcctggtcaagaacttggaagctgtggagaccttggggtccacgtctaccatctgctcagacaaaactggaactctgactcagaaccggatgacagtggcccacatgtggtttgacaatcaaatccatgaagctgacaccacggagaatcagagtggtgtctcctttgacaagacgtcagccacatggttcgctctgtccagaattgctggtctctgtaacagggctgtgtttcaggcaaaccaagaaaacctgcctattcttaagcgggcagtggcaggagatgcctctgagtccgcgctcttgaagtgcattgaggtctgctgcggctccgtgatggagatgagggagaaatacgccaagatagtggagatccccttcaactccaccaacaagtaccagttgtccattcacaagaacccaaacacgtctgaacccaaacacctgctagtgatgaagggcgccccagaaaggatcctggaccgctgcagctccatcctccttcacggcaaggagcagccactggacgatgagctgaaagatgcctttcagaatgcctacctggaactgggaggccttggagagcgtgtgctaggtttctgtcacctccttctgcctgatgaacagtttccagaaggcttccagtttgacactgatgaagtcaatttccctgtggataacctctgctttgtgggtctcatctccatgattgaccctcctcgagctgctgtccccgatgccgtgggcaaatgccgcagtgctggaattaaggtcatcatggtcacaggagaccatccaatcacagccaaagccattgccaagggtgtaggtatcatctcagaaggcaatgaaactgtggaagacattgctgcccgcctcaacattccagtgaaccaggtgaaccccagagatgccaaggcctgtgtagtacatggcagtgacttgaaggacatgacctctgaggagctcgatgacattttgcggtaccacacagagattgtgttcgccaggacctctcctcagcagaagctcattattgtggagggctgccagaggcagggtgccatcgtggccgtcacgggtgatggtgtcaatgactctccagctttgaaaaaagcagatattggggttgccatggggattgttggctcagatgtgtccaagcaagccgctgacatgatccttctagatgacaactttgcctccattgtgactggagtggaagaaggtcgtctgatctttgataacttgaagaaatccattgcttacacgctcaccagtaacattccagaaatcacccccttcctgatatttattattgcaaacattccgctgcccctggggaccgtgaccatcctctgcattgacttgggcactgacatggttcccgccatctccctggcctatgaacaggctgagagtgacatcatgaagagacagcccagaaatcccaaaaccgacaaacttgtgaatgagcgcctgatcagcatggcctatggacagatcggtatgatccaggccctagggggcttcttcacctactttgtgattctggctgagaacggtttcctcccctttcacctgttgggcatccgtgagacctgggatgaccgctggatcaatgatgtggaagacagctatgggcagcagtggacctacgagcagaggaagattgtggagttcacctgccatacagcgttctttgtcagtattgtggtggtgcaatgggctgacttggtcatctgcaagaccagaaggaattctgtcttccagcagggcatgaagaacaagatcttaatatttggcctctttgaagagacggccctcgctgctttcctgtcctactgccctgggatgggtgccgcccttaggatgtatcccctcaaacctacttggtggttctgtgccttcccctactccctcctcatcttcgtgtatgatgaagttcgaaagctcatcatcaggcgacgccctggcggctgggtggagaaggaaacctactactagcccactgccctgcacgccgtggagcatcgtgccacacactgcacccacccccaccccctctttgtgtacttcaagtcttggagctcggaactctaccctggtaggaaagcaccaaagcatgtggggagccagacgtcctggaatgaagcatgtagctggtaacggggggcggggggggggagggctgcctgaaaacaccctgtacaggaacgacagcggggaaggtttatatgtgcctttttgtttttgtaaaaaaggaaaacctggaaagactgaaagattacgttttatatctggatttttacaaataaagatggctattataacggaaaaaaaaaaaaaaaaaaaaaaaaaaaaaaa

SEQ ID NO: 177 - DNA, 3412 bp, Cricetulus griseus
catggggaatcagctatagacctctcctgctcatcagaggggtccccaggaaccacatcccctttcccagtgagcaccagcacccctaagattggggctatcggttcacttcaaggagccctaggtatggacttgtctggaattctgcaagctggtctaatccacccagtaactgggcagatcgtcaatgggagcctcaggagagatgatgctgccatgagaagacggagaggaaggcgaaaacatattgaaggagggatggacctcatctttttgaaggagcaaacacttcaggctggaattctggaagtccatgaagatgcagggcaggctaccctgagcaccacacaccctgaagggccaggagctgcctccccagtttctgagccaacaacagcatccggcaaccaggctgagaaagctgttcccagcaagagcctacttgactggctgcggcagcaggctgactactccttggatgttcctggctttggggcaagtttttcagataaacccaagcagaggagaccacgctgcaaagaacctggaaaattaggacatcagctctatgagtggagaagagagagttcctactgtccccaaggagccagggactgagggggtttctcccagaaagcaaattcaatcacaccctaactgagcctgtgcttcgagatgcaggcccccgcagggagggggaggcggcctcggaatgaactcctaaaagctccagccattgtggcagactctccctctggaatgggaccattgttcatgaatgggctgatagcagggatggacctggtgggattgcagaatgtgagaaatattccaggcattcctctcactgggctggtgggcttcccagctggttttgctaccatgcctactggtgaagaggttaaaagcaccctgagcatgctacccatgatgctgccaggcatggccgcagtgccccagatgtttggtgttggtggactcctcaacacacccatggcaaccacctgcacaaccactgcatcagcatctctctcaagcacaacaaaaagtggtacctcagccactgaaaaaactacagaggacaagctgagtggccgtgatgtaaaagcagacactctggttgaagataagcctggccctggtacgttttctgatcagtctgaacccacaataactactagtagtcctgtggctttcaacccatttctcatcccaggggtgtctcctggactcatctacccatccatgtttctttcccctggcatgggcatggctctgccagccatgcagcagggcagacactcagagatgcttggccttgagagccagaagaggaaaaagaagaaaacaaaggggaaacccaacccagaacctgacttccgggtgtgagaggaaccagacagtgatcagagctgcaccgagtccagtcagtaatattacctacctaatttcctgtctgagaattatggtaacatgttaatagttgcagggtcttgccacttcattagataagtatcatctacctagtctaggaggcacagaattctttcttttatccagttcattccagcaatcatagttgatactgtacttggtgacatacccttcccccgtctctttcaagtcccacttatctgaggaagaaaatggcagaagaaagctgcctagggattcaccgtgggtccaaagagcatgaataggaagaggatatcgaggaaaccaaaaggcacagaataggaagtgctggtatgtgctttcttagttcaagtggctgttttatcatggttactgggtactctacagcgtataaactaatgattgaaaatgcacatactgatggcttctttaaaacaggaaccttcctgatagtaatacagtctccccctcatagttgtatttcctcatgcagcaagaggaaatactggccagctaagcaatgtgcatatcatccccactgaatgagagaagcttcaacactttgagttactgcagcaagtgggagggcactgctcacccggtccactagcactgctggcaccttatcccttaaaaaacctgctggattttatgttgtgttctttcacccagagccaggctttctggagcctatggaaggtaattgttcagcacatgatagattctgtcatcggtatggcgtgacaaaaaacgaataccaccttttacattacaactgtgaagttttcccttctccattatctctgtactctattggtatcttagatttgggcccaaattccaaattgccagttgggcaagattctgttaagtcagcagtattctctctcctgcctctccatcttgaagaattgagcagggaagagcccacccagtggcacttcagtttcccatttcttcccccttccccttacatcatgtccctcctgacggtctccttcatggacagctcatgcttgagacttgaatcagccaagcccagttctcaggggctagatggctggacaggtgttcgactaccagattcactttgttgtcacaattgactgtattgttattttttttctttcctgtttctgttacagtattgctaatttatcagaaggtctgaaagtttggcatgctatttcagtttgcattatttatttataatgattttgtcactgtcttttatacatttggggttataaattatgtaaatgttaaaatgagcatctcaaagaagtctgttaaattgtgaccgaaaaaaaccaatcaggtgtattttcaaaaaggagagtcccggttttatgaatcatagatataaactagaaattctataattgatctattagaaagaagaatccaagaactgaataaatgctatttaatgatgtatttgtagtgtagaaggtctgtgatgctgacaacagatttcttagaaatgctgctcgctattgaactaacattctgttcagttttgcctccagtggaagcagaaagggtttttcagctgttaaatcctaaaaatcaatataatttatttatgtaaaagaaacactcaatcaatatatttttgaaccttttaagtactaattttctttttatcaagtagaaaaaaatgtatttgccctaaatccttaaaatacaaatgctataaaaactcctgtatcttgaaagccttactgcaaattagcattatagccgcccagcagagtctgctcttcctgttgtctcgtgttgttctatgtggaaagctgttctccccagctgccacgtaaacctccaagtaagtcacgggttcattgtagacctgacttaaccaccagcatgcacaatcccttgttatatcttaccaaacctgtatgttaactctcgggtgtttaggcttctgttgactgctgttgtgacaatgtttgcaaaatgaaattaacactgtggattatttgctctgtaa

SEQ ID NO: 178 - DNA, 3411 bp, Cricetulus griseus
ccggtggccagactttaaccaggaggcatatgttggtgggacaatggttcgctccgggcaggacccctacgcacgcaacaagttcaaccaagtggagagtgacaagctgcgcatggatagaggcatccctgacacccggcatgaccagtgtcagcggaagcagtggcgggtggacctgccagctaccagtgtggtgatcacatttcacaatgaagccaggtcagcgttgctgcggacagtggtcagtgtccttaagaggagtccaccgcatctcatcaaggagataatcctggtggatgactacagcaatgaccctgaggatggggccctcttgggaaaatcgagaaagtgagggtcctcagaaatgaccgacgagaaggtctgatgcgctctagagtccggggtgccgatgctgcccaggccaaggtcctgaccttcctggacagtcactgcgagtgtaacgagcgatggctggaaccgctgctggagcgggttgctgaggacaggacccgggttgtatcccccattattgatgtcattaacatggacaacttccagtatgtgggtgcctctgctgacctcaagggtggttttgactggaacttggtgttcaaatgggattacatgacaccagagcagaggagatcccggcaggggaacccagtcgcccctataaaaacccctatgatcgctggaggactgtttgtgatggacaagctctattttgaagagctggggaagtatgacatgatgatggatgtgtggggaggagagaacctggagatctcattccgagtgtggcagtgcggtggcagccttgagatcattccatgtagccgtgtgggacatgtgttccggaagcagcacccctacacgttcccgggtggcagtggcactgtctttgcccggaacacccgacgggcagctgaggtctggatggatgaatacaaaaacttctattatgcagcagtgccttctgcccgaaatgtgccctatggaaatattcagagcaggctggagctcaggaaaaagctgagctgtaagcctttcaagtggtacctggacaatgtctacccagagctaagggttccagatcaccaggacatagcttttggggccttgcagcagggaaccaactgcctggacacattgggacactttgctgatggagtcgttggaatttatgagtgtcacaatgctggaggaaaccaggaatgggccttgacaaaggagaagtcagtgaagcacatggacctatgccttactgtggtggaccgttcacctggctcactcatcaggctgcagggatgccgggagaatgacagcagacagaagtgggagcagatcgagggcaactccaagctgcggcatgtgggcagcaacctgtgcctggatagccgcacggccaagagcggaggcctgagcgtggaggtgtgcggcccggccctgtcgcagcagtggaaattctcactcaacctgcagcaataagaggccccaagggctcgccgtccacctgcacaccggcccagtttggtgatcaccattatgtttctgaaactttccgcaaaactatatacctcagtgttccatcatggtgtgaaagtcttaagtctcaagtcttcagcgaggcataagctgggctgacagctgggcggaagaggaaatgagcccctggggctcaggacagagggtccctcccaaggctggaatcctctgcctcctgctttctaccttctgctcactccccagcatgtgtgtgaaccaggcatggtggccaatgcctgtaatccgtcactcaggaggctgaggcaggcaagacgctgtctaagggggggaaaaaagtgatttccacaaagccgacctttccttgcagctgccctcccagccacttcccctcttcccctgacgtacttgctgtatttgaatatgaactttcctacgagtgggacactcaacagagatatctctggaacctcaccagccagtccacgctgctctgccaggtgcagacgtccctgaaccactggccccagcccataagcatcaatgtttaacttcaacaagggagttgcggctgggttagaaagtccactttgtgcccattgtcatctataaacctaaataggttacctctttggcaagttattactttggagttttcttttaaaaattagatttcttttctttaggaaaactcagtcccacagcttctaactaatgtgagccaataggaccccactgccttgtgacagaccagggacactggacagctgtcacatgctatcccaaggttcatagtggcttgaggccccatatgttgggtctttggcactaactgagctgccggcagagcacagagggccagccctttagcatgtgggtgaaccccacattgtctgcagccctggaacaggtgatacccccaggtagatccacaggctggtgcaggaactgtgggtagagttaggaccacaggacctgtgcattcacatggtggacccaggcatatgtcagccacagaggcagcctggatgtctgccttgtagggctgcaagcgtcacatgcgcacatctcaggtgtcccagagatcacaggaaccatagcgtttcaggcggtcagagggcctacaagtgaatgctctgcgaagggctggccaggtgctgaccctctgtcttttaaccctgccaagcagaccaaagacattataacagacagggtgcccttgtgtctggtcaagtccacacatgtccaccttccatggtaggctctgaggaatgtcactcacaggtacaggtgcaaggctgtcaaggacaaggcaggagcttgctggagtacagtccaagcataatccacactgttaagcctgacacctctgcactacttttatcagagtgagaaccgcagatgtgaagcaacatggagcttcccacccacacctgcaccccgcccccctgtgccctcatcacctttgtaccatctgattgtctggccaccagggtaccactcagcccggctctgaacaaagagggactgggcaaggccctgcggtgagccatgtttacatgacagtgtgccaaagtgactcgccgtgcttgcattgttttgtagtcatcggggctatcccaccctcccactcctgtttttaaaactaaaaactcccaggagccctgggcacacgcaggcaaaggtggtcgtctctgtggtggtccttgagtctctgcgaagctgaaaatgatggtatctgtgagtatgttttgcaaattcaaaatatagtttggtaattttttttccagttaatttttaaaaagaacgtaacttagctgtacagagcttgtactttgtcctattttatagtatggcttaaataaagaaaagatactttatagataaaaaaaaaaaaaaaaaaaaaaa

SEQ ID NO: 179 - DNA, 3410 bp, Cricetulus griseus
tcgcagtcggatgaggatgtcattaggctcataggacagcacctcaatggcctagggctcaaccagactgttgatctcctcatgcaagagtcaggatgtcgtttagaacatccttctgctaccaaattccgaaatcatgtcatggaaggagactgggataaggcagaaaatgacctgaatgaactaaagcctttagtgcattctcctcatgctattgtgattgtgaggatgaagtttttgctgctgcagcagaagtacctggagtacctggaggatggcaaggtcctggaggcacttcaagttctgcgctgtgagctcacgccgctgaaatacaatacagaacgaattcatgttcttagtgggtatctgatgtgtagccatgcagaagacctacgagcaaaggctgagtgggaaggcaagggaacagcctcccgctccaaactgctggacaagcttcagacctatttaccaccatcagtgatgcttcccccacggcgtttacagactctcctgcggcaggcggtggaactacaaagggaccggtgcctatatcacaataccaaacttgacaataatctagattctgtgtctctacttatagatcatgtttgtagtaggaggcagttcccctgttacactcagcagatactcacagagcattgtaatgaagtgtggttctgtaaattctctaatgatggcactaagctagcaacaggatcaaaggatactacagtcatcgtatggcaagttgatccggatacacacctgctaaagctgcttaaaacattagaaggacatgcctatggtgtttcttacattgcatggagcccagatgacaactatcttgttgcttgtggcccagatgactgctctgagctttggctttggaatgtacaaacgggagaattaagaacaaaaatgagccaatctcatgaagacagtttgaccagtgtagcctggaatccagatgggaaacgctttgtgactggaggtcagcgcgggcagttctatcaatgtgacctggatggaaatcttttggactcctgggagggggtgagagtgcaatgcctatggtgcttgagtgacgggaagactgtattggcttctgacacacaccagagaatccggggctacaactttgaggaccttacagataggaacatagtacaagaagatcatcctattatgtcattcactatttcaaaaaatggccgattagctttgttaaatgtagcaactcagggagttcatttatgggacttgcaagacagagttttagtaaggaaataccaaggtgttacacaagggttttatacaattcattcatgttttggaggccataatgaagacttcatcgctagtggcagtgaagatcacaaggtttacatctggcacaaacgaagtgaactgccaattgcagaactgacagggcacactcgcacagtaaattgtgttagctggaacccacagattccatccatgatggccagtgcctcagatgatggcactgttagaatatggggaccagcaccttttatagaccaccagaatattgaagaggaatgcagtagcatggatagttgatggcgaattggagcagacgacttctgtttaacttaaaattagtcgtattttaatggcttgggatttggtgcaaacaaacatgattgctagctggacagacatgctcgtcatgaaaaaacaagaaccatttctgaagcccgattggggccaaacatttccaccttgcttcatagtaaccagtcgatgaagcacagcgtcagaatgttgttggacaccctgttgaattattccccatcggttgtggagaactgtgctacattcaggcttacccattgaactcagtatatatatttttccctcctgccttttgtctggtgggataccattcttgttgctcttctgtgtaatgaagttcaaatgcttgtttggaaactttatttaacagtttagaaggcttgataggaagagttcattagtctgaagagtatacattggacaggaaagaatttctttttgtttctccaaatctttccgccttatttagcttgagatctttgcagcttggttcatggattctagccttgcccgttgcgcagtatatactgatcagatgataaaccagtgaactatgtcaaaagcactctcaatattacatttgacaaaaagttttgtacttttcacatagcttgttgccccttaaaagggttaacagcacaattttttaataataaattaagaagtatttataaggattaaagtgacttcatttgtatacatttggaatctaaaccagcttaaaaacagtttcctctgtgactcagatatgcagtgtaactgagctcttctggagtaccacctgagacatggcatggtcagaaacagtgctcagaaggacatggcacaggaaagccagagagatactttgaaggttccccctttttattttattctagaagggacatcagtatctgatgttgaagaaattcaagattcaaaaggagacttttataaatacaccatgtgacctagtaaagtagagatcagaagataggtctgctttgggaattgatagtgtagttgagacttaggagaacccagcaggttacaaactgtaaactgggattcaaaccgcagtcatttctcctaatagccagcccttaatgcccaacatatagggacactggaatttaaagaagatttcttctcagcttctcagatgttgccatactgaacctcattcaaactggtgctgtggacagtctttccccctctccccccttttagtttaaaggatggtttcctttatggaaaaaagacttctcatttgaagaccccatactaaggaaattacagatcgtagtcgacaattattttatcaaattggtatgtaaaagattccttttaagcttcattttgcagagaccaccactttagaaaaatcagagaaatcctgtttttgatacttctaagttaaaatatgttaccgtttatctggtacttcatttcttgactaaaattacttttcactttaagcttgaataaaaattttacattcgtaactgtatataattaagtggcaactcctctttacctcagtgcagttagaaccgtattttgattaatatgccctgaagccattaatacatacaccccagtctctccagtaacaatcactaacaaaatgtggtcgcagaactccacagctgtttacaaatgtgattacattgtactgtgttgttttgtgtgtgtgtgtgtgtgtgtgtgtgtgtgtgtgtgtgtgtgtgttagagagagagagagagagagagagagagagagagagagtgtgtgtgtgtgtgtgtgtgtgtgtgtgtgtgtgtgtgtgtgtgtgtgtgtgtgtattcctg

SEQ ID NO: 180 - DNA, 3403 bp, Cricetulus griseus
tggaatctatgaacagtatttatctgaaaaggcgtctccaagagttattgttgatgactatttagtagcaaaattagcagatactttgaatcatgaagacccaactccagaaatctttgatgacattcaaagaaaggtatatgaattgatgctacgggatgaaaggttttatccttccttcaggcagaatgcactctatgtgcggatgttagctgagcttgacatgttaaaagatcctagttttagaggatcagatgatggggatggagaatcttttaatgggtctcctacaggaagcataaatttgtctttagatgacctttcaaatgtgtcctctgatgactctggacagcttcatgcctacatttccgacactggcgtttgtaatgatcatggcaagacatacgcgctatatgccatcactgtacaccggcgcaacctaaacactgaggagatgtggaaaacctatcggcgttatagtgacttccatgacttccacatgagaatcactgaacagtttgaaaatctgtcaagcatattgaagctccctggaaagcatccccagctttggctcactgtgtgtttgatttccttgagaacaaagcctacagtaaagggaaaggtgattttgctcgcaagatggacacttttgtaaatccacttcgcaactctatgaggaatgtttcaaatgcagtcaaagcccttcctgatagcttggcagaaggagtgacaaaaatgtcagacaatgtaggcagaatgtcagagaggttaggccaagacataaagcagtcattctttaaggtgcctcctttaattacaaagactgattcagatcctgagcattgtcgagtctcagctcaacttgaatgacaatgtggatgacaatattccacttagggtaatgcttcttctaatggatagaggtgttacgacttaaaagagagaaaccagtaggttgagaaggaataataaagaacttacttcagcagctcattagagctacgtatggtgacactataaacaagaaaatagttgaccacgttgactggatgacctcacctgaacaagtagctgactcagtgaagcgtttcagagatggcacattattggagctgagacaacacggaaaggtattcttcgtgtttttgaaatgtttcagcacaaccagttaaataggagaatggtgtatgtcttcttagaaggctttttagagaccttatttccacagtataaattccgtgaacttttcaacaaacttcattcaaagtcaaagcagatgcagaaatataaacagaaacttcaaagtactcaagcgccttctttacagaaaaggtgacactccaacctgtaaagccggtgttcatttgtccaggactaacaatgtggacacaccttccgcagtgtcatcataggctgttgcgtctgtaccaggctttgagtgtctccaaacagatcactagtacatccacaagactggttcttctcattctcatctataatccagccactaccaagagagattcctgtgtcttaaatgatttggtgcataatttgcaacattgagaggatactgcccccatcttgttcaagaatggagttggtctcttctgttccagacgaatcagcattcttcacctgtgacgaagtgccagagtgtgtgtgtgtgagcgataagggaagcacaaagcaatgggtcataggtcactcgtttgtttcatagttggagactgcagagtgtgattgggagaggtgtgtctccctcggtaatcttgtgggtccgtgtcagcattttgctatcatgtgggtcagcaggtgagtggtctttagaacagttgtgtaaagcactataaaatagaagcaatcaaaactagaatttgattgggtttattgttcattggtatagatttccattgattgctgtgtgctttaagggcccagcttgctcttaggcacgcggctctctcctttcctttggcactctgtgcagaagaagcatgtggtagcagctctcttctaagttcattttctaaaaatcttttaacagattactgattatatagaaggggaattatttattgtaagaactgccaaatacattctgtccttctgaacattggaaatttaaacagtactctcttaaaagctaccatatgataactttaatcatatgatctagacatgccttaggtaactaccgacatagaaaatcaaaggattaatgagcttatagtcctatgtaaacatacaaatgcctaattctactatgtgtacatatatgaaaataaataatgaaaacagaactgtactattttttaaaatatgcttttatttatatttcgcataatgtaaaattctaaataaagctagtacacaaaaccctttggtgtatacatttaactctctaatataattttatatatcagagaaacaaaataccttttccagttttggagcctttacatttcttagtgttcccccattttgtccattaagaagtcttcatatcccatgtatgcaggatttctgtacttttaaaaacttccagtgactaagggtttggatatatcagctcttttgtttaaaaatatttaacactaaaaccttaaaatagttgaagtctactttttcagaccactgagccagtatcctcacagcttattcatctaaaatttggttgtatgacttaaatgtagcactcagatgagtatttcttataattagggtattccatgtagttgctggaaacagttgtgccattggccagtggatgaacttccttagccttaatttaaaacgaaacaaaaaaattattcaatatttcggtttgatcactataagtttgtgctgcaggtatttggggaaaaaataaacaaatgtgaatgaaagtgtaccaatttttaaaaaattaagaacaacataaatttcacaatctaaagttttaatttgtgcaatattttcatttaatgcatgtttctttgagaattgtaaaataagtacatttttaatgttttgagatatagttctgtctcctgaatccaacaacttcattctgttgttgctgcaccttaattaaggacttgttttaaaagtcttcttgtcactccttgtaaaattattttattagtaggaaatttcgcttatgggagcatggctcctgtattataagggaaagctaaagagcacattttgggattttaattgttagaaaatgaccttgtgcatatgattgtatgtgtcagttgtcctaactgctctgtctatgctctcctttaacaaaggggaaattatcagaatgtcatttatttttattaactaaaatgattaaaattttttatttggtttatgttatgttctgtccatgagaaaatactaataaagtattaacaaacaaaaaaaaaaaaaa

SEQ ID NO: 181 - DNA, 3399 bp, Cricetulus griseus
  modified_base (254)..(254): a, c, t, g, unknown or other
gggaaaacagtaaacagctttcgaaaacatgagcaagtggggaactttgccagagacctggtggcccagtggaagaagctggttcctgtagagcgaaacaatgaggctgaggatcaggattttgagaagaacagttccggaaagcgccctcgagatgctcttcagagggcagaggagatggagggggaataccagggaagctggaaagcctctggcagccggtcctacagccctgagcacaaacagaaaaaacncaaaaaactctctgagcctgaaaggcctcacaaagtggctcacagtcacgagaggagggacgaaaggaagaggtgtcacagagtgtcaccaccatattcctcagaccctgagtcttctgattatggccatgttcaatccccccgaccttccagtccacatcaaatgtacacagaccactacaggtcaccagaggaggaccgtgagcccattatctcacaccagaagcccctgggtgagcaccaggggaagggggctgtgagccaaaacaaggagcacaaatcttcccataaggagaaacgtcctgtggatgccaggggtgatgagaaggtctctgccctgggtaaagagaaatcacacaaggcctcttccaaagaggaaaaccgaaggccactctcaggggacagtgccaaggagaagccaccctctagtgttaagaaagagaaggacagagagggcaacagtctcaagaaaaagtttccgcctgccttagaggctgcttcagacaaccactttaggaagcccaaacacaaggactctgagaagagcaaggcagacaaggacaagtcaagtgcagacggcctagactcagggcgggggcctggagacctgctgcccaaagcaaaagagaaagttcccaacaacctgaaggctcaggaagggaaaggaagaactaacttggacagaaagtcaccagcctcgctccctaaagtagaggagccggacatggaggacgagtttgagcagcccaccatgtcctttgagtcatacctcagctatgaccagcctcggaagaaaaagaagaaggttagtgaaaacttcaaccacagcacttggagaaaaaggacttaaaaaaaaggaactctaaaagcactagtaaaaacttgaactcagttcagaaattacccaaggtgaatgaaaacaagtcagagaagttgcagccagcgggagctgaagctatcaggcctcgaaaggtccctaccgatgtgttgccagcgttgccagacatccccttacccgccatacagtccaactaccgtccccttccttcccttgagttgatttcttccttccagccaaagcgaaaagcattctcttcaccccaggaagaagaagaagctggattcacaggacgcaggatgaattctaagatgcaggtgtattcaggttccaagtgtgcctatctccccaaaatgatgaccttgcaccagcagtgtatccgggtgcttaaaaacaatattgactctatctttgaagtgggaggagtcccctattcagttcttgagcctgtcttggagaggtgtacacctgatcagctctatcgaatagaggagtgcaatcacgtattaattgaggaaacagatcagttatggaaagttcactgtcaccgagactttaaggaggaaagaccagaagagtatgaatcctggcgggagatgtatctgcggcttcaggatgcccgagagcagcggctgcgcctgctaacaaacaacatccggtctgcacatgccaataagccgaaaggacgacaagcaaagatggcatttgtcaactctgtggccaaaccacctcgagatgtccgacgaaggcaagagaagtttggaaccggaggagcagctgtccctgagaaagtcaggattaagccagcaccatatacaacaggaagcagccatgctcctaccagcaacagcagcagcagcttccactccagccctgaggaactggcctatgatgggcccagtaccagcagtgcccacttagctccagtgaccagcagttctgtttcttatgatcctaggaaaccggctgtgaaaaaaattgccccgatgatggccaagacaattaaagcattcaagaacagattttcccgacgataaatgggacttgccttggaggtggaatctgggaagcaggaatacagtgacagtggggacaggcgaagaggatgtccacagaagagacccgtgtcttttgctttgtgggacttttggcctctgacctgcacagttgcaggtatctccctatgcaccataaccctgcaccctgcctggagcacacttcagatttctgaagcttcatagtgtttgttaaggaagactatttgcaaagtctagattctttccttcctcttctgcaaatcacactccttttctctgttttaaggtttactggaggacagaaccttgggttgatttgcataggacctcagcagttttatgatttctagtttctggttcagtattttagccccacccccttatttttcctttccccacaccatggggaaacacagacatggcagggcttttgtagctccaaatgtggttcttggggttttgaaaagccagcactttaatctcttgttccctatgaattactactaggagtgaattatttaaaacattgtagtgctctgttggaaattgtttctgtttgaaaggaaagcaccctggagacctcaggctaatgaagactccaaggcggtgttgacgacctcagatttgccttagctgtgtttccaggacttcccattgcgcctttcctgttgcagagtcagttgtgtatgatttagttcccctttggagtgcttaggccccgggggaaaatggacacagatttgtccatctcagtgtcagcatctggtttggcacaaagatttctaatgcagccagttttcttagagccagatctcccaccccttcagagtgtctgtgtcagggatatgattggtaagaatagtgagggggcctgggaagccaaccggctctacaacccctcaccaacatacacaatagccacaaagcagacacacggtgatgttcaatttctggtcgcatttgtgaaaacttgtgcaatgttttctgtgctacactacatacaaatcacatacatacaaatcacaaatgtcagattagccctttgcggtccttggtgttacgaggggttctcaggggcttgctttctctttttttggaggcaggaggggcaggagtgagcatcatcctgctcttcatttgtattttggtcccaaaatgtaaatacaattttctatgttacttttttgtggtaactacaagatgaatattttaattagataagttatacaaaaaggaaaaactcacatctaaataaaaagcaaaaaaattc

SEQ ID NO: 182 - DNA, 3397 bp, Cricetulus griseus
tgtggaagaaaagaaaaatgaaactctgatggaatgtaaatctaagactgattgtagtccattgtttaagttttcagataaagaagaagagcagaatgatgttgtttcaggtgaaatggatgacactattgaagaaaggagtgcagtgggaaaacttgaacaagaagcagaggaaataaagttaccctgtgaaggtgaccagatgactgaggaacctggaccttctgatgtgtttagtgactctgcttgtacagataaaaataggacagagaagaatgaagcggctgaatgtcatttggaattgaagagtaccgtagctcttggtgataaagctgagaactctcttcaaagaaatcaaatggaaacatcattaggatattgtgaggacatggcgtctaatgatgttcagttacagagcacagagtttcataaatcaaatttggaagatgttgatacttgtgcttttgaaccagaaagtactactttagaaaatactatttgtgatgttcctgaccaaaattcaaagcagttgaatattactcaaagtattaaagtggagtttagagcccaaaagcataaaatctaaacacataaagtctaatgctaaacaaagcatgaccacagagactccaagaaaaactgttgcagtgaagcatgaagtggttcatagcaaaacaaaatctaatgtcaagagtgtgaagcgaaatgctgacgaaccagaaccccagcatgatttgcagaggccggtcaaagtgagaaaaggacaacttgagaaggatctgaagaatcagagttgtaattccggggttaagtctgtgaaaagccaagctcattctgtgttgaagaaaacctcacaggatcaaaatgtaatgcaagtttccaaacctttaactcattctcttagtgataagcttcatggtcactctggctcctccaaggagcctcatcctgtagcacaatcgggacactcattgcattccagccagaaactgagccataagcctcagcagcaggcaccagtggtgaaggccaccagccacgggaaggatgagcatgagcacccaggcagtgagcatcttaaggaggaggacaaactgaaactaaaaaaacctgagaagaatctacagcctcgccaaaggagaagcagccgaagtttttctctggatgagcctccattgttcattccagacaacatagctactgtaaaaagagaagggtcagatcatacctcctcagttgaaagcaaatatatgtggactcccagcaagcaatgcgggttttgtaaaaaaccacatggcaacaggtgagaagaactcatgtgtagagcagaatgatgattctgaggctgcacaaaatccatcttcggtagaaaacttaaattcttcacagacagaacaagccaatcctttacaggaggatattttaacacaaaataattgaaactagtcaacccatttagaagagggtcagctacagcatcatctcattttgaagctggaagtacatgccaatcagaatttccttctaagagcatcaactttacttctaggagtaccagccccagagcaagtgctagcttttcatctatgaggccacagcagcccagtgtccagcatctcaagtccagccctcctggattcccatttccagcacctccaaacttccctccccaaagtgtgtttggatttccaccacatttgccacctccattacttccccctccaggctttgggtttcctcaaaatcccatggttccttggccacctgttcatctcccaggccaaccacaacgtatgatggggcccctttcacaagcatcaaggtatatgggcccacaaaatttttatcaggtcaaagacattcggagaccagaaaggcgccatagtgacccctggggtaggcaagaccaacaacaactagacaggccatttaataggggtaaaggagaccgtcagagattctacagtgattcacatcacttgaaaagggagcgtcatgacaaggaatgggagcaagaatccgaaaggcacagacacagagacagaagccaagatagggacagtgtgtatctttttaagattgcctggtaggactgtgccacccttttaaatctccactgttggtggcttgcagagcaggaaactgctggagcagagtgctctgtcagcaccagtggccaccatcccttcacaccactgtcctacttacaggaatttaatatttttaaaagttttacaatgctgtatattcaaagattgttttattaatatgcaataaaggcttagaaatttagttttattccttaattagtaaatatggttaactatggaatatatttactgcctctagtgaatgtcctttatataatgactaatttgaaagtaatctgtgctctgtacatttgttttcaattgcactgtttctaaagaaaatgtagaggagcaacaaaaaagccaagcgagttcataatcagaccatactagtcagtttttgaccgtgaatcagaagtccaaggagtccacttaccgctttaatctgcacacattgatggcatttcttaccatgtactgcagtttggggtaggccatattcctctccttcctggctcttcagaaacttgaatacttaagcttgtacatgatcttgtgttttgctatcctttttactgtaaaatgtaaatattttaagggatattttgattctaaatatgataaaagaatttctcacctactttgtgtgtgtgatttgaaattcagtagtaaaagaggttcttcaaagcttctttttccttgagacattattcttttactcaacaaggatatgtagacttagatgtgccacttctaaagaggctagtgtttagaactgccagcaggggagcttcacagttccccactcagttgctattatgattctgaacacttatatatgattaaactttgttatacagactcagtaatcattgtaaaactgcagaacttttaagtgaaatgtattttgattttttttgtaaaatggtttgtttgtagggcaactgtaaaattgaatatgccagtttgacttgaaatagaaaatccatgagattgttgttctttcagatctaaactttacaccctgagatatatcctctgctgatgtttaaaacataaagcggtagctgccagatgatgctaacacttgagacccaatcaagaccaatcagggttcttacgttcttgtacccatgaagaagaatgccagtaactccacaaaattaagaaaatttctcctaatggagcgttatgaggtttttgaaacggaattaaccttgctagagaaaatagcagtcaaacattttgtctgaattgcaaggattgcaatatacttctttcattctttgcctctgaagtctatcatc

SEQ ID NO: 183 - DNA, 3397 bp, Cricetulus griseus
  modified_base (194)..(194): a, c, t, g, unknown or other
  modified_base (219)..(219): a, c, t, g, unknown or other
catccactgcctcttcgggatgccagctagctgaaggcaaagggagccacatgggcactgtccagccaatcccatgcctcctgtcgatgcccaccagaaaccacatggacattaccacacctcctttgccccccgtgcgcctgaggtgctgagagtggctgagcacaggcacaagaagggctgatgtacccctnatcttccacgtcctgacgaagggtnaaatcaaaattgctgtttctattgaagatgaagccaacaaagacctgcctccggccgccctgctctataggccagttcgtcagtatgtttacggagtcctgtttagtttggcagaaagcagaaagaaaactgagagacttgcttttagaaagaacagacttccaccagaattctcgccagtgatcattaaggaatgggcagcttacaaggggaagtctcctcagaccccagaactagtggaagcgctggccttccgggagtggacctgccccaacctgaagaggctttggctgggcaaggcggtggaggacaagaaccgccggatgagggccttcctggcctgcatgaggtctgatactccagccatgctcaaccccgccaatgtgcccactcacctcatggtgctctgctgcgtcttacggtatatggtgcagtggcccggagctcgcattctgcggcgtcaggagctggatgccttcctggctcaggcattgtcccccaaactctatgagccggaccagctgcaggaactcaagattgaaaacctagacccccgagggattcagctgtcagccctcttcatgagtggagtagacatggcactgtttgccaatgatgcctgtggacagcccattccctgggaacactgttgtccttggatgtattttgatgggaagctcttccagtccaaacttctcaaagccagccgggaaaagaccccactcatcgacctctgtgatggtcaggctgagcaggctgccaaggtggaaaagatgcgccagagcatcctagaggggctcaacttctcccggcagaaccacccactccccttcccaccaccacctgctctgcccttctatccagcatctgtgtatcctcggcactttgggccagtcccaccctcacagggcaggggcaggggctttgcaggcgtctgtggctttggaggccactatggggaaacagtagcaacaggcccttaccgtgccttccgggtggcagcaacatcgggacattgtggagccttctcaggcagtgacagcagcaggactagcaagtcccagggcggagtccaacccatgccttctcagggagggaagctagaaatagctggcaccgtggtcggccactgggctggaaataggcggggccgtgggggccgtgggcccttccctctgcaggtggtgtctgtgggaggaccagcaagagggcgtccaaggggagttatttccactccagtgattagaacatttggaagaggtggaaggtactatggcagaggctacaaaagccagggagcaattcagggcaggcctccttatgctgcttcagcagaagaagtggccaaagaactgaaatcgaaatccggggagtccaagtcctctgccgtgtccctggctgaaaacggagtgatggccgaggagaagccagtgccccaacttaatgggagcacaggcgacaccagggcccccagccactctgaaagtgccttgaacaatgactctaaaacgtgcaatacaaatcctcacttaaatgcactaagtacagacagcgcctgccgcagggaggctgctctggaggcggctgtcttaaataaagaagagtaaacttatttttatagagggtgaaggatgctggaagggtaaagatttaggactattctggagagaaagagagcctgcagttatgtacattttgtcctttccgtaagagaaaaatgaggacttggaaattcagatccctctttgatatcagagatttaaacaacacatttttttttagttttaaccagttgtagtcaaaatgctacaataaaacaaaaaagagagaaagaaaatgaagagcatttgactcccgcacttaaaatgaagtacacaaagttttaactggttatgacaaaagcctagagttgtgtttcttgaactataaagaaaacaaattttggcagtctttaagtatatatagcttaaaatataatttttagcatttggcaccatatgtatgccattatatttgatttttgcattactgtttcacaatgaagctttgttttaaggctttgatttttatgattatgaaagaaataaggcacaaccacagtttttctttcttacttaaatttcatcactgttgatgtggttctttgtgttaaaaaagtgcaactatcaaaacttaaaaaaaattatagagtaaactgctgttgtgctgattttgaatacacagtacatcatacatactttacaagcaagttcaatggagataaagttgaaatcatagaagatgcaaatgacctttcaaaatcaacacaatgtgttctgaaacttggtgactaataccatgcatctgtgatcaatgagctatgtggttttgaatcggatgtagaccattagtactactacttgagctaaacttctgcatggttcataattttaaagtgtgtagttaatattatgcatgttattgtcctttcttccattcttaccagtacgtgcccatttgcaaaacaaaaatgctaataatcagtaatagtcctataaaagatgttaactctgtttagtcattgactgatcttgctctaaccttaaaattttgtgattattgacctctgttgcatttattctaaaccccccaaaattatctagccgtttggaatatcgacattaccctggtgtactcactgctgtgtgcattattgttctctgttgctgttttatgccttcatattagcaaaatatgaaattctgtgaagaaaaaaaccctttgatcttaaaaaacgaaacacccctccccttctgtagcaggaaacagattgcttgttgttgagaagtttcccatcaggaatttagtagaagcaggtatacttctatccttttgatgttttgttactgtttccaacagtgtcctttgaatcagaatcacttctcacgtttcatacacttccgatgctcttcatcacattagcgatcagaaatgaggtgtaactccccagcccctgcccgcaagagctaagtaggatcttactgtaagttgaagggagttccgccctaactcatggattgtgaagaatgaactgctgttgggtctgattgactgtcgatggattgtggtgtggtgtatctggaggctattgaatgcaacttacaatgcttaataaaaatctttattcttttagtataaa

SEQ ID NO: 184 - DNA, 3393 bp, Cricetulus griseus
  modified_base (2564)..(2564): a, c, t, g, unknown or other
ggaagacaggagcatcctgcacaggcattccggccacagataatatggcctgtgctctggcccagcccacactgtgacctccaggccaggtctcctacctcagccactcgcactcggaccagctacggacatgcttagcggatccgggtcccagggaaggcgctgcctggccacactctctcaaatcgcctatcagaggaatgacgatgatgaggaagaggctgccagggaacggcgccgccgagcccggcaggaaaggctgcggcagaagcaagaggaagaatccttgggacaggtgacagaccaggtggagacccatgcccagaacagtgtccctgatgaagagtctaagccagccactacaaacactcagatagaaggtgatgaggaggctgccttactggaacgcctggctaggcgagaagagagacgtcaaaaacgtctccaggaggctctagaacgtcagaaggagtttgatccaactgtaacagatgccagtctgtcagggccaagcagaagaatgcaaaatgacacagcagaaaatgaaacagcagagaaggaagagaaaagagagagtcgcccaggacgatatgaggtggaggaaacagaagtagtcatcaagacctaccagaagaacagctatcaggatgctgaagaacaaaaaaaaagatcacatcaaagatgagaagatgtggaagctggcaagaggctggaggaactgcgccggcgccgcggggagactgagagcgaaagagttcgaaaaactcaaaacaaaagcaacaggaggcaagccttggagctggaagagctgaagaaaaagagggaagagagaaggaaggtcctggaggaagaggagcagaggaggaagcaggaggaggccgatcgaaaagctagagaagaggaagagaagaaaaggctaaaggaagagattgaaaagagaagggcagaagctgctgagaagcgtcagaagatgccagaagacggcttgtctgaggacaagaagccgttcaagtgtttcactcctaaaggctcatctctcaagatagaggaacgagccgaatttctgaataagtctgtgcagaaaagtggcgtcaaatctactcatcaagcagcggtagtctccaagattgacagcaggctggagcagtataccaatgccattgagggaacaaaaacttcaaaacctactaagcctgcagcatcagatcttcctgttccggccgaaggcgtccgcagtatcaagagcatgtgggagaaagggaatgtgttttcatccccctctgcctcagggacaccaaataaggaaaccgctggcctgaaggtgggagtctccagccgcatcaatgaatggctaactaaatcaccagatggcaacaaatcacctgctccaaagccttctgacttgaggccaggagatgtatctggcaagcggaacctctgggaaaagcaatctgtggataaggtcacttcccccactaaggtttgaaacaatcggagaaagaacccaactgcaagacatcttgctgggccagctcagttgtagggggctaattgctctgtttatatttatgttttccaatatcccagtaaacccatgtatatgctcactatatttaatagtcacaactagagatgttcatggtcaaagtactgcctttgcaaaggagcctgtttctaaacaaacccatgctgtgaaatagactcgctactgtcagctgaacatctgaacaccaacaacaaccaaagtgcaacaaaagcaaaaggaagttaagattatcagaggaatctaaggaatgtagggggggggaatgaaccataggttttgttttgtttccataacgacatcatgtttctgcactttagagtaaagcatggaagaaattatctaagtaggtaatcgaaactatctgaaagtaacccatttcagatctgatctagggcaataatggttgtaattttttaaaaaagatgtactgttgagatattgtttttttatgtgctggttcatatacctaaattggatgattattttagctgaccgtggttactgattctttttctaggttgattgctttgtggatttcttttggttagtgatagtagcctgaaccacattttagataacacaactatgtaatgtatgtgcatacatgtatacagacacactaatggtaggctgctctttcatgtgctagactattatatttagtagtatgtccttgtaactcatcaatatcacagcttttgaagattaaaaatcacaatattataatatttcatatttgccagtagaaacatggaagttaggtatagctatgttttcaatgcccaatgacttataagaaaaaaaagtattggaaaaaaaagagattagaagtgtcaaaattagttgaaatttcttataagacatagtatttagtttataattgagggcagtcttgaagtccagagtgaattttattaagtctaccatctggaccaagctcaaagcctacttatttgatatctaaggtgtcttctttctgtaccacttagagtcaaggagtttggagacaagtattgcncaaattagaattcatgtagacacctaaacaatgaccaactctgcctcgtagagaaacagacaggtacagtgagcaaaggcatggcagtgcttctatcttgttgtgctcagaccctttaaatcaaaagtttctgtcattattagtcagttggtactgtcctaaattgataatatcttgaaatttcaaaagtatatgtaaattttaatagttttactcccaaaagtaccccagcgtcttacagaatgtttcctatatagaacattctatgcgtacagtgtcattgtacaaattcatacctcagctgacttaaccaaaattatcttagtctccattccttccgcatgggggagagccaaagtctacttttctcatgaattagtaaagatagttggattccctagcttttagcacacttgggccaaaggaaggaaagccactaagactacacgagtcatctatccatgacagagtagacacaagtctatggtaagatgaactagaatgcacatggtgcaccatggaaatgacttccatcattggagtaaaatggatcatgttttgatcctaaattttattccaatatttggatgacataagttttagggtagaattttgttctgcttggatttagaaagcaaatttctcatttacttgttcaattacagctctctgttatctttaagagaggaaactgcacgtggactagcgtgttctgtgaatctgccattgttaaaaacattataaacacttggtatttttcactgatgattgatcgctgcaataaaaatatattgtgaaaatgcatccacaataaatggaattacttcca

SEQ ID NO: 185 - DNA, 3390 bp, Cricetulus griseus
ggatcatcaacctgaacttctgtaagtagttggatgtaggcctgaccgtcaacaacaacaacaaaaagctccaaaagagtttaatttttgatatcaagaccaatgagcacaccttatacctggtggctgagacagaggccaacattaataggtgggtccagagcttctgccagatctgcggcttcagtcagactaaagagagcactgatgccctgagaaaccttttttcagtcagtcatagtctctgctcttctccagttgagttcagcagctccagtcagcacctgctccgagcaaggaagtcctcatctccttcccactctacgccacgccgtttgagccccctgtgtcaagctacatccagcctgccttgtccacccagtgcacctcaggagtatctccacttgcaccagtgcataagccaaaggacagaaaattctaggagtgccagcttctctcagggcacctgacaaaagagggatacagccatacaaaaacttgcccagggcaatagacactgtatcaacggagtcagcggtcaagtccatggcttctatagccttcccaagccaagccgacacaatacagaattcaaagacagtacttatgacctccccccctagcctggcttcacacagccacaccaagggcagcctcacagggtctgagacagataatgaggaagtgtacaccttcaagacacccagcaataccctgtgtcgggagtttggagacctcctagtggacaatatggatgttccaaccacccctctctcagcctaccagattcctagaacattcacactggacaagaaccacaatgccatgacagtggccactcccggagactcagccatagctcccccaccccggccccccaagccaagtcaggcagaaacacctcggtggggcagccctcagcaaagacctccagttagtgaaaatagcagatctgtagctactactatccccaggcgcaacaccctccctgcaatggacaacagccgactccaccgagcttcttcctgtgagacctacgagtacccaacacgaggtggagagagcgccagctggtctgctgaatctccagggaagactatcgtgggtcgatcagacagtgccagctctgatgacaactacgtgcccatgaacccaggatcttctaccctgctggctatggaacgagcaggggacaattcccaaagtgtctacatccccatgagcccagggccccatcactttgacccactaggctacccatccacagcccttcctattcatagaggccccagccgaggaagtgagatccagccacccccagtcaatcgcaatctcaagcctgaccgcaaagcaaagccaacacctcttgacctgagaaacaatgctgtcatcgatgagctccctttcaagtcacctgtcaccaagtcttggtccagggtcaaccacacctttaactccagctcctcccagtactgccgtcctatctccacacaaagcatcaccagcacagactccggagacagcgaggagaactatgtccctatgcaaaacccagtgtctgcatcccctgttcccagtggcaccaacagcccagctccgaagaagagtactggcagcgtggactacctagccctagacttccagccgggctccccgagccctcaccgaaagccatccacatcatctgtcacatcggatgagaaagtagactatgtccaagtggataaagagaagacccaggccctgcagaacaccatgcaggagtggacagatgtgcggcaatcctcagaaccttccaagggtgccaagctgtgataaagggggccaccgagctcaagggccacgaggcagctgttcagagctagctcttctttgtcacctcctccctccctccccacacctctcctctgtaccactttcagcctttaaagcactcatcatcagggaccctgacccttaccccttggaggcaagggcctgatggagatacttcctctgccacttggggtccacctatgacttctatcaatactagctgtgcctccaccacccttgttaggagctgttgaccaaaaaagcagggacacttccagctccaccctgcaagattaaagttgagtaggaacagtgaagaaagggcatggcatctccttgaggcttgccagtctgtgaaatgggatggtcccagctgatgctgtgttgctataaggagaacctgaaggatcctttgaaggtctgggtcactggggaggggcagcacacagaacattagctagttaactccatccctccctatctgtattttgctgatagctatagttgactccatgaaaatcagccccaggcccataacagaagcaacaaccattctcaagttactggaacgtgggtttgggtccagtctgcctttgggccacctgtcttctacagtcccagccatggctccctccctccctacaacagagttttacaggctatgaggggaagtagctcttcctttccatttgggcctttggctgtgaagtgtggggaagcaagcccacctcacagggccatctctctgggacttgccatatttggggcctggacctggcaagagcagccatacttgacaggggtacctagtggtgatttgtgctgtcatggtatctggtggtgtgtttcttgtgtaatctgttggctacttgtgtcttgaaacttagaatcatttcacacaggattgtcacttcttcattgggaagagaaaatgaagtagaagcagtctagtcttacatttgtgtcttgttgccatttaagattgacatttaatttttcaaatcattgttggtgcctaatcacttaagttattaatttattctgttttcaaaaaaaattgtaacatgtatttatcttgtgaggtctgggggtggggcgggaaatgtgttcaagtgagtcatgtttttgcagtggtgacaaatggtacaggcctggagcttgcaggtccctttttattatggtgtagaagcaggacaataaagtcctttagaaatgcaacccagagtgggctgctggagattgtctttaggagcgtggaaacttgcgcttgtcccatcctgggaagccttgggactgacgctgtcatacagccacaacacctctgacaaactcctttcagggtcattttatgaataagcccagaagctgctatgcccaactctgttccatcctgatgggctgtaactgggcacctttccagaccagaaagaagaatgaaccctcttctcggaccagcatctggcatgaggggtggtgcacacctataatcccagcactccagacgctgaagcaggggcaggacggtcagtttccctgacagcttcagagtctggcatttggaccaaaacttctacc

SEQ ID NO: 186 - DNA, 3388 bp, Cricetulus griseus
ggggaaaaaggtggctctggccggggcggctcggtttcctggggttatgtagcagggctcgtcggctcgcgagacctccttcgctgccctcgcccgggtcctagcgcggagtatctgctccgggcggaggccgtgttcaagcccgccgcgctccctcgacgtagagctcgctcgctcgtccgtgggagcgtcccggccgagccgcgctgaggggggaggggaggccattttgtcccgaccgactccccggaaccgggcggagcggctgggagaggctgcggagccgcgggcgccgcccctcggaggcacgggcgccgccaccgtcggggcttcctcgacgaggccgttcggaaggtctcccgctcggtctcgagagttgctttctccctggcatacgcttctccgctgctgcggccccagaacgcccgggtgaggagttggccgtagtgagcagcaccgatcccttggggctaccggcggcgagcgcccgagccgctcctcccaatggcgaagaagacgtacgacctgcttttcaagctgctcctgatcggggactcgggagtgggcaagacctgcgtcctttttcgtttttcggatgatgccttcaataccacctttatttccaccataggaatagactttaagatcaaaacagttgaactacaaggaaagaagatcaagctacagatatgggacacagcaggccaggaacgatttcacaccatcacaacctcctactacagaggagcaatgggcatcatgctagtgtatgacatcaccaatggtaaaagttttgaaaacatcagcaagtggcttagaaacatagatgagcatgccaatgaagatgtggaaagaatgttactaggaaacaagtgtgacatggatgataagagagttgtacctaaaagcaaaggggagcagattgcaagggagcatggtattaggttttttgagactagtgcaaaagcaaatataaacatcgaaaaggcgtttctcacattagctgaagacatcctccgaaagacccctgtaaaagaacccaacagtgaaaatgtagacatcagcagtggaggaggcgtgacgggctggaagagcaaatgctgctgagtgctctcctgtccatctgttgccatccaccatccgtttctcttcttgctgcaaacgaaaacactctgtccatttttaactctaaacagatattttgttcctcatcttaactattcagtccatctattttatttgttctttcatctgtgactgcttgcggactattataattttcttcaaaaaaaaaaaatgtatagaaaaatcatgtctgtgacttccattttcagatgtacttgctcagctcaccactgcacttcagttgtattatagtccaattcttatcaacattaaactatagcaatcatttcaactctattctgcaaaattgtataagaataaaagttagaattaacaattttattttgtacaacagtgggattttctgtcatgaataatgtgcttgagtccctataatctatagacatgatagcaaagaaacaaagccaggaaaacactcattcgccttgaatctgtacgtgggttaattttgtcctgtgccttatgtggaaaggaacttctttggtttttctttttttgtttggtggaagcatgtgcaggagacatttcatcccaacataaacccgttcagatgctcgaagtttgctcggctataactttcacagtagttaactgaggacaaagggtaatgcagaagtgatacttgattttcagtcttgtttccagtggccttgatatttaaaccgatttctgccaccaggtcccttggccactctgtcccttctcatcttcctgcatgctgctttgtttgcccccactactcctggtatgagttatctagagatgaaaggtttgtcaagtttaacataaagcactgatttaccttgctaagtaaatggaaagataaattctaactgcctactatcagatgtcagttaattcggtgtcagcccctcatttactctctctcctaaaacctagttaattgcatgcactagtgtttggagggtgttgtggtttgtctttctaattaggtatatatcctattcactttcctagaataaactacttaacctgaatttgcatagtctccattctggagctcctccagcagttcggtagaccaggaaagactggttttgaaatgaactttaagagcaggaaggaggagtggatcttagtaacgtttgccaaatgtattgagatttggcctctgaagaacacttcagtgttaagttgtctttactgtaagatttagaagtacatttataatattattaatttcaagtcctatctttacttcctcttggaaaactattaccgtgaatttttagagaatacaaaggacagcgaaaggcttctcgtgtaaagctgagatctctggctttctgaccctctcctcacttcctctttctagtttggcttcattgcttctcattaggacagggtaggctaagttccctatgctgctagcatcctaagatgatacctttgtggaaataattgtgaatagcatgattcatttcgagcagaggctgagtttaggacagcagcttccattgacaagatttctgtgacgtgcattttaatgacctcttggctcccatacacagtatagcgacatatctactaagagaacccatgaattttttcagatagtgccctaaagacaattttatatgcctcactggtggctcttagtccccacacccccttgactttatcattgtttactagtaaaaagcagcattgccaaataattcccgattttccactctgaaaaatgcaatgtttaagcttttgaagttgtaggttaaacctgctgtcgttagtccttgctgtttgtgttgcttccctttatctggaatgtggcagttgccgctttactttaaaccctcttgaatccttaattcagtgacttaaggtttggagctacatgctgggattttggctaacagactgacagttttgttgtttgcataattataattggcattgtacagagaaaggatatggctaccttttgttaaatctgcactttctgaataaaagggaaatggagtataaatcaatttttgtataatctgtttgaaacctgagttttatttgctaactattagggctttgtcccctttctgtaagtctcttgggatcctgtgtagaagctgttctcatcaaacaccaacattcagtccattctctggtactagctacaaattcggtttcatactctacttaacaatttaaataaactgaaatatttctagatggtctacttctgttcatataaaaacaaaacttgatttaccaaaaaaaaaaaaaa

SEQ ID NO: 187 - DNA, 3387 bp, Cricetulus griseus
  modified_base (462)..(462): a, c, t, g, unknown or other
aaaaacaatgaaacaaaatccttttcttctggagatcactcgcatttcttgaaaaaatccacttcagaaggcagccatggttctccctacacatccaagttacatggtttgtgtcctcgagttttaaaggggactaaaactctgtcgggcactgaaaaagagcctgatgagaagttaaatgacacatcacagaaagtccaagaagtactccagtgttccagaacaccgcaaaagccactccttagcacgtccaaaaggcctgagagccatgccaaagaaagtaggagtgtacaagagtcaacccaagactctgtgaacactgaatttcaggcccattcagctgaaaatgatggcacaacatctgatccaagaaaaccatggacaataaaaagtggagcagtggcttaatgaaacagaaaaggcatcatcctcagttcacgcactctccagcttagcagatgnggccactgacagtagctgcacctctggtgctgagcaaaaacgatggtcacagtattagaaagaagcgaagagccactggggatggatcgtcccctgaactaccaagtctggagagaaaaaataaaagaaggaaaattaaaggaaagaaagagcgttctcaggttgaccagctattaaatatttccttaagagaggaagaactgagcaagtcactgcagtgcatggatagcaacctcctgcaggcaagggcggccctgcagacagcttatgtggaagttcagaggctgctcatgctcaagcagcagataagtatggagatgagtgcgctgaggactcacagaatactagattctgcaaggactacaagaaacgtatgaaccttctgagcacccagaccaggctccctgtagcctcatagcacgagaacaaaggaacagccgatctcagacctctgttgagaccacactgctgcctgctccctttttcccagggtttctggagccacctccttcccttgtgtctccatcgtccattggaacccctctccaaataaccacatctgctttccaagtccatggtactgtccctgattcgtcagttcagattaaacaagagcccatgtctcctgaacaagaggggaatatgaatgctgttccacaaggctctgctgccaatgtgtccaaggaattactgcaaactaatagagtggccagtgacagccttccagttaatccagcccttcctgcagcattaacctcagggtcaacagaaagttgccaggaggctaaccaggatcagaattgttctgtggagcaaggaagttccagaagcacttggcaaccgctacaaggatggcatcccgtcagtgtggcggaaacccagacagtgatctcctccataaaagacatcaaagaactcttcggagctgtcatcagagccaggagatgatgacgagccaacagaaggaagctttgagggacaccaagctgctgtgaatgcaattcaaatatttggaaacttactgtatacttgttcagctgacacaactgtccgagtttataatttggtgagtcggaagtgtattggtgtctttgagggccatacttccaaagtgaactgcctccttgtcactcacacctccgggaagaattctgtcctttacactggttccagtgaccacaccattcgctgctacagtgccaagacccgagaatgtatggaacaattaaagctggaagaccgagttctctgccttcataacagatggcgtatcctctatgctggactggcaaacggcactgtggtcaccttcaacataaagaacaacaagcaacaggagatctttgaatgccacggccctcgggcagtcagttgtcttgccacagctcaagaaggtgcccgaaaactgctggttgtaggatcttatgactgtaccattagtgtccgtgatgcacggaacggactgttgctcagaaccttggagggccacagcaaaaccgtcctttgcatgaaggtggtgaacgaccttgtgttcagtggctccagtgaccagtcggtccatgctcacaacatacatacgggtgagcttgtacgcatctataaaggtcacaatcatgcagtgactgtggtgaacatcctggggaaagtgatggtgactgcttgcctggacaagtttgttcgcgtctacgaattgcagtcgcatgatcgactgcaagtttatggaggacacaaagacatgatcatgtgtatgaccatccataaaagtgtgatttacactggttgctatgatggaagcatccaggctgtgcggctgaatctgatgcagaattaccgctgttggtggcatggctgcactctgatatttggcgttgtggatcacctaaaacaacatctgctgactgaccatactaatccgaactttcagacactgaagtgtcgctggaagaattgtgatgcttttttcacagctaggaaaggatccaagcaggacgttgcaggacatgttgaacgacatgctgaagatgacagtaaaatggattcgtgaaagttttttgcctcccatgttgggaagtcattcataaactattttcacattgacccctcacacgggccactctgtccttctccagagaagttgggaaggagaaagtggttcacagccagacataccgctagcaaagtctgggcagtctgtgggatgataggttacatgcaattcaagtctgcactggagcctgtaagggtgacatttaagaacagtctaaggaaccgtactcttctgggagaaatgacaaacagtgatttatgccactagactattggtgtttattaaagattcagattttaattggttacccagtttgaccctaatcatacacacattttattgattcggtttgtgatttatgctttatgttcttatgatggcttatgattaaatttttcagatcagttttaattcctccttttgaataactgggtatttaaatttgaagcaaattgttttctttttaagtaattatgtacagtgtttcactattcaggttcttgagagggagaggaccctcatgccacaataccaggaatggttccagtagtacttgctggatccagttacttagcaagtttgttcttgttgcttcaaggagagttctagaattactataaggctgtacttgccacactttcaaggtggtttcatccctgtgctgtcattgagaaccttaggtttgagggaggtggccctattggtgggaaagaggaagctgtggtgggaatatggatttagaaaaaaatgtcaggtgacatttgactgcaaagatatttctaaacagccttcttacattttggtataaaagctgtgaacttcataactttgtaagcgagatataaagcaaatacaagaagaaaataaagtacttttac

SEQ ID NO: 188 - DNA, 3385 bp, Cricetulus griseus
gcagcctcagcaaatcgtgcagcctcagtccccggtggctgtcagtcaaagcaagcctggttgttttgacaatggaaaacactatcagataaaccaacagtgggaacgcacctatctaggcaatgccttggtttgtacctgctatggaggaagccgaggttttaactgtgagagtaaacctgaacctgaagagacttgctttgacaaatacactgggaacacttacaaagtgggtgacacttacgagcgccctaaagattccatgatctgggactgtacctgcatcggggctgggcgagggaggatcagctgtaccattgcaaatcgatgccatgaaggggtcagtcctacaagattggtgacaagtggaggaggccacatgaaactggtggttacatgttagagtgggccactgtgtcaccaacagcggtgtggtctactcagtggggatgcagtggctgaagtcacagggaaacaagcagatgctgtgcacttgcctggatgtgaaagtcaccatcatgtggacacctcctgatagtccagtgactggctaccgtgttgatgtcctccctcaacctgttagtacgcctactcccctgtgaagaatgaggaagatgtagcagagctgtcgatttcaccttcagacaaacgcagtggttctaacaaatctcctgcctacaggggcaagcttctaggtacatcctgctccaaccaacctgaagttcactcaggtgacacccaccagcttcagtgcccagtgggtggcacccaatgttcagctcactggctatcgagtgcgggtgacccgaaggagaagacaggaccaatgaaggaaatcaacctttctccagacagctcatcagtggttgtatctgggctcatggtggccaccaaatatgaagtcagtgtctatgctctcaaggacacactgacaagcagaccagctcagggagtcatcacaactctagagaatgtcagtcctccaagaagggcccgtgtcacagatgctacagagaccaccatcactattagctggcgaacaaagaccgagacaatcactggcttccaagttgatgccatcccagccaatggccagccccctgttcagaggaccatcagcccagacatcagaacctataccatcacaggtttacaaccaggcactgactacaagatccacgtgtacactctgaatgacaatgcccggagctcccctgtcatcatcgatgcctccactgccattgatgcaccatccaacctgcggttcctggccaccacacccaactccttgctggtatcatggcaggcgccccgtgccaggattactggctacattatcaagtatgagaagcctggatcccctcccagagaagtggtccctcgaccccgccctggtgtcacagaggccaccattactggtctggagccaggaaccgagtacaccatctacgtcattgccctgaagaacaaccagaagagcgagcctctgattggaagaaaaagacagatgagcttccccaactggttacccttccacaccccaatcttcatggaccagagatcctggatgttccctccacagttcaaaagacccccttcatcaccaaccctgggtatgacaccgaaaatggtatacagcttcctggcacaacccaccaacaacccagtgttgggcaacaaatgatctttgaggaacatggctttaggcggaccacaccacccaccgctgccacccccgtcaggcttaggccaagaccatacctgccgaatgtagatgaggaggtccaaatcggtcatgttcccaggggagacgtagactaccacctctaccctcacgttccgggactcaatccaaatgcctctacaggacaagaagctctttctcagacaaccatctcttggacgccattccaggagagttctgagtacatcatttcatgccatcctgttggcaccgacgaggagcccttacagttccaagttcctggaacttctactagcgccactctgaccggccttaccagaggggtcacctacaacatcatagttgaggcgctgcaaaaccagaggaggcacaaggttcgggaagaggttgtcaccgtgggcaatgctgtcaatgaaggcctgaaccaacctacggatgactcatgctttgacccttacacagtttcccattatgccattggagaggaatgggagcgattgtctgactctggctttaagctcacatgccagtgcttgggctttggcagtggtcatttcagatgtgattcatctaaatggtgccatgacaatggtgtgaactacaagattggagagaagtgggatcgccaaggagagaatggccagcggatgagctgcacgtgtcttgggaatggaaagggagaattcaagtgtgacccccatgaagcaacgtgctatgacgacgggaagacctaccacgtaggagaacaatggcagaaagagtatcttggagccatttgctcctgcacatgtttcggaggccagcggggctggcgctgtgacaactgccgcagacctgggggtgaacccagtcctgacggcaccaccggccacacctacaaccagtatactcagagataccaccagagaacaaacactaatgttaattgcccaattgagtgcttcatgccattagacgtgcaagctgacagagacgactccagagagtaacatttccaacccagaagaagtgtctctgccgaggtcaatccacaccagagtgatgttagcagtctctccatctttgagtgttcatttctcccttaagtcttctgctctggagtcaagttctcagcttcagctcttctcacagcttctctaagcatcatcaccctgggggatgttttgagacttctctcacaaatgtttggttgcagatggttaccttgttctgcgtgcacttagttggtaccacccagtattgtttaagagaatcaaagatctttgtgatttagtctggggtccacagggaaacaccgatagtcgaccaagatcaaacatgtcttgaatggtagaaccccaaacctggagtcgggaagtcccccagacacttctgctttctttctataagcatatggcctgcagtgttctcaggaggcatgtcctgtagctgtttcaacacacctcacagtactcactctgtcccaacaattctaattgcctagaaatatccttctcttacctgttatttatcaatttttcccagtatttttatacggaaaaaattgtattgaagacacttagtatgcggttgatgagaggaattcagtataattatggttggtgattatttttatactgtacatgccaacgctttactactgtggaaagacaagtgttttaataaaaagatttacattcc

SEQ ID NO: 189 - DNA, 3384 bp, Cricetulus griseus
  modified_base (2187)..(2187): a, c, t, g, unknown or other
gaagaagcctcgccaccagcagcttctgccatctctctcctccttttcttcagccacaggctcccagacatgacagccatcatcaaagagatcgttagcagaaacaaaaggagatatcaagaggatggattcgacttagacttgacctatatttatccaaatattattgctatgggatttcctgcagaaagacttgaaggtgtatacaggaacaatattgatgatgtagtaaggtttttggattcaaagcataaaaaccattacaagatatacaatctatgtgctgaaagacattatgacaccgccaaatttaactgcagagttgcacagtatccttttgaagaccataatccaccacagctagaacttatcaagcccttttgtgaagatcttgaccaatggctaagtgaagatgacaatcatgttgcagcaatccactgtaaagctggaaagggacggactggtgtaatgatttgtgctattatttattgcatcggggcaaatttttaaaggcacaagaggccctagatttctatggggaagtaaggaccagagacaaaaagggagtaactattcccagtcagagacgctatgtgtattactatagctacctgttaaagaaccacctggactacagaccagtggcgctgttgttccacaagatgatgtttgaaactattccaatgttcagtggcggaacttgcaatcctcagtttgtggtctgccagctaaaggtgaagatatattcctccaattcaggacccacacgacgggaagacaagttcatgtactttgagtttcctcagccattgcctgtgtgtggtgacatcaaagtagagttcttccacagcagaacaagatgctcaaaaaggacaaaatgtttcacttttgggtaaatacattcttcataccaggaccagaggtagtttgatggtaagtagattaggcagaacatcatactaaaattattcttagaaaataatgttggtgtattttccatacctcatcagtttcactcaaccaaattaaaatttttaaaattgtaactaagctcttaggatttacacatttatatttaaacattgatacatgaatattgatcgactgttgataaagtgataaagttagagacaacttttcctaagatctcaccattgaaatttgtataccaccttgtctttcctaaaagctgaaagtggttgactaaaatgagaagcagctattggtgttttggagatagtgatgaacactgttctttgttagttttgggcacagcatgctaaccaggtcatgaataatgtacattacaatgggctgttgcactgttaatattttccttttggaatgtgaaggtctgaatgagggttttgattttgaatgtttcagtgtttttgagaagccttgcttacattttatggtgtagtcattggaaataggaaaaataggcattatatatatatatatattatatatataaatatatattatacatactctccttactttatttcagttaccatccccatagaatttgacaagaattgctatgactgaaaggtttttgagtcctaattaaaactttatttatgacagtattcacgattagcctgaaatgcattctgtaggtaatctctcccgtgtttctggaatgctttcttagactttttggatgtgcagcagcttatgtgtctgaaatgacttgaaggcatcaccttttaagaaggcttacagctgggccctgtaccatcccaagtcctctgtaattcttcttggacatttttgccataattgtaaaagggtagttgaattaaatagcatcaccattctttgctgtggcacaggttataaacttaagtggagtttaccggcagcatcaaatgtttcagctttaaaaataaaagtaggttacaagttacatgtttagttctagaaaatttgtgcaatatgttcataacgatggctgtggttgccacaaagtgcctcgtttacctttaaatactgttaatgtgtcatgcatgcagatggaaggggtggaactgtgcactaaaccgggggcttttactgtagtatttggcagagttgccttctacctgccagttcaaagttcaatctgtttcatatagatatatatatactaaaacaattgagtctgtaaaacagccttactctggttcagcctcttcaggntaactcttgtgctgtgcagcagtggctctgtgtgtaaatgctatgcactgaggatacacaagtatgacgtgtacaggataatgcctcatgccaatcagatgtccatttgttactgtgtttgttaacaaccctttatcttagtgttataaactccacttaaaactgattaaagtctcattcttgtcattgtgtggctgttttattaaatgagagtatttataattcaaattggttaaacccattgaaatgtccagtaatgggcagccaaatatgactacaaagttactgtgatgtttgaaaaccggagtttcttggcactttgcttttagatcatgtccattccattctactgtaatttgagctgacttggttcagtgaatgccatcaccatttccattgagaatttaaaaatcaccagtgtaacatgcaggcttctgaaaggctccccaaaaatcaagacccataagtccagctaacctacttctaatgggttgagtgtggatttttttccaacctgtgtatgtctccaaagcttcttagcttaattttaggacatggacacacaaattctgacagtcatttgagaattttcatgaaacattttgctgaaagcattttataattttataagaaaatgtgttatcttaagatacttacgtatatgggagacattaactgccatttttgtagcatactgcattttaaatttaaaataaagctgcatatttttaatgaagtgtttaacaaggatttatattttttgttttttttaagattaaaataacttatgtcttattgtgtgggatctcctctgtcacaatgattagatttatgtagactagagcaaggcgtgttttgtggggtgtgtatgggagagttagttttgtaagtgctagaatagaaatttggttcaagccaaaattttctcactgggattcctgcagttcattgtaataaaatgttaatcttggatgatcttgaatattaacgaatttgtcagtagcctcttgatgtgttcattaataagatatatcaaagttgtacattaaaccaaagttggagttgtggaagttgtttttttatgaagttccgtttggctaccaatggacataagactagaaataccttcctgtggagaattatttttccttttaaacaaattaaaaaggttcatttattttaagaaaaaaaaaaaaa

SEQ ID NO: 190 - DNA, 3380 bp, Cricetulus griseus
caagcaacacctcctcagcccatcaaagtaccacagtttatccctcctcctagactcactccacgcccaaacttcttccacaggttcgacccaagccccgtggcccagaataacattcctattgctccagcgcctcctcccatgcttgcagctcctcagcttatccagaggcctgtcatgctgaccaagtttacacctacaaccctccccacatcccagaattccatccaccccgtccgtgttgtcaatgggcagactgcaaccatagccaaaacgttccccatggcccagctcaccagcattgtgatagctactccagggaccagacttgctggacctcagactgtacagcttagcaaaccaagcctcaaaaccaaaacgagaagagaaccctcagaaacttgccttcatggtgtctctagggttggtaacacatgaccatctagaagaaatccaaagcaagaggcaggaacgaaagagaagaacaacagccaacccggtgtacagcggggccgtctttgagccagagcgtaagaagagcgcagtcacttaccttaacagcacaatgcatcctgggacacggaagagaggtcgtcctccaaaatacaatgcagtgctggggtttggagcccttaccccaaccatcccccccatccagtcatccgactcccctgaaaatgaaaagacagagaccacattcactttccctgcacctgtgcagcctgtgtccctgccccagccccacctccacagacggtgacatccatgaggatttttgcagtgtttgcagaaagagtggccagttactgatgtgtgacacatgttcccgtgtgtatcatctggactgcttagacccgcctctgaaaacaatccccaagggcatgtggatctgccctagatgtcaggaccagatgctgaagaaggaagaagcaattccatggcctggaactttagccattgttcattcctatattgcctacaaagcagcaaaagaagaggagaagcagaagctacttaagtggagttcagatttaaagcaggagcgagaacaactggagcagaaggtgaaagagctcagcagttctataagtaaatgtatggagatgaagaacaccatcctggcacggcagaaggagatgcgcagctcgctggacaaggtgaaacagctcatccgcctcatccatggcatcgacctctccaaacctgtagactctgaggccactgtgggggccctctccaatggcccagactgcaccccctctaccaacaccgcctccacacctgctccctccccctcctcgcagagctgcacagcgaactgtaaccagggggaagagactaaataacagagccctcgaggagatgccacagtcccagcgacgaggagactctagaaaagcaaagccggatttcttctggaaaatacagaattcttttggttctttggttccagagagagagaagatgcttgtgccaggtggcacccgagtttgccaattgattcttcttattctgtgtgtacatgcaaagattggaccatgttacatgaaatagtgccagctggaggttctttgccagcaccatgccaagtgaaataatatatttactctctctattatacaccagtgtgtgcctgcagcagcctccacagccacggtgggtttgtttttgttttgttgggtggggagcagggacgggcggagggaggagagcaggtttcagatccttactgggagccgtttgtttaggtagaaaagaacaagtccaaagagtgtgtgggctttcctgttcctaaactttcactaccataaaaccaaaaaaacaaaaagagaaaaaaaagagaaaaaaaaggaaatagaggtttaactaacccagtgcccagaggagggctggggaagggctggggggggaggcaaggggtgggaaagtatatgacataagcagtatttaatgtttccggaggggccctagtgccaggagagcccaggtccccctccccagctccgctctctccacagcctcccgcacccttccaactttttttttatttaagaagaaaacaaaatctagtgagtgagctttggagatgcctggactagttggaggaatctttggcagaggatcagagaccagcagcaggctgattccctgtcttggctcccccgacctccccaatctcctgttggacttgtctgggcccataggctagggcttggcacaccgtgcctacctgggatggaaagaggttgagaagccatcaatcactacaggccttttccccagaagagctgcttgttggtgaccatgcaggagttgagcaacatagattcccttcttctgatgtttggaaatgagctgcttgagtctactggagtggagtgaaaaatgtagctctgctccaggcctccactgcaggccctgcccctcaatctacatgcccttcactctctcagaacaaactccttgtccccttagacctgtgaatacctgtgaccaaagggcccttttctctttctgaacccactgtcttgcctgcctctgctgactgctgcttcctgtcagaagcccaacaggcagtgttaaagggtgcgtgtgtacccagcactgacccagggtttccagctgtcggtctgcatgtacagctgcctctccgccacctctctgaagcttcctcttggggctattggagccttcttgactcttaccaccagccccccagctcacaccttttaaatggtctcttcccaattaggcccttcttggatatggaccttacctaactaaagggctgaactctggaggacattcctcccaggggcagggagtctgatggaccagtggtccccatggcttctgttgaatgcagactactttgctctgtgtaaatgactgtggaccttgtcccacccctcatccaagcacccttggcaaaaagtctggttctcatccatcctgccttcagcccctgctcctgctggttcctccccaaggagatgggtgacccctgggaagattccgctgaccctccctgaggaatgaagagttccacatggcagccttggcccctgcacccctctccaatgtcctcactcttagcccagggtgagttgccgtcaggtgggtgggctaagcagaccagaagtcatcgagctccaagacagagccagccagaccaagtcctgtctttgtccatgccctttgtgatttcagtcttggtagaatttgtatttggagttttgtgcttcaaactttctgttttgtttgtttggtttttgttttgagggggtggggggtacagagcagccgatcaatttgtatttatttattttaacattttactaaataaagccaaataaagcctctaaaaaaaaaaaaaaaaa

SEQ ID NO: 191 - DNA, 3379 bp, Cricetulus griseus
gtctcaaaatggagggccatgatccaaaggaaccagaacagttgaggaagctgtttattggtggtctgagctttgaaaccacagatgatagcttaagagaacattttgagaaatggggcacacttacagactgtgtggtaatgagagacccccaaacaaaacgttccaggggctttggttttgtgacctactcttgtgttgaagaggtggatgctgcaatgtgtgctcggccacacaaggttgatgggcgtgtggtggaaccaaagagagctgtttccagagaggattctgtaaagcctggcgcccatttaacagtgaagaaaattttgtggtggtattaaagaagatacagaagaatataacctgagagactactttgaaaagtatggcaagattgaaaccatagaagttatggaagacaggcagagtaggaaaaagagaggatttgcttttgtaacttttgatgatcatgacaccgttgataaaattgttgttcagaaataccacactattaatgggcataattgtgaagtgaaaaaggccctttctaaacaagagatgcagtctgctggatcacagagaggtcgtggaggtggatctggcaactttatgggtcgtggtggaaactttggaggtggtggaggtaattttggtcgtggtggaaactttggtggaagaggaggctatggtggtggaggtggtggcagcagaggtagttatggaggtggtgatggtggatataatggatttggaggtgatggtggcaactatggtggtggtcctggttacagtagtagaggaggctatggtggtggtggaccaggatatggaaaccaaggtggtggatatggtggtggtggaggaggatatgatggttacaatgaaggaggaaattttggtggaggtaactatggtggtggtgggaactataatgactttggaaattatagtggacaacagcaatcaaattatggacccatgaaagggggcagttttggtggaagaagctcaggcagtccctatggtggtggctatggatctggtggtggaagtggtggatatggtagcagaaggttttaaaaatacagcagaaaagggctacagttcttagcaggagagagagcgaggagttgtcaggaaagctgcaggttactttgagacagtcgtcctaaatgcattagaggaactgtaaaatctgccacaggaggaacgatgatccatagtcaagaaaagttactgcagcttaaacaggaaacccttcttgttcaggactgtcatagccacagtttgcaaaaagtgcagctattgattaatgcaatgtagtgtcaattagatgtacattcctgaggtcttttatctgttgtagctttgtctttttctttttcttttcattacatcaggtatattgccctgtaaattgtggtagtggtaccaggaataaaaaattaaggaatttttaacttttcaatatttgtgtagttcagtttttctacattttagtacagaaactaacaaaaatgcagttttggaggtgtttccttgtgagttaacaagtaaagaagatcattgttaattactattttgtatgaattttgctaaagttaactgtaaagaaacacctactgacttgcaatttagggggaatctattctccccatttccaaatctatgatgaatgggcactgacacatggagagaatagatatttgtatgtttgcaatgtgtgttttagataattagaattgggtaataaaaaatagcatatttgtgaatttaatagcattaagattactttcaaatgaaaaaaagatctcaaaagttcctatttgggttttgtgcattttatttcaaaatgtaatcatgattttagtatgttagtttcattgagtcctagcggtgttaagaacatctccattccacatttaccctgatcacattgaaactcctgccaatagttttggggtataaagtgtttatatttgttcagagaccctggttgagaagagttctagataataaggtcatatatatgaaaaatgtctactgttgcgccagctagtgcttaacaatttcattcaagcccctaagtatgtgctctgctgttggctttctttggcatttgaacattgaattcagttttttacttggtttttgaagtataagcaaaacaagcaataaaaaggggaatggggcgtgctagtgtttgaatatgctctcttgttgctctaattctgtgcctctgtgcattattaatatttggatgcatgcaatgctagcatggaactttggtcttcacaaatactgcagtttttccagaaaacactcacaaaacaataaatgtaatagacaacattccatttgttaatgggcatatgtgaataagcagtgcagaaaataggctcatgttagaaaatggttacatctttcataactaaaagtgtgattataaatggacactgtcaatgttcagtttaaacttgggtacctggtcaaaatgcttaggaatattaaaacaactaaattgtctcaagtccttttattcatataataaagattgaaagaattggggaggttaacatttcctggttttgtgaaattgttggacacaaccttgacagtatcctttaatgtcatgaggtcaattgtattgttaaccaattgtattgttaccatctaaatatctataatagtgaaacattttttcagtaagttgatgtttacaacctataatcaggtgaaatctgtgtgtgacctgtttataagttgtactaggttagcttttgtgaactgtggaaaagtaagccatgagagcgatttaaccagctttaaaggacctaagttgtgctttttaagtactggatcaaaggaaacccactaagacaggacttcagcagccttttgtgtatggacaagtcagcataaatacagaatgagaaggcagcagcaacagcttcaactacagagaagtggaggcataagatactatggtgatagtcagcagctttccaaaagctagttaaatctgcttattgcaactgaagtgtcgaagaaagtagcaggaaggagctccgccctttggaacatcaatgagatagttgccacagtcgctaggtctagcatttagacctgcaaggaagggcaataagcattaggtaaggcttgaatttgaattttttcactaattaaagagtgcttttttgtaaagcaaggtaagagtaatctttttgatttgcaggtgaatgagaaccctacttgcctaaatgaggaatgtctttcctaccatcttaaatacgaaggtttctggctgggtaaggtttgtagctcacagtaaaacctgatgacaccattggtttccctacaaatcaatgccacaggttga

SEQ ID NO: 192 - DNA, 3376 bp, Cricetulus griseus
cttccagtgctctgccagctacttgggcaatgatacccgcatccactggtaccacaatggggccccaatggagagtgatgagcaagcaggcatcgtccttgcagaaaacctcatccatgactgcaccttcatcaccagtgagctgaccctgtctcacatcggcgtgtgggcctcaggtgagtgggagtgctccgtgtccacggtccaaggcaacacgagcaagaaggtggagatagtagtgctggagacctctgcaatcctactgccctgctgagcgtgtagaccaacaaccgcggggacttcaggtggccacgaaccctggctggcatcacggcttaccagtcctgcttacagtaccccttcacctctgtgcccttgagtgggggagccccaggcacccgagcctcacgccggtgtgaccgagctggccgctgggagccaggggactactcccactgtctgtacaccaatgacatcactcgggtgctctacacctttgtgctgatgcccatcaatgcctccaatgcattgaccttggcccaccagcttcgagtgtacactgctgaggctgccagcttttcagacatgatggacgtagtctatgtggctcagatgatccagaaatttttgggttatgttgaccagatcaaagagctggtggaggtaatggtggacatggaggagctgccctccagcccccatgcccagcacatctctgtgaattcaaggaatgtggcattggaggcctacctcatcaagcctcacagctatgtgggcctgacctgcacagccttccagaggagggaggtaggagcgttggctgcacagccaggtggccctggccagaatgtcccactcgagccggagccccttgctgatcagcagctccgcttccgctgcaccactgggaggcccaacgtttctctgtcatcattccacatcaagaatagcgtggccctggcctccatccagctgccccccagcctgttctcaacccttccggctgccctggcccccccagtccctccagattgcaccctgcaactgctggtcttcagaaatggccgtcttttccgcagccacggcaacacttcccgtcctggagcagctgggcctggcaagaggcgtggtgtggccaccccagtcatatttgcaggaaccagtggctgcggtgtgggaaacttgactgagccagtggctgtttcactgcggcactgggcagaaggagcagatcccatggcagcttaggtggaaccaggaggggcccgggggctggagttccgaaggctgcaagctccgtttcagccagcccaatgtcagctccctgtactgtcagcacttgggcaatgtggctgtgctcatggcacctgcgcccccagaggatggtgatggcgtatattctccgggagtccagctgggagcattgatgaccacacatttcctgtacctggctatgtgggcctgtggcgccttggcggtgtctcagcgctggctgccgggagtggtgtgtagctgtctctatggtgtggcagcttcagccctgggcctctttgtcttcacacaccactgtgccaggcgtagggatgttcgggcttcctggcgcgcctgctgtcctcctgcttcatcatcggcctcccacgccccaccccgggccctgcctgctgttgcggaggatgggtccccagtgttgggggaggggccaggccctccctcaagtcctccccaagtggcagcagtggccgcgcgccgccgcctccttgcaaactcaccaatctgcaggtggcccagagtcaggtgtgcgaggctggcgtggctgcccgcggggatggagagccagagcccacgggctcccgtggcagcctagctccccggcaccataacaacctccatcacgggcgccgagtacacaagagtagagccaaggggcaccgagccggagagactagcggcaagagccggctcaaggcgctgcgctcgagcgcgtccccaggagctcctgagctgctatctagtgagagcggcagcttgcacaacagccctaccgacagctacccgggcagcagccgcaatagccccggagacggccttccactcgagggcgagcccatgctcacgccgtcggagggcagtgacactagcgtagcgcagatccctgagacggggcgccccgggcagcgccgctgcgccagccgtgacaacctcaagggcagcggcagtgcactggagagggagagcaagcgccgctcatacccgctcaacaccagtcttaacggcgcccccaaagggggcaagtatgaggatgccagtgtgactggtgcagaggccatagcaggaggctgcatgaagaccggcctctggaaaagcgagaccactgtctaggtgggccagatttaggatgggctggccataccggcttgttacttctagatcttcctgggctgtccaagctgtctaccgatatgtagggtgacccataaaccgagtggaagagcccagcccaggtaggctcaggaaagggcagtgtgtaggcaactcgagctcagctagtcccacgggagagggacaggtgggggaggggcacaattagggggacataatccctagggagtggtacactattcttccagcagagttcagagcaaaacctgaaccctgctcacctgagagagagatgctgccaggtgcctaaagactcaaggggagggagctgatgtttggatctgggcaccacctgtacaatggtctaaagagcgggcgcttagctgctcagttacaatacctactgcctgctctcagctgtccacctccaagggactgagggaaaatgcctccatgaggcttctgtggcaaagccatagcagtaatccaattcctaactccagttagaaacctaaaatgccaaaccatctcccgcctctgaaacccaactagactctgaggccatacctgggtccagggtgctcaagagtctgtgcttccagccaccgtttttctgaacttaaaatgccttttactcccgaaccacatggaagtgtcggaatccctgggtcttgtgaagcagcagggaacccaggtctggtcagctgagagaatagagtggggagaatccatactccttaagatgggtcctgttatttatgcttgctgcacagtcgatattagaggaaaaagctttgtattactcttccacatatgctggctgctgtttacataccctgccaacgccttagcactggagagctttttgcaatatgccggggaaaggggagggagggaatgaagtgccaaagaaaacatgtctcaaagttctggttttatacaatagaatgttttctagcagatgcctctttgttttaatatattaaaatcttgcaaa

SEQ ID NO: 193 - DNA, 3362 bp, Cricetulus griseus
  modified_base (438)..(438): a, c, t, g, unknown or other
gaggatgcggagctgttcatggccctgtatgacccagaccagtctacttttatcagtgagaactacctaattcgctggggcagtaatgggatgcccaaggagatagagaagctgaataacctccaagcagtgttcactgacctcagcagcacagacctcatccggccaccgtatcagccttgtgtgccaaattgtccgggtgggccgcatggagttgaaggagggcaaaaagcacacctgtggcctccggaggccttttggagtagcagtgatggatattactgatatcatacatgggaaggtggatgatgaagaaaagcagcattttattccctttcagcaaattgccatggaaacctacatccgccagagacagctcatcatgtcacccttgataacctcacacgtgattggagagaatgagccactcacttcggngttgaataaagtgatagctgcaaaggagtgaatcacaaaggacaaggcagcagttcagatattcccggccattccggaaaggagaaaaagacccagaaaatagagtttgtctaccatgtggattgaaaggaccacatacacaacagcctataccttccctcgggatccttaagtggttcgaagtcaaacagatttcaacagaagaaatcagcccgctggagaacgccatagaaaccatggagctgaccaacgagagggtcagcaactgtgtacagcagcatgcctgggaccagtccctgtctgtgcacccactctccatgctgctgagcggcattgtggacccagctgtcatggggggattctccaactatgagaaggctttttttacagaaaagtacttacaagaacaccctgaggaccaggagaaggtggagctgctcaagcggttgattgccttacagatacctctgctcacggaagggatccgcatccacggggagaagctgacagagcagcttaagccgctgcatgaccgactgtcttcatgcttccgtgaactgaaggagaaagtagagaagctatatggggtcataacactgccacccaacttaacggagaggaagccgagccgtgcaggctcgatggtactgccctacattctgtcctcaacgttgcgcaggctatctgtcacctctgtggcctcttcagtgatctccacctcctccaactcttctgacaatgcgccctccaggccaggatctgatgggtccatcctggaaccactgtttgagcgcagagcttcatcgggagccagagttgaagatctgccacccaaagaagacagtgagaaccggattagcaagttcaagagaaaagactggagtctgagcaagtcacaagtcattgcagagaaaccgccagaacctgacatgatgagcccaggcaaaaaaacacaaaggccaaagagtctccagctcatggacagccggctgacaccattccacagttcttcacctatgcagtctacagtcttgagcccacctccactcactcccaaagctacaaggaccctaagttccccatctttgcagacagatgggctgacggcttctgtccctcctccacctcccccaaaaagcaagccctatgagagcagccagaggaactcagctgagattgcaccccccttgcctgtccggagagaagccaaagccccgcccccaccacctccaaaggctcgaaagtcaggcatcctgtcttctgagccaggctctcagtgaagatgtcagtctggctctgcacctctgacgtgccttggaccactgttgcctgagaacggccctagaaagggtggcctgccatgcagggctccctgacagtgcagtggagaacagccccagcaactgactcctgtgtggatttctcagatggcttcggaactgctgtgtttaagacttccttccttctctcctgtcggcatccctaccctgcctaatctcccgagagccagataccaagtacactccaggagttgccatggtttctttccctaatgtctactgttgcctttgagggaaagagcacatgtgtgtgtattggaggtgggtccactctctggtgtagatggcttctccaagattctgtggactcacattctggcactctcccgatgaatagcccccaccatgcatcagtcatgtgctgacccttggattcctttgaaacttttgcactctgtttcccatcctctgcttctctctgagttcacatcctgggtactgagggacctagaagccatggtcctcctagctacatttccagaccctattggcctgatgagatggtccctgcctgctacttgactttaccctggagaatacagtgcaatatgattatttattcctcttgttcatataattaatctgattgcttgctgatggtactaatgtccataatcctttcagaaggaaaaattaaggtgactttgatggctaaatattatgttcacataaatttaaatatagaagggacaggaagcagagggcagaaaggaccagtttttattgcccttgccaagatctctgaggcatggaaggcactgaaatcagccctgagattgtcacaatctttatgaatgaatgttgattgatggcttgtgagtgagtttgaggcattgttacatcactctttttcattccctctctgtcatggtgacttgtcttgctgtgaggtcgttttgttttttctgctctggccttcatcattctaaggaaacaaagtgagacttctgtccagaggctttcgctgtatgaactggaatccacatttttcaccctctactggtgctttgagcctgccaggcctggctattctgggcaaaagatttgtgaatattaatgagcctagcatctattttttagatattggtacaaattgtcctaactctctgcggcagccgtggttaatagtcttcagagtcaccaagctggcctgctgtgtctagacttccagtcccttgctaagagacacacttccctcgtgtgctttggaaagttgacaactactgctttcttggacacttccattcctccctgtcaaaatgccttcaccatgattttataagtaattggatttcatacatgaacagttagggagatgtgtgttgaagagttttgttcatatttgctgttatttattttgtaaattaaaatggaaatgtattttaaagtttactatgtgtttagcttgttattgtttttagattattaaaataagatcttgggctttaatggtttttccctagtgacagctccttcaagacacttcaccctcagggcccctctggactcatttcattacagatcctgtagaaatgcatactgtgggatcctggtgtctgtcttacatagaactaataaaatctg

SEQ ID NO: 194 - DNA, 3357 bp, Cricetulus griseus
ctcagccaagaggccggcgtgtggggttgagtggcctgagctcagggcgcggagagctcccggcggcgaggacgacggcgttggtcgcggctgtaacgacggcctcagcaggcggggaagatgaaaggtagccggatcgagctgggggatgtgacaccacacaatattaaacagttgaagagattgaaccaggtcatctttccagtcagctataatgataaattctacaaggatgtgctagaggttggcgagctagcaaaacttgcatatttcaatgatatagctgtaggtgcagtgtgctgcagagtggatcattcacagaatcaaaagagactttacatcatgacactaggatgccttgcaccttaccgaagactaggaataggaactaaaatgctaaatcatgtcctaaacatctgtgagaaagatggcacttttgacaacatctatctgcatgtccagatcagcaatgagtcagcgattgacttctacaggaagtttggctttgagattattgagacgaagaagaactactataagaggatagagcctgcagatgctcatgtgcttcagaaaaacctcaaagtcccatctggtcagaatgcagagacacaaaagacagacaactgaacaaattacaaaagaactttcttgcacttgcttgtcgccaaataaaagaaagacccattgattcccctccccctttcttcagcttttctcccttgatattcctcctttctttcctcttaaagtttgtaatactttcaaggactcttaaaaatgatcatgtttggattgttcaagtctctcatatttgtgaggaggttgggtggaaggaaggaagagaaaataggtctgtatagtttcacagttaagatgtcctctcaaattgggtatcagatgatttcaattttttaaacatcctgctttcacattgaagggcagagcctacaatattgtttatttcaaaaaaagccacagcaatatcttattctctaattcatagacaagcttagtgtatttgtggtactttgagttttaaagactatctgtgggatgttaatccctgacattgccttcactctacctttagtcctttgagtactctcaggagttggaccattgttatccttgtgagaaaatactaagctgatttagggttttaaagcagtttttctctatttgctgattgctggggctgtttgtgtagttagtattagactttgatcaaagtatttcagttaaactgctatttagctgatgagtgggttgcttgttggcaggtgttttttgttttttttttctttccttgctgttaatcttgtttgctagaggcattaacttgtagagtatgagctggtgaaattaactgttttaatatcccagctagagatacggcctttaactgacctaaagaagattgttacaattgatttttttccctcttgtttttcagtaagcccaataatagtgtaaccttaaatggagttatatccttataagccaatacccctaaataaacccgaagcaagtgttttctcttggacatataaaattacatataaagcttagatggacttgtaacacattaagtgttacctaatgtcaactaatacagattgttagaactgtggtcattgagtgtttgataatatatgaaagaatttctagacagtatttttgaaaataacattgttatgctattgcttatctgttggagaacatcccagatttgcttacactctgtgcctacaatgttgagtttaaagagttggaataagaggaattgacaaattccttctattcttggaacaatagaagtatgaagtgttaatacaaatatcactgtgacctccagttgacaggtttggttaaggccagatcatttacaggcacattggtagtggctctgatgggttgagaactataatgtggagacatgtgagatactcatattttcctcacatagcctcatctcaaaatacatggcatttcttagattgtcagtagtcatcagtggctcgagaaatgttcttactagactttaaaacagaacatagtatgttttctctcatttgactttaaaaggaagtttaatatatcttctttggaaaattgtggtatgaaagtcttatttccaaataggttaaaaaaatgcttatgcacactttataactcttaagttttttgcttgttttgttttgttttgagaatgtgaaagtacattaagtggacttcagtagtcttgagtgccaagaaaatacagacaaggggtgtgattgatggatggacggattgatggatggacggacggatggatgaatagggtagtgaaattgtagaaataccatgcttgtttcttgggtatcagttttctagacagtccaaatctaagctcaaaagaaaagtttagtgttaagcacctttatttccatggataagcttcagcttactcttgccaagagaagaaggcataaatgatagagtggaattagtttgaagaagtcagccattttgtaaacttccagatagcaaatagattttgatatataaaaagttttctgagatgacactgcctctatttctataaccatttcacttggactatttgagtagtcctatgaatgtatccctaaatgtgtttattgaaaccgaatagctgcctcacaacaattaagtacatgttatttaaagaggaggaacaaataataaagtttgaattgagtgtgtaggctccctattattatttcctttttcacactagtcggtgatttaacctaaattttaattgtatgtaaagggtcaattgtcctgtatcaaagttgcattaaataattccatccacttacataaggggaagatgtgaaagaggtagaaactggggctagtccatatgcctgtgagtcaagaaatgctaaagtaacaccccatgttaagtttgtgatttttggtttgggtttgtttgatctccatcatttttcaggacagataatttttactgtggggtaaataggttaaaattattatgtatgctatttgaatttaagttctaaagtaatctgtagagaaatctatgcaatatataatttgtcaagattaattttcatctggggaaaggagtttctaagtgtctccaaagcaggtcactcattaattgaaagtcctccaaaaagagaactattgggaagcatggtgtgtggtggtggaaaagaaaaactccctcagtttttggagggaatatctttaagatacttaagtggctgcgtttacttggtgcagttaagaattaaacttgtcaattttaaagttgctgttacatctgaaataaacttacgtgatgttctggtagtgatctgt

SEQ ID NO: 195 - DNA, 3355 bp, Cricetulus griseus
acagtccttaatagttagctggactaagttaattaagaatggggctgtcaagagtgctcaagaggcccttgaagctattgagacgaaagtaccacttatgttacagctgctagttcatgaggatgatgacatctcctccaacattattggattttgttatgattatctgcatattttgaaacagctttcagtgctctcagatcagcaaaaagctaatatagaggcaatcatgttggccgttatgaaaaaattgacttatgatgaagaatataactttgaaaatgaaggtgaagatgaagccatgtttgtagaatacagaaaacaactgaagttgctgttggacaggctcgctcaggtgtcaccggaactagtgctggcttctgttcgaagagtgttcagtgccacactgcagaactggcagactacacgcttcatggaagttgaagtggcagtaaggttgctgtacatgctggcagaagccctcccagtgtcacacggtgctcacttctcaggtgacgtttcaaaagctagtgctttgcaggacatgatgcgaacgttggtgacgtcaggagtcagttcctaccagcacacgtctgtgacgctggagttctttgaaaccgtggttcgatacgaaaagtttttcacagttgaacctcagcacattccatgtgtggcattccagtgctaaagtccggagcagaaccgcctacctgttttctagatttgtcaaatctctcaataaacaaatgaaccctttcattgaggacattttgaatagaatacaagacttattaaccctttctccacctgagaatggttaccagtccttgctgagtagcgacgatcagctcttcatttacgaaacagcgggcgcattgattgttaacagtgactacccagcagaaaacaagcgggctttaatgaaggacctcttgacaccactgatggagaggtttaaggttctgttggaaaaactgatgatggcacaagatgaagagaggcaagcatcttttgccgatagtctcaaccatgcagttgggtttgccagtcgaactagcaaggctttcagcaacaagcagactgtgaaacagtgtggctgctccgaagtttacctggactgtttgcagacattcctgccagccctcagctgtccactgcaaaaggacatcctccgaagtggagttcggactttcctccaccggatgatcatctgcctggaggaagaagttctccctttcatcccgtctgcctcagagcacatgctcaaggactgcgaagccaaggacctccaggagttcattccactcatcaatcagattacggccaagttcaagatccaggtatctccgtttttacagcagatgttcatgcccctgcttcatgccatttttgaagtactgctgcgaccagcagaagacaatgaccagtcggctgccttggagaagcaaatgctaaggaggagttactttgccttcctgcaaacggtcacgggcagtgggatgagcgaagtgattgcaaatcagggtgcagagaatgtagaacgggtgctagttactgttatccaaggagctgttgagtatccggatccaattgcacagaaaacatgttttatcatcctctcaaagctggtagagctctggggaggcgaagatggaccggtgggattcgctgacttcatttacaagcacattgtccctgcgtgtttcctagcgcctctaaagcagacctttgacctggccgatgcacagacagtgctggcactttctgaatgtgctgtgactctgaagacaattcatctcaaacggggccctgagtgtgttcagtatcttcaacaagagtacctgccctccttacaggttgctccagaaataattcaggagttctgtcaagcacttcagcagcctgatgctaaagtttttaaaaattacctaaaggtgttcttccagagagcaaagccctaaagactggatttccccgtcctatgtcatgaccaggaatccagttaataacttatgaagaagcagtttgtgtgtggccattcacactcgtctgttgacattgttctgagcttatggctgtgtatgtggggttttctgtaaaatgggtgtaatttttccctaaatacaggcatgtgacaacaggaaaagttgcctgcatgcccgtttaaattgtttatgtaaaaatgctgttataagacatagatttatcctagtaccttaatttttttctttatatgaaactttaaagttctttattaaaaaagaagctatagcagtgggaaactgactctaacgattgaatgtaaagttggaaatgttcggtttcgtgtatgcagacacaagctatgggataacaatcaaaacatcatttttgtagatagccattacatttcttcaaactgtctcaatgccaatgtgtatcctataagagagtgggttcctaaattagtcagtttaaaagtagctgctggtgttacacatttttttttaaaaaaaaattgaactacaccaagtctttcaagacaggcaaaactgggtgtttctttgctattttcctgtacaccgtgagatgcaatagcatcagttccagcagtgtgattgtgcaaggtattatagtgagtagtgcagcatagtagtgaagaccttatatgctgtggactctggacccaggttaagtgggttcagacatcacttacaccactaactgattttatgaccttgagcaagttaaacgacttcttcctgccttggtttccccctcagaaatgggggaaataatggtagctacctcataacttgttaaaaattcaaggagttaaaacataggtctcagtattagcttgcattactgtactattgagtccatacatggctctctaaaaccctacagtagattcacatgtgtttagacctgaggaatcaggacatggaaatcagagtgtgtaagtaagaaacttcatgtcaatgtaatcatgtataagaatgctcattttcattccttgaggttaccatcatgacaggaaacttttccatcattaagttccttgttgttaaaagcaagcacccaaacaattgtctcaagagtgaatctcacttattacaggtgagaaaacagaaagacatgggcttatggtgcctgatttagttagtagtcctgtgcctaaccaattgcttcagtctccatgcttgctaatgggctctcaagtgtcttgactttttaagaaagtactacatggtatttgaatgtgtatcactttatgtggtaaacatgtgaagtcctttggcttagtcatatttcctccataagttttgagctgtgggtttttctgttggaagaaacttggatggacctgtca

SEQ ID NO: 196 - DNA, 3352 bp, Cricetulus griseus
cgcgcagggcgcaggcatcctccaccgcggcgtctgtccgtggcggcagcgcgggagacaaagcctcgggaggaagatgcccgcggggcgcgcaccgggcgggccagggagcgggcgcctccgagcctaagtgcgcccagctgtccgtccgttccggggacgccgaggcccagcgggtccagcagcgggcggggcccaggtgcgccgggtcgcagcgggcctgtgactgctcggggggcgcgccctcccgccgcagccgcagtggccggcgccgcagcgaggagccatgggcaacatctcctctaacatctcggccttccagtccctgcacatcgttatgctgggcttggactctgccggcaagccacggtgctctaccggctcaagttcaacgagttcgtgaacacggtgcccaccatcggcttcaacaccgagaagatacaaactgagcaacggcaccgccaaggcatcaggctgccacttctgggacgtgggcggccaggagaaactacggccgctgtggaagtcctacagccgctgcacggacggcatcatctacgtggtggattcggtggacgtggaccggctggaggaggccaagacggagctgcacaaggtgaccaagtttgcggagaaccagggcacgccgctgctggtcatcgctaacaagcaggacctgcccaagtcgctgccggtggccgagattgagaagcagctggcgctgcacgagctcatcccggccaccacctaccatgtccagccggcgtgcgccatcatcggcgagggcctcaccgagggcatggacaagctctatgagatgatcctgaaacgtaggaaatctctcaagcagaagaagaagcggtaatgcgtccgggcagcgattggaaacgaggctgagtgagcgagccactgagtgaatgaatggacgtctgggtgagcgagaacccgcgcccgcgaacaaagacaacgaaccaaagcgatgcttcgagtttttaagacacgatctctgtatcctaatgcaggacttggagtgtggaggctgcatcaccaccctgctcgccacctgcccccacccccccacccccagctcaggggaccttttgtctaaaatgcttgagctacagatggggtggggtgggggtaaccggcggggagtggacgtgaggacgcgagggtccggtggtgagccctctggccccaggtgggaaggttggatgtcagagacacaaaagcgatttcttcttgctccatcagggccagaagttcaggctgcccagcccccaatgcgggggggaatcacgtgtgagttacctgaggtatgcagttcacagaactccggggatacccctgcgggagcgggtaggcactggggtgtactgatgggagggtggggatgaccgctccttgcattctggagctgtgcaaactgagtagttttatgtcacagggctggcccctgtttgcagtttcatttgtcctgctctgggcccaaaaggaggtggtggtttgggtccgtccagaggactgcctgggaccatgcggcagccggaggacccaggggtgttgctgcacttctggccttggctgggaatggcctggaagacgccactttccaggggtgggtgtgtgtggttttgctgagaactgctgttcagcctggcatgagacctcttacagatggcctaggccctatcagtgtgttggtcactatcacataaagagaccaataaaacaaagaagtgtgtgtgtgtgtgtgtgtgtgtgtgttccctccatacgcataatcggcataaatactggaccctctgtgtggaatttgaaattctctcagcctactgattggtttggaggagcacaccaactacagatgtgtgctgaattgcaaaatggttttcttggaaaggatgtctgatcattctaaccacgtggtgattaggtttcagacattttttttaacaaacaaacaaacaaacaaaaaaaaaaaccaacttccacaaatgaataatcttcactttgtccttttgtgccccttggcactacaagtggagacatgttcagatttctgagttgggtctttgtagcctatctgagttcagtattttactcaaagtgtgtcattagagtatttgatgtcattcaccaaaagaataaaaccccaccttggaaatgctgacctcgtttgcatggatttgaagagaggaaggtctgaaggatggagtcctttggaattcaccctgtgggagctggcctggcctcagagccagccagcactttggttaaacgcaaacaacaatgagtgcttgagatgaaaagggagcaggtgtgtgacgtcatggtcactggtactcaggcacttcacagtttacttgaaaaaggctttggaaaatagataaagtgaaagaataaatacatatttttaataatgtaattttaaaaatcctttataatcaggagtgagtcttggcttggtaaaagctgccatttgtcctgaaacacagtatcaaaagagaaatttacaactagcaggttttgtttgttttttttttaatctcccctctgaatccatcttttagggtaggagtttggtttccctccatgacgacacgttgctgtgcaaaggaggccatggttgtgagtgagcacggagttggtcacaatatgagcccatccctgttgtccttgaaacacgaagagtcaacttaggaaccataggcagaaatcatggcttcctgcttgaaacccaattcttagattgtttttaaagtcaaaatatagcagtccatgatccttccttgtgtgttccatagccctctgatgctggtgtttttgtagacactcagtagagctaagcagtggtgagcagcctccaagatctgtttacacagcaatggggcattactggcttcttcatgggctggtcccgtggtctgaagattctgtatagaattattaaaaaaaaatccaccttcttttattttcttcacaatttcttaagcactttgacattttggtagttccacaatatggagagaataatatatttattttgtgacattgcctatgccaaatactttaaccttcctgtgctctcaatacctgagttccaggtcagtgttcagatcctggcctgcttgaacaatggcatgggatggttttgtgccattatcaatacttaagggtgcagttgactgttagtagttgtgcagtaaagtcaagccctgtggtgtatcagcaaatagttaagagtctcagttgatttctgtaatgtttgacctaataaaacccatttcatttgtgacaagagggaacccagtgaaaatcactgtgtggtggtgtcatgggggagttccta

SEQ ID NO: 197 - DNA, 3352 bp, Cricetulus griseus
aacggcaaacccagcacctgggactagaaaaagtctagcaatgcggaggtgatgaaggagcttaacagatgccgggaggagaactcagcacgcttggacttatccaagaggtccatccatgcgctgccgccatcagtcaaagagctgactcaactcacagagctttacttatacagcaacaaactgcagtcccttccagcagagctgggctgtctactaaatctcactgacacttggcttctcagtgagaactcactcactagttttgcctgactctctcgataacttgaagaagctgcggatgcttgatttacggcataacaaactgagagagatcccctcccagtggtgtataggctggactctctcaccactctgtacctccgctttaatcgtatcacttgctgtggagaaggacatcaaaaacctgccgaagctgagcatgctcagcatccgtgagaacaaaatcaaacagctccctgggatgtagctcacaatcaacttgaacaccttccaaaggagattggaaactgcacacagataaccaaccttgacctgcagcacaatgaactactagacctcccagatacaataggaaacctgtccagtttaaatcgtcttggcctgagatacaatagattgtcagcaatacccagatcattagcaaaatgcagtgcacttgaggagctaaatttagagaacaataacatttctactctaccagagagtcttttatccagtcttgtaaaattgaatagcttgaccttagctagaaattgcttccagttatatccagtggaggtccatctcagttttccaccatttattccctcaatatggaacacaatcgaatcaacaaaatcccatttggaattttctccagagcaaaagtgttaagtaagctgaatatgaaggacaatcagttgacgtcacttcctttggattttggaacttggaccagtatggtagaattgaatttagctacaaatcagctcacaaagatcccagaggatgtatctggtcttgtttctctcgaggttctaatattgtcaaacaatcttctaaagaagcttccccacggtcttggaaatcttagaaagttacgagaattagatctagaggagaacaaactggaatccttgcccaatgaaattgcttatcttaaggatttacagaaattagtcttgacaaacaaccagttgaccactcttcccagaggcatcggtcacctcaccaacctcacacaccttggccttggagagaacctgcttactcaccttcctgaggaaattggtacactggaaaacctagaagaactgtatttgaatgacaaccccaacctccacagcctgcccttcgagctggccctctgcagcaagctgtcaatcatgagcatcgagaactgtccactcagccacctcccccctcaaattgttgctggagggccttcgttcattatccagtttttaaagatgcaaggcccatatcgtgccatggtctgacacaaactgctggtcccacacagtgttcaaaaatagactgccattaatatttcatatctatatctgtatctgtggatattgaactatggcagatttataaagactgcattatgtgtttctgctaatagaggaatcatagccatttagattttttttaattctgtaaagaaaaaaaaggcttatataagttttctttgctaaatttgatggatggttttctgttgtataatctgatatgccagtttgttttaaaaatcttccaacaaattatgaagtcattaaatttaagggacaaagtaatatagttagataggtgtttctcttaggaaaaatgtggtccaaaagttttgttggaacttttcatacacatttccccttacatttgtcaaatctttataattgcataagccctgaaggtagaacttttctttaacttattttgaaatttgaaatttaaactttgtatattgtttacagttggagtgaatcactggattatttttgatttgctctgctttgatcagtcagagtttatattctctgttcaagaatttgcatcagttagtttaaagattaaaaaatattttgttgaaacagctggcaaacagaaaatatacattgtagaaatcaaaatttctactacttttattctctgatgaactataaagtaaatatctggtctttggggtgggggtattgagacctttcctagaataagtatttttactttgggggagcagaaatctgtggtgaaaggttttctcttcttttctcttcttttccattcctgaaggttgcagatccacaaaaattcaacagaaatctggcaaataaattacacatgaacacacattctatatatgtatatacaatgctatatagacatgtatttattatatcataaactaccgtaggtaactttaaagactttaccctttcgttgtacaatgagatgaatgtctctctaaagactgcagtcacatatgtttcaaggttatttaacagtgtactgtggttttatatcttgactcgccttgtacatctttctgttctggagtatctgtgtctaagcacaatatcttcacactgtgctgtattgctgctgaactaaatgcactttccccatatgtggggcactggcttcaaacaattcagttcagtaccattatttttcaatctcatgtttccttcgttagtaggtggtatagtacagttatgggaaaatggcgcattgcattgacacattggtagttccatggaagttatgtaggatgtgcatgtactatttgataatattttcttttgctttactgcctttacaaacagcaaaagtgtaaatttgtgccccttacatagtactcttattttggtagtgttggtctaggtcacttacttattgaggagaccccaccccacagagcaagtgcatcctagatatcaccctaaaacataccttccacatgatgaacaactattatatataattaaatattgctgcttatttttctgttggcctccccccagtttttgggcattttgttctaaacaactattttttacaattaaaagtgtaatatcaagataaaaatctggacttttgcttttcctggcactcaaactcaagactgggtttgaggagcaaatctgggttcataactgacaaatttgtaaggagcaagtaagaaatggaaggcaggtaaagatataaaaccctagaatgcttaaatgtgctgtaaaactattgtagatgttcactggattttacaaagtaatacccttctccttttccatctactgtggcttttcagttaagattttgtttataaaaggaatttattacagttctacct

SEQ ID NO: 198 - DNA, 3352 bp, Cricetulus griseus
  modified_base (267)..(267): a, c, t, g, unknown or other
aacacaatggatttctccaagctccccaaagtatgtgacgaagataaagaaagcacatttggttatgtacatggagtctcggggcctgtggttacggcctgtaacatggcaggtgcagccatgtatgagctggtgagagtggggtcacagcgagctggtgggagagattattcgattggaaggtgacatggctaccattcaggtgtatgaagaaacttctggtgtctctgttggagaccctgtacttcgcactgggaagcccctttnaagtagagctcggtcctggcattatgggagccatttttgaagtaaatgtgtctgctcttagcagagatatcaaatgggagtttacaccaagcaaaaacctacgggttggtagtcatatcactggtggagatatttatgggattgtcaatgagaactcactcatcagacacaaaatcatgttacccccacgcaacagaggaagtgtgacctacatcgcaccacctgggaattacgacgcctctgatgtcgtcctggaacttgaatttgaaggtataaaggagaagttcagcatggtccaagtatggcctgtgcgtcaggttcgtcctgtcactgaaaagctaccagcaaaccatcctttgcttactggtcagagagttctggatgcacttttcccgtgtgttcagggaggaactactgctattccaggtgcttttggctgtggaaagacagtgatttcacagtcgctgtccaagtattccaacagtgacgtgatcatctatgtaggatgtggagaaagaggaaatgagatgtccgaagttctccgggacttccccgagctcactatggaagttgatggtaaagtagaatccatcatgaagaggacagcactggtggccaatacctccaatatgcctgtggctgcgagagaagcctctatttacactggaatcacactatcagaatatttccgtgacatgggctaccacgtcagtatgatggctgactctacctctaggtgggctgaggccctcagagaaatctctggtcgcttagcagaaatgcctgcagatagtggatatcctgcatatcttggtgcccggctggcctctttctatgaacgagcaggcagagtgaaatgtctaggaaaccctgagagagaaggaagtgtcagcattgtaggagcagtttctccacctggtggtgatttttctgatccagtcacatctgctactctgggtattgttcaggtgttctggggcttggataaaaaactagcccaacgcaagcacttcccctctgtcaactggctcatcagctacagcaagtacatgcgtgccctggatgagtactatgacaaacacttcacagagtttgttcctctgaggaccaaagccaaggagattctgcaggaagaagaggacctggcagaaattgtgcagcttgtggggaaggcttctttagcagagacagataaaatcactctggaggtagcaaagcttatcaaagatgacttcctgcaacaaaatggatacactccttatgacaggttctgtccattctataagacagtggggatgctgtccaacatgatttcattttatgatatggcccgtagagctgttgagaccactgcccagagtgacaataaaatcacatggtccattatccgtgagcacatgggggagatcctctataaactttcctccatgaaatttaaggatcctgtgaaagatggcgaggcaaggatcaaagctgactacgcacaacttcttgaagatatgcagaacgcattccgtagccttgaagattagactgtgtctctttcctcctcctcagcaagctcatgtgtatatttccctgaatttctcatctcaaaccctttgcttccctattgtgcagctttgagactagtgcctctgtgtgttatcatttgttttgttgtttctttggtaggtctttaaaacaaacattcctttgtgccagtgtttgaaggggctccctgaccttcatctggagtggtgaatgtagtgcatatggtacacatactgtaaacctgtatgtaaggtgactaccccttccctcatctccattaaactgtaaacaggactactgcatggactctattgggaatggaaggccagatctctgtacctatggataggtactgaggaaatgactctgcatttggagtcagaccacttgcaacttagtgttttgttgagtaactaactgttttgcaagaaatatttccatttagaaacataaaagattaatgttccaattattggggcacttgggaactatttgtctttataacaggcgtttgcaaggctgagcataatagataaatcagttccctctgaaagtgtgaaagaaataaattaacatcatcttgttaaagcatattttatttcactgagagaaattcaatatcaaggacttttatatactcaattaccaagaaatcttttttaagtacaatttaaaaatcattgaaaatgtgatccacatcatagccattcttttcctcaaacttaggtggacaagcttctcagagtggcagtgggaactggcatgtcacaaataacgtagtagtgcttacaggcagtttgcccctgtaagaaccagctgtgctgtggtatttcttggggccagagtggcattatttttacaaggtacatgtgtcatatgtttgtttgcttgatgaaattctagaaaaacagtctaccaattgcaagaaaatattacttttctatgtttttattcactggctcagaaagcttctcaaagggtctgtggtcatagtagcttgaacaatgttgacagatgtggattatgcaatgacttgttgagatatggattaatggtgctgcttaatcagtttgcttccaatgtggctttgtatccagaggcccctgactagtggaaatgaaaaagatttcaaaacctttctacttagacctaccagcaaactaggtttgtgatcagagtgaatgatccaaagaaactacttgaccaagtttgttttttgttgttctggatttgggatgtgcattatttctccttttaagaatattgatgtatgagtgtgaagaagctagagaaatgttgctcagatctccactgtaactttccttttatccacattgtagagttttggattgttcactgatagtgtttctttagtaaggatatgttaaaattcagtgatcttttaaaaagattatgcagttctatttattgtgctgtgcctggacatgagtgcagccagttaaacaagtttcataagtattttccagtgttaaatctcacacctacaccctttggaacttccatgctggacaacaaatagaagaggccatat

SEQ ID NO: 199 - DNA, 3345 bp, Cricetulus griseus
caggaagcaaccatccaacaaccttgacagagtgaaactcacagatttcaatttcctcatggtgctgggcaagggcagtttcgggaaggtgatgctcgctgacaggaagggaacagaggaactgtatgccatcaaaatcctgaagaaggacgtggtgatccaggatgatgacgtggagtgcaccatggtggaaaagcgggttctggccctgctggataagcccccgttcctgaccccagctgcactcctgcttccagacagtggaccggctatacttcgtcatggaatatgtcaacggtgggacctcatgtaccacattcagcaagtagggaattagagcccaagcagtattctacgcagcagagatctccatcaaaatcgctgattttggaatgtgcaaggacacatggatggatggagtcaccaccaggaccttctgtgggactcccgactacattgccccagagataattgcttaccagccatatggaaaatccgtggactggtgggcatacggtgtgctgctgtatgagatgctggctgggcagcctccatttgatggtgaagatgaggacgaactgtttcagtctataatggagcacaacgtgtcctaccccaaatccttgtccaaagaagctgtctccatctgcaaaggactcatgaccaaacaccctgccaagcggctgggctgcgggcctgagggagagcgggacgtcagagagcacgccttcttcaggagaatcgactgggaaaaactggagaacagggaaatccaaccaccattcaagcccaaagtgtgcggcaaaggagcagaaaactttgacaagttcttcacacgagggcagcctgtcttaacaccgccagatcagctggttatcgctaacatagaccagtctgattttgaagggttctcgtatgtcaacccccagtttgtgcatccgatcttgcaaagtgcagtatgaaatccacaaatgagagatcaaatgcctccccagccccccagcctccccatgcagtgggaaatgacccttgaccctaaaatttaaggctatggccttatattttgttccacacagaggcctgacaattcttaggacattagcccataagtgatcaacttttatttgatatattctccataccctccatctttggattttcatcatcaggatccctccaccaaatagtaaagtgaacctactccagctcaagggctggaaacatctccacccaagatgtctttggaatgaaagaacaggaagcccaaagagtaagcaaagagaggttggtggtagtagaatcttgaagaccccatcacttctatgcctcagtggaaacagtccctagaatctgagagggcaggatgaatctaatcactgttcccaaatgtcatagcacaaccatagtacagcagcttaagaatgaaagaaagcttcagacgaattttcattgaatctatcatctgtgttaccctacttggttgaaagctatcttgataactcattctttttaagaggccaaatcatctaaggacattgctaagcaagcatgtgaaatcatttcagatcaaggataaaccatgtgtatgttcattttaatctctgggagatgattcttcaatccagggtgccatcagaaccatgccactattcacgagtgttgttagccaaccccacacacatgataatattttactacctttgtgggtacccttcctaagaagctggtgtgtatgccccatcctttttgtactatttatttaataagctgcagtgtcatttatgaaagtacaatgtatagtaatttaatcaaagtgttgactagcatcagtctctgttaattgattttcctcctttctccagccataacatccacttagagatggaaaacaatatagcttgggttcccgtttccagttcctatcgaatgacacacctgcagttataggatcaagatactttctgcttatatccactcaaaatgttttcttgctagaaggattttaatgttttgcgagtgcatcatgcaatggattttgcatgtttataataaaccttaataacaagttaatctataaaattgatataattgtatcaagtataaagagtattatgattaatttttataagacacaattgtgtttatatttgtgaaggctcattgtttctagtctgtctttaagatgacgttgttagtctttattcattgctgctgtgctctctcttacccgctaccccacacaactggcactctatcagatattaattttttaatgtagacattcatgtggtcaggtgtcagtcagcaaacacactggacacattaagtcattaaacagccttactgtgaccctccccagaagcccacaagttccaaagacttttttaaacttaaaacaagaaattaacttattaactctagtagaagaacctgactgtgctgggctatttgtacttttttatagagaactttaatgactcaattcttttaaaatgagtttttaaaaaaataaaaaattcataaaattccaattccatcgagcctatagggggacttaacccacattggatagagcacccttgacctgcaatcccatggcatggttttcctgaaccagtgaggtctggagtccacattggaatgactggagtagacagaaccccacttttcagaaaacagcttcccaccccactttgtaagaacccctttttctaaaacaaaaggcgtggctttgcactttctgattaaacaactgtgtcttttgtctcctgcttcattttaagactattctgtcatcgtttgtagatttttgttaatattttgcctgggaaaaatgtgactctctctttgggacgtttagtagactattgaaaattatatacgcaggtggttactattttgagcctaagggttttctaagcatctggcctcctatcctgactatgaaggttttccagattatcttttataggcgatgagtagcactggaagatgcacttcctgtgtgatttctattttggtttatgaaggacataccatgtttaaatctctcattgaaaaaaaaaaacaccgtggagcatcccaaatgggcatggaggaaggagtgaaggttgaggttttcggcctgaataggccgttactgataagccgtaggggctgcgccactgctcatttggttacttagtaggtaagaaggatatgttaattactgcatagctttcttggatttgtgtaacctctaatcttcgtttgcatgattcgctttgttagatgcattcattgtagtttggaagcaagcgtttacgaataaagctactgatcactgctgaaaaaaaaaaaaaaaaa

SEQ ID NO: 200 - DNA, 3343 bp, Cricetulus griseus
  modified_base (58)..(58): a, c, t, g, unknown or other
agtaccagcagttcaccgtatgttgccgcctcccatactctcccatcaatggatcagntagcatctaggagccagagggaatgctgctggaagctcacagacgggtgatgcgcttggaaaggctttggcgtctatttattctcctgaccatacaagcagtagttttccatcaaacccatcaacaccagtgggatctccttcacctctcacaggtaccagtcagtggcccagagctggagggcaagctccttcatccccaagctatgaaaactcacttcactccccataatgcaccaatttggtaaaccttacaattcaaactatggaggatcaagccttgttacaaacagtcgatcagcttcgatggttggaactcatcgggaagattcagtcaatctcaatggcaatcattcagtcctgtctagtactgttgctgcctcaaacacagacctgaaccataaaacaccagaaaattacagaggtggcttgcaaaatcagtctggaaatgttgttccaacagagatcaagactgaaaacaaagaaaaagatgagaaccttcatgagcctccttcatcagatgacatgaaatcagatgatgaatcttcccaaaaagacatcaaggtctcgtctagaggcagaacaagcagtaccaatgaagatgaggatctgaatccagaacagaaaattgaaagggaaaaggaaaggcggatggctaacaatgccagagagcgcctgcgcgtgcgggatattaatgaggcattcaaggagcttggccgaatgtgtcagcttcatttgaagagtgagaaacctcagacaaaactcctcattcttcatcaggctgtggcagtcatccttagtctagaacagcaagtcagagagaggaacctcaaccccaaagcagcctgccttaagagaagagaagaagaaaaggtctctgctgcttcagcagagccaccaaccacgctgccaggaacccatcctgggcttagtgaaactaccaaccctatgggtcatctgtaaacgtcagccagttccagcatcaacagtaggctagatagaaggtgacctctcctcataaagacttggacaactcagattatctgaagacacaaacctgacaggaaggagaagaaaaacaaaacacttgaagcaagaaactcaaatgtaatcctatgatcaaagcaactggtcaacacttccatcagaagtgaggataggaagctcatgagagaacgccggcccatgaggtgtttacagcatatcattctgctgtaagcaatgtgtcgcttctgcacaatcagagactgtctcatctctccactcaatgtggaagttgccttgtgcctaaactgaattgacaaatgcattgtaactacaaattttatttattgttatggaactgtgaggtctacatataaagggaaaagttcatgtgggaagctgatctacactcagctgatgccagcattgttaaagctgttcacaaagcagtggcaaccattggcccttagcattcccggcatacctgttagtgtcttaaaaaggaagggagtcctttgttgccctctccgaccttcgccatataaatagtgttttccatgaaataggaaaatattacttggtatagcatttctctcttgttttttcatttcatttttattttcttctttgttgggttgttatatttgattctgagtcggcataggttatggtcacaatccagaaccctccttgcagccctgtgtgctttgttcatgtccttgcagtggtaagcagacaccatctgttgaccattagtccttagtctaagattttgaaaggggaaattttgtcccctggatttgcccccaaataaacattgctttatttctaataatcactaagacttttcaggcttctaggtttcatagtaaagctataatagcaagaagtgtaacttacaagggagagtctactttttagaaaattgctttgttttccaagcagtaagtactacacaatatagtacttgtaaagtgttagctgtaagtaagcacaaaatgcattcagtacaatacaaagatgacttttcagtcaccaggacaggcagtgtgatgaaggcacacaaccactatgaggctaattacctatggaatccaagagcaatggtcacatttccttattctagcctttatttctgtcctttgggtggctggtcagtgggggtgtggggcaggagggtgatttgatcacctgcaaaccacctgccctcaccccaagaagagccagattagcgctgagctgtacttgtcagtccattttagcattatgcattaaagcccctctgtctccaatccttcatagttgtatttaagacacggtaatcactttgaacttccatgaaatctgtcttccaccacagcatccctgggagagaaaaacatgctgaacacaatggtcttggctaagtaactccttagagccagtatcagtctcagtctgcacatagaagaaaaatcccaagtcgttctggaacttatagactccggagaatttgaaagaacaaactgttaggacagcacttcagatcctccataaggactatttctaacaagtcagtcttaggtgaatttagtggacttgatttgcatatgttctccagttacatcatactctatctgtggccttgttcttcatttcagtgttaatcagctaaaacagaagttgttgcttatgatgtgtgagtgaacataagccactgcctggccttttttcttcagagcttgttgtctttttcgctatattagactttgcagtatgcccagaagctttccttcataaaatagaaagaaaaaaacatttggcttatttttcactgtagctagtcttttatacaataatcttgtaagaaaatttcttgaattctaaatattactctttctagatttttgaaatcaaaaattttcagtaaaaagtttcttactttattttattatattaggtagttaaagaaaatgtagggttatttaccataacctgttcattaatatcagaaatttacaatagcattttaagagcatagtaggttctagcataccgtgtagttcctatggagtattgtgagagcgaattgttggagatgagctgcttttcatcttgttctccagtttccattgttggtttattgcagatttgtatcctgtgtcaaatttaaggtattattgataaaccttttcaaccagcagcaagaagttcaaatttttttttctgtcactgtaacagaaaacacagtatgtatataacatttatgtagcaataaatgtgccatccttttttttaacatagtaaacagtgagttttttac

SEQ ID NO: 201 - DNA, 3342 bp, Cricetulus griseus
cttgacctggctgtctgtaaaggatttgtagaagatctaaatgaatcatttaaagataatcgaaaagatgacatttggcttgttgatttttatgccccctggtgtggccactgtaaaaaactggaaccgatttggaatgaagttggacttgaaatgaagagcattggctctccagttaaagtggaaagatggatgctacttcctactccagcattgcttccggactaaagatgattataattgagtttgctcacagagtgtctggggctctgattcggccacttccaagtcaacaaatgttcgaccatgtacggaagaggcatcgtgtattttttgtttatattggtggagaatcacccttgaaagagaaatacatagatgctgcttcagaattaattgtgtatacatacttcttttctgcctcagaagatgtggttcctgagtatgtgacactgaaagagatgcccgctgtgcttgttttcaaagatgacacttactttgtttatgatgaatatgaagatggtgatctgtcctcatggattagcagggagaggtttcagaactaccttactttggatggctttcttttgtatgaacttggagacacaggaaagcttgtggccattgcagttatgatgagaagaacacatcacttgaacataccagattaaagtcaagttattcaggaagttgctagagatttcagagaccacttccatagagatttttcagttttggtcatatggatggaaatgactatataaacaccttgctgatggatgaattgacagtccccaccatagttgtactgaatacttcaaatcaacagtactttttgctagatagacacattaaggatgtcagtgatatggtccagtttattaacagcattttggatggttcagtaccagcccaaggaggtgatggtatgttgcagagattgaaaagaatagtatttgatgccaaatctacaattgtgtctatattcaaaagttccccacttatgggctgctttctctttggcctgccacttggtgtcatcagcatcatgtgctatggaatctacacagctgacacagacggaggctatatagaagagcgatatgaagtatccaaaagcgaaatggaaaatcaggagcagatagaagagagcaaagcgcaggagtccatcagtgaaggatctctggtgcctactgtgcaagagcccaaggatgtattagaaaagaagaaagactgaaacttcacaggggaaaaaaatatttgataggatttcagattattaaagagtatttattgaatttagagatttaatcatgatctatttacagaagagaacatgttatttgtattttgctaataacaactgcatgaaataaagtaatcctcccataagtgggaagatattggagcagagagacaagtttgtccaaaacaaagccaggtgatttcatcatttaccttgcagatgcccattctgtgcacactcctctgtgtgcatgtcctgtgacaaagttcaaaacttgacagaatattaacttgactattgcagtggaagatacgtggttttgcagagagaaatagtacttttacctactatatcaattctcatattttggataaaatttatataaacaaattaagtctttaaaatttagatgttttaagagaaactagtagctttttccatgtataaaatttaagattctgagtttaaaaatagtgtggtttttatatagcatagtgattttattttactagctgtttttaaaggagaaatgttacttttttacttatattcagttgcattattatgatgttggctgtggtctcatgaattgggacaagaatcttataattgacctttgcaaaatgaccagggtatgcagggagtggtgacgttggcccctgccttgtgctgctcagcggggcacactggccatcactgcaggaaggacaggccctcttagtacacctcactttcagccaaagcagcctaatattttgttttatttttattttatagtttgaaattacttctaaaatttctattagttaagcatgttttcagaagtaacataaatcatgtttttatgaaatgtaaactaataatttaaaatgtactcccacacctatagtgtgggaggacttgtccgtgataataagctcgttaaacttggatgtcatgaacaaagggagagatccaagttcccttctctagcctctcattgttgcctccatgacagtcatgacctctcatctttcatcataatgcagtcgtgtctaagagtgggtattttgtgataacatgtttactacacattagttaattctgaggccttcattttagctaatttcggaatttttattagatagtatttaggtgactgtttgttgagtagtgtatgggtttattgaaaggatttgctgagcatttgcaaatgtggtttgcagttcttacacttatgttacttagggcttctgctttgattaccaggggagcttctggtttctgacccaatattaaccagcactgaactgaaactgtgtttgttgagccagggaattgttattcatagtttgtgtccaggtgttcttttcatagttaaaaacatcatatttaaaacatccatttttaatacttaaccacccatcattaacttttttgataatggtataaatatacagtcacggggaatttcataaaataaaagaatattttcaaatggaaactgaagataaacactgtaagtcccatggttaaatacccacaacagaatcctttcaggaaattggaattccaccttttctttgatgtgtaaagttctgatttctgaaattcaaaaacatagctctttggtgctcaaacaacattttaagagtattctagagaatgtgcatacgtagtccagcaccctcaccatctctgtctgaaatccttctctgttgtgtacatcaatatttttgtaccttctagtgtttgaaacttgtttgagatttattagatgtatagcttttttttcatcagtgtttattgatgaaatcgacagggggagaaatgactcagccattcttatgcagaaattgttaagccagtgtgagatataatatttaagtggagggactgagtttgccattttatttttacaaatatatattttttctgaatgtttctgagtcccaagaatgaacaaaataatcgtaataattttctagtttggaattagctataaaggtttttgaaagtctctattaatactaacttgttgaattgtgatactctgccttatggcatcaattacaaacctttgtttttctaaaataaagtaaattaaaaatatgatt

SEQ ID NO: 202 - DNA, 3340 bp, Cricetulus griseus
ttgatataagatgagaactttataaagtattccgtccaagagcctaaacgatgactaatggaacgcccaaatggtctttatccaaattatttaaatccaagaacagggcgctggggtcagtatcacacatcagttggtggcctgggagatagtttttatgaatacttactgaaagcgtggctgatgtcagataaaacagaccatgaggcaagaaggatgtatgatgatgctgttgaggctatagaaaaacatctgattaagaaatcccgaggaggtcttgtcttcattggagaatggaagaatggacacttggaaaggaaaatgggtcatttggcctgctttgctgggggaatgtttgcacttggagcagatggttccagaaaggacaaagcaggtcactatttagaactaggggcagaaattgcacgaacatgtcacgagtcatatgacagaactgcattaaaactaggtcccgaatcattcaagtttgatggtgcagtggaagctgtggctgtgcggcaagctgaaaagtattacatcctccgtccagaagtaattgaaacctattggtatctatggcgattcacccacgacccaagatacaggcagtggggctgggaagcagcactggctattgaaaagtattgccgagtcagtggtgggttttccggagtgaaggatgtgtactccctcacgcccacacatgacgatgtgcagcagagcttctttcttgctgaaacattaaaatacttgtacctgctgttctctggtgatgaccttctacctttagaccactgggtatttaacacagaggctcaccctctgccggtgttgcatttagccaacactaccctttcaggtaatcctgctgttcgatgaacacagccccagaaggaccattcttacctgtgttttgtttacatggaccactacagaaattgtctggagaggtggctttgaaaacctggacctctgtgtcaccatgccggatgaaactctcccctgcaagactttaaacttgtagatacatcaactttgaaattattccattttatacctgaccaaaacatgttctggtacatgtaggatggaggcctgatgtgctttgactcttaatgagatggccacatgagaaataatgtctgtatcattagtgcaagccaagaacatagaacaccttccaggagttagagatggcttttggaaccaattatacatttgtttcctcccacagtggagcagctttcaaatcaaatattacacattgtttaatcccttttcctccactttaataataatgggacaaactgaagtgaacaagaacaaaggaacagtgcaactacattagtagcaggaagacttggagaagaaaaagatacctgtccctgcctgaatattcaagctctccattggatttttaccagactggtaaccatttcattcccaacttagttcattgaaatctgtttagatttagtttttctctggggggcatgatctcacaaagaatacttttcaagtctcttgtctccatatggtatgctgaaactggtatttatcataactgctgcttatgagcccaagtgtgggagtgtgcatgtagctcacgctagtgttggtagcatgcagaaggtggggaaagtgccagtttgttgccttgaaacctgttctaaagaaatccttaattattcttctgaaccagcaagtctatcaagcaaagaaacctactttaatcactaatgcaattaatagagttgttcaccttacaacttcatgtggcttggcaaaattcactatactgttttgcagctctgcatttgctagaataagctgaatagctttcacaatttactaaagcaaaagcaaaacgtctcaacatcccttgtgcaagggttgggtcccttacttaattacctcacatgtgtgagctactcacaaagattttatgtttttaagtttctccaagaatattatatatccaaagaattaatagaatagtttcaaaataatttccagtggcaaatgtgtgatataattaatcatactcactaaaactggcataaacctaagggacttacagaggagtctctgcatgagcgcatgcgtgagagagtgaatgaacaaacagctatggaacattgcatatgtgccaagctctgtgcctggcaccattcaagccttagaacacatcatgtgattccaatggcattttctgtatgagagtggttcatgccattttaaatgtttcccaaaatgaatcgtgctctgaaattcttaattttatatttcatttaaattaaagagaaagataaaaggtttataatatattttaaacatttactatataatactaacaactataattgtagttaataactaaagtctcttggaaatgtcaaagaaatatttgacttctgatgcatctttgactaaaatatttactttagaaataaaagcattcttattttgttatatcactttaattacatgatgtaggtacaattgtatgtatctctgttacctaaagctgtgtatttgttatcttgaaaagtagatatatttttaagggtctcttgggttttaggataatgtgattgtcatgaaagagtcaaagggggagggtcaggcttttggcaccagtcttcatcttgtcattcagtgacataatttcagactgcccatgaaaaaaaatctgtatggcatcaaaatactactttctaacttttcctactgcttgacccttggaccaagaccctgggatgtagggatggatccactctattcccttagagctttcagatgagaaaataatagaattctggatcttggtgctgcagaaaacaatcttgggaaactatggacaacacaaaatgggtatgtgcccagttcaccccttggcacagctgctgctagcccgtagagtacttagactgtcacctctagagcagcttaagtctgagagaagatgtgaacccagaggcatgcccccttctccctttgcacaccagaaaaccatgaaaagcgagagagttctttattgacagaaacttacaagttcatttttgctgggttaactaactacagtatccccaagtataattatgttgatttgaaagttgaaatgccattccttaccctcactggcctcaaatttcactgattttcccctaaactaataagtgggtaagtataacctgtgttattacccactggctgctcctgaactggtttccagttgtgtcctccataatgtgtattttttatataaatcaaaggtaatattgtatattggaaatcaaataaagatgttctttaagtaaaaaaaaaaaaaaaaaaaaaa

SEQ ID NO: 203 - DNA, 3340 bp, Cricetulus griseus
  modified_base (41)..(41): a, c, t, g, unknown or other
accaaggagatttgagccattttagagacatctgtttgctnttcccattataaaaacagctctgaggaactcgagtgcaaagatgacaattcccaggaagatgaagggtttatgggcatgtctcctctcctacaagcccatcatgctatggaaagaatggaagagtttgtttgtaaggtttgggaaggtcgatggcgagtaatccctcatgatgtgctaccagattggcttaaggataatgatttccttctccatggacaccgacctcctatgccttctttccgggcctgttttaagagcattttcagaatacacacagagacaggcaacatttggacacatctcctaggttgtgtattcttcctgtgcctggggatcttttatatgtttcgcccaaatatatcctttgtggcccctctgcaagagaaagtggtcttcgggttgttcttcttgggcgccattctctgcctttcattttcatggctcttccacacatcggggagtcagagcaggagtgtttgtgggcttaggcctgagtggaatcatccctaccttgcactatgtcatctctgaaggcttcctgaaggctgccaccatagggcagataggctggctaatgctcatggctagcctctatatcacaggagctgccctctatgctgcccgcatccctgaacgcttctttcctggcaaatgtgacatctggtttcactctcatcagctgttccacatcttcgtggttgctggtgcctttgtccacttccacggtgtctcaaacctgcaggaattccgtttcatggttggtaggggctggcactgaagaggatgcactgtgaaactccacaggagccagggactgtgaccctgaacccaggcctgcagctcccacaggcctgcttactggctgtcggtgccagtgccagagaagcccccacacgtggacagcctcatgggcttcgtgatggcccaagggctccatggggtacaagactaagaaagaagaaaaacaaaaataaaatcatacctacaaaggatggagtgcatcaatttggagaaaaaaggagaaatggctcatcctctgacttccttttgggatctgctgattgagggcaactctgcaagacctttgcctgacagactggcttctgatgtgatcgtatttatttgtagaagacgggaatgtttagttggtggttcttctccctctctctctccttaaagcagtaatacatgagttccgtgcactgactgactgtgcactgcagctcctcaaaacaataatcaaaaccaatttaggtgaacatttctatccagccaaggggtaggagtgtgagtttaggcactcttttgggagaacaaagaaattaatgtaaataagatttctaatttactgtttaaataagaatttatataaacatttaaaaaaggggcaggggagggagggagactttttaaaagaatgaaacatgcaagtaccacacactgtttcaattttgcacaaagtgatggaaggaggatgaagcagtagccccagaatgcacgatgtcttggtgcaccaaggtgccttccataggccgataacactgggaccctgctggggcagaggggtcagccccagcccactcctggccactctcaagactgagagctttaggcattcagagggggagggaggtaaaggaagtgctgtgtgctttctgaggaagcagcacaggttgtcaaaatggccctagagaaagtatcacttgagaggctgtcgtgtaggcccctttctgaagagtggagccacatcgtcctactctcaatgtattaaagagatgatgaaggggaagaaggagcatctgtacaggccttgactagttcttcgctggtgtcctatttaatcaggtggtagttcttacctgaatagaggtgtggccattttccagcccctctctgtggagccctgagccattctgcaaactttgctctactgagaatcactgccctactatcctttctcctggaaataaaaaactgcccacggcccccctctggcatcatagctcctggcatgaagccagccactagtgaaattctgatgagtcagcagtatctactgtggagttgtttgttagcagtcactgaatgccatttgcaaggagtgtgtcacagagtttaaaaggaagtggtatgttattgccaggtagttggatagacttaagcccacaatttgaattgctgctaggagttacaaataatttctctgttccagggccaccaagttatgggttttagagagtggggatgagaattctgatcttggcttctaagtgagaaaccaggtatttgagtttccaagacttcaggcaggcatcacatcctagggctggtggatattgcagtgtaacatgggccctctggcatctcaaagggggtgcttaggaatgtgagaaggttctcgtatttattcagtagtgttttcttggtcattgttgtccttcctttagcttcagatctccagctgcagctggggacccaggaaggagtccattgtaaaacctgggaagaacttaggagtgtttggttgtggataaggtcactgccctaggtagaccaaacagaagactctgggtgaacagcattatgccaggcagagtcaagaacagtgttaatttaattcctcaagcagtttagcaggacaatgtccatctggaaggaagctcacctaggtttgtggtaacaacagcacatatcagaagccagacttgctctctggtcctgttctttgggatagagatgagatgctaccccacagccctacagaagtagaggctaggtctagccatccctcttcccaagcaggaagagtctggttcaccatagcacaaactcttagggaaaagaatcaacaccgccagtgtgtagtccagtaacttcccttctgggtgtgtgtgggcacatgtgtgcccgtgtgtgtctgcgcagctcgctacaacagcctccatgtgcacttgacctggtgccccccaccccaaccccggcagctcgtcaggttggcacctgagtgccttaccttcagcagtctgaggctggcttgctctgcgcacgtgtttcatcttctccttggccctaggccagttaggaacctgtacaccttcattctttcatcagtaaatagtggcctttttcagtatttcctctctcccctttctaagttgccgaagtcacaaagcacacttttggggatcatagaaggttggggttccagaaaggcatctatgtgatggttccattcaccatgggatttccctacttgctgtcttcttaatttctctaataaaaaaagccaaacagaaaa

SEQ ID NO: 204 - DNA, 3339 bp, Cricetulus griseus
ctgcagaggaagatgcccagtaccgaccttctgaagttgaaggactttgagccttacttggagattttggaggcatattccacaaaagccaagaattatgtgaatgggtattgcaccaaatatgagccctggcagctaattgcgtggagtgtcctgtgtactctgctgatagtctgggtgtatgagcttatcttccagccagagagtttgtggtcacggtttaaaaagaaattatttaagctaataaggaagatgccatatattggacgaaagatcgaagaacagttgagtaagaccaagaaggatgttgtcaagcacatgcctttcctgaagatggataaagagtatgtgaaaactctacctgctcaaggtctaagcacagctgaggttctggagaaactcaaggagtacagttccatggatattttctggcaagaagggaaagcctcaggagctgtgtacagtggggaacagaagctcacagagctgctggtgcaggcctatggggagtttgcatggagcaatccactgcatccagatatcttccctggactacggaagttagaggcagaaattgtaaggatggcttgttccctcttcaatggaggaccagattcctgtggatgtgtgacttctggaggcacggaaagcatcctgatggcttgcaaggcttatcgagacttggccttagagaaggggatcaaaactccagaaattgtggctcctcagagtgctcatgccgcatttgacaaagcagctcactatttcggaatgaagattgtacgtgttgcacaggacaagaacatggaggtggatgtgcgggcaatgagaagagccatctccaggaacacagctatgctggtctgttctgccccacagtttcctcatggtgtgatagatcctatccctgaagtggccaagctggctgtcaaatataaaatcccttttcatgtggatgcttgtttggggggcttcctcattgtcttcatggagaaagcagggtacccactgaagaaaccatttgatttccgggtgaaaggtgtgaccagcatttcagcagatactcataagtacggctatgctcccaaaggttcatcggtggtgttgtactccgacgagaaatacaggaggtaccagttctttgttggtgcagattggcaaggtggcatctacgcatctccatgcatagctggctcacggcctggtggcatcattgcagcctgttgggccgcgttgatgcactttggtgagaacggctatgttgaagctaccaaacagatcatcaaaactgctcgcttcctcaagtcagaactggaaaacatcaaaggcatcttcatttttggggatcctcaactgtcagttattgctctgggctcccatgattttgacatctaccgactatctaatatgatggctgccaaggggtggaattttaactacttgcagttcccaaaaagcattcacttctgcattacattagtacacactcgcaagcgggtggcaatccagttcctaaaggatatccgggaatcggtcacacaaatcatgaagaatcctaaagctaagaccacaggaatgggtgccatctacggcatggcccaggcaaccattgacaggaatctggttgcagaaatatccaccgtcttcttggacagcctttatagtacggaccctgtgactcagggtagccagatgaatggttctccaaagccccgctgaactttgacccttgttagttccatggagcttcaggccttcagaaggctcttggcatttggaacagacgacacacaacttgacgtctggacctgctccttagagcacaatatgataaactataagatagcttcagcctcaggacttcctttgtttccttttgtggtttttaatttgaagaccctgaaggattccactgcataacgagtctgctctggttataaatgttaccctagaaattgttttaaccatattcttttctaacgtctttggcatcttcttccacttaatcattgtatggtgactctgacctgtcctgattgcttagggaaagtgtgagatagcaagagggtgtctttgctacctcagttaaatgttttagctgtcagacaggagacgtttatgtactgtgttccccagggtggttttattgtgccccaagcaggaggtgatttctcctctgctgcaggagatgtcatttgtctctcaggatcactttcactgcggcttgtttacttttccaagcacaggttggccaggtcattgacctctttttttggggcctgatgagctgaaaccagaccctttcccatattttcttgaatggcagtgtagataagcacctaaagcacctacttgcacatgtgggtggtggtcctctccttccacattgccttaatctatcatgtaatgagaatctgtttttattgaaggaaacactccccaagtgtccttgactttcatcagtgggtgtgaagatgtgcaggggacactttccccatcaatatgtgttcttctgccccttcccctgattcagcttccaaaggtacgatggcatttagtttcaggtactggatgttcctcagcccccattttgtagtagaaaggcatggctgcagccaatactccggggcctgggagttccttggtaagacggattgcccaggtgataacaggcacaggaccaacccctatgctaacttcccacttgcttctccttttcagggatgggggctctcatctaggctgagcccctgtcctgctctgatgatcatattatgtgcctttctccccagctgtgagtagtaaacttactcctcacccaggccctggaagaaatggaccacagtctttgaggtgtgtctgtcagcaggagccttcgctctgttccctcctcttctcagggattcctgagtattcagcctaagtattgctggctgggagagccagactaccaggctcttcctcaccctccttgggaagtgttcctcagcactgttgtgaccccataaccatcagctggctcatgaagggcaagtgcgaatgtgcacgtccctcctgtatgctctacagtgcgtatcatgtggcttagtaggtgccacagtagcttctcaaacactgtactgtcttgtttctgtattagtcgtaggtattactgtgaatatactgccatgtcacttttaatattaccagttttatacttggaaaatggtacttgcctctttgaaaactgttttatcttctctaacctcccccatcatctccatgtccttttctgactgcaacaataactcttaagaaacaattgaataattaaatgtcccaaaaactaaaaaaaaaaaa

SEQ ID NO: 205 - DNA, 3337 bp, Cricetulus griseus
  modified_base (2718)..(2718): a, c, t, g, unknown or other
gggctggaggactactggtgccagtgtgtagcctggagctcttcaggaaccaccaagagtcgccgagcctacatccgcattgcttacctgcgcaagaacttcgatcaggagcctttggcaaaggaggtgccattggatcatgaggtccttctgcagtgccgcccaccggagggagtgcccgtggctgaggtagagtggctcaagaatgaagatgtcattgaccccactcaggataccaacttcctgctcaccattgaccacaatctcatcatccgccaggctcgtctatcagacacagccaactacacctgcgtggccaagaatatcgtggccaagcgccggagtaccactgccacagtcatcgtctacgtgaatggtggttggtccagctgggcagagtggtcaccctgctctaatcgatgcggccgaggctggcagaagcgaacacggaggccgtgactgcagtggaacactacttgactccaagaactgcaccgatgggctgtgcgtgcagagtaagagaactctaaacgaccctaaaagccacctcctggaaccctcaggagatgtggcgctgtatgcaggcctcgtagtggctgtctttgtggttgtggcagttctcatggcagtgggcgtggtggtgtaccgaagaaactgccgggactttgacacagacatcaccgactcctctgctgccctcactggtggtttccatcctgtcaacttcaagactgcaaggcctaacaacccacacagcgtcctgccacccggccgcccctccagacctgacagccagtgctggcatctaccgggggcctgtgtatgccctgcaggactccgccgacaacgatccctatgactaattcacccctgctggatcccctacccagcctcaagatcaaggtctataactccagcaccactggctctgcatctggcctgcctgatggagccgacctgctgggtgtcctaccgcctggcacatacccaggcgatttctcccgggacacccacctgctgcacctgcgcagtgccagccttggttcccaacagctcttgggcgtacctcgagaccccagcagcagcctcagtggcacctttggttgcctgggtgggaggctgagcattcctggcacaggggtcagcctgttggtgccaaatggagccattcccccgggcaagttctatgagatgtatctacttatcaacaaagctgaaagcaccctcccgctttctgaggggacccaaacagtattgagcccctcagtgacctgtggtcccacgggcctcctcctgtgccgccctgtcatcctcactgtgccccactgtgctgaagtcatcgccggagactggatcttccagctcaagacccagacccatcagggccactgggaggaggtagtaaccttggatgaggagaccctgaacaccccctgctactgccagctggaggctaagtcctgtcacatcctgttggaccagctaggcacctatgtgttcactggcgagtcctactcccgctctgcagtcaagaggctccagctggccatctttgccccagccctctgtacctccctggagtacagcctcagggtctactgtctggaggacacgcctgtggcattgaaggaggtgctagagctggagcggactctgggaggctacttggttgaagagcccaagcctttgctctttaaggacagttaccacaacctgcgcctctccctccacgacatcccccatgcccactggaggagcaagcttctggccaagtaccaggagattcccttctaccacatctggaacggcagccagaaagccctgcactgcactttcaccctggagaggcacagcctggcttccaccgagttcacctgtaaggtctgcgtgcggcaggtggaaggggaaggccagatcttccagctgcacaccacgctggcagagacgcctgctggctccctggatgtactctgctctgctcctgtcaatgctgtgaccacccagctgggaccctatgccttcaagataccactgtccatccgccagaagatctgcaacagccttgatgcccctagctcacggggcaacgactggcggctcttggcacagaaactgtcaatggaccggtacctgaattactttgccaccaaaactagtcccacgggtgtaatcttggacctctgggaagctcagcagcaagatgatggggacctcaacagcctggccagtgccttggaggagatgggcaagagcgagatgctggtggccatggctactgatggggactgctgagtgcttgtgaccacaggacagtggagaccagtatgagacagtacaaggaggcctagcagcctccccgtgggggtgtccagcctctgccatccctggctcatagctggaatggtccctcaccccctctccctgccgcaccctcagaccaccaccagccttagaaaacctctgtgctctactgatgagaggccgggatcctctgccccaccgtttcttggctcgcactgggataggctgaggcctctggggcagcctaaggccagaggctttccccctgtcacaacccagcaccctcagccctgtgactttgggagcccacaggtttcaattctgtgttcatattgtccttggctaaggacctctctcctatcctgggtcaaagatgcccatccctgtgggcatagcttggtgttgccgggttctgcngggatttgtgtgtcatcttgggtgtgtttgtgtgtgtttgaaagcaggcttgtgtgtgtgtgtgtgtgtatgtatgtatgtatgtatgtatgtatgtatgtatgcctgtgcttttcaacttgggcacatcagggcacccctcccagatcacacacacctgtttccgcatgtggacatggcctctgtgcccaggattgtgccactggaggtgggaatgcctgtttgctgtccccgagtcacagggtcagtcagtgtatctcctatgtgcctctcctgccctcctatggggcccatgattctgagctctggccagacacctcccaagggatggggaccctcctcatcctgatcttccagggccctctggtccccatcttgacgctcccaggcatctgagtcagccccttccactcaccctcagagggcaagtggctgcgaacttggatgtgggggtgtgaacatggctctgtgtccctggattccaatatggtgggggatggtcccaggcccacccattcatcctgtaaacaaactgtaaatagcctttagcattcctcttgtaacgagattaatttttatgaaataaattatatttcctagtctaataaaaaaaaaaaaa

SEQ ID NO: 206 - DNA, 3333 bp, Cricetulus griseus
cgggcgggcggcgcgggcggcggccggcgtcctgggagcttcggtgcggcgcgggtggttggggcggagtcccggcggggccgggcgggggggagagtcgccggcccggccatggcggacaacgagaaattggacaaccaacggctcaagaatttcaagaacaaaggccgcgacttagagactatgagaagacaacgaaacgaagttgtagttgaattaaggaagaataaaagagatgaacatctcttaaagagaaggaatgtaccacaagaagatatctgtgaagattctgatatagatggtgattatagagtgcaaaatacctctctagaagctattgttcaaaatgcttcaagtgataaccaaggaattcaattaagtgcagttcaagctgctaggaagcttttgtccagtgatcgaaatccaccaattgatgacttaataaaatctggaatattgcctattttagttcattgtcttgaaagggcagtgtgggcactgggaaatatcataggtgatgggcctcagtgtagagattatgtgataagtcttggagttgtaaaacctctgctttcattcataagtccgtctattcctataacattcttaagaaatgttacttgggttatggtcaatttatgtcgccacaaagacccaccaccaccaatggaaacgattcaggagattcttccagctctttgtgtattaattcatcacacagatgtaaatatattggtagatactgtctgggccctctcctaccttacggatgctggcaatgaacagatacagatggtaatagactccggaatagttcctcatttggttcctctactcagccaccaggaagttaaagttcaaactgctgcacttcgagctgtgggcaacattgtcactggaactgatgagcaaacacaagtagttttaaactgtgatgctctttcacacttcccagcactcctcactcatcccaaagaaaaaattaataaagaagcagtttggttcctctccaacatcactgcaggaaatcaacagcaggttcaggcagtaattgatgccaatcttgtaccaatgataatacaccttttggataagggagattttggcacacagaaagaagctgcttgggccataagtaacttaacaattagtgggaggaaagaccaagtggcctatcttatccaacaaaatgttattccacctttctgcaatttgctgactgtaaaagatgcacaagttgtgcaagtagtacttgatggactaagtaatatattaaaaatggctgaagatgaagcagaaaccatagccaatctcatagaagaatgtggtggactggagaaaattgaacaacttcagaatcatgaaaatgaagacatctacaaattggcctatgagatcattgaccagttcttctcttcagatgatattgatgaagatccaagccttgttccagaggcagttcaaggaggaacatttggtttcaattcatctgccaatgtaccaacagaggggttccagttttagaaagatattgtggatgttaggtacaatgcagcactgagacatatatatatatttacacatatatataaaaaggtttgatccatcaagcttggctcatgggatctgctgctgcattaaatcgggagagaaaatgtgaagatttcatttggaatcacagaaaatgcccaaatgaggtcaaggtggcgagtgggtgcgagtgagaatgagtggcaatgtaaggagaacttgacatgaatgcttatctaggttgagagtaaaagggctacaggtcacaggtcttgagcgcctaagaaggagcattgacttactctatcaattgaggggaagtgaagtgctgtcatcatcaagccttgtaagcaaaaaagtgatacccatataagtcaaggaagatgagcccaggccttgctgtgaagcagtgtgtgaatggacagtgttgaatgaatgtctggctccgtggtagagagccaggttcatctttcaaatctagggctcttcacgcatgaagcagactcctagtcttggagtgactgtgtacgagagtgtggttgtagtgctgtatgtggacgcatgcaagcttgattcgccttcagggggctgataacaaacctagtagatcatcaaagtgagatcacaagtgttaatgtacactggacatgaaaacaaagaccggtttagcagcagacattggtttactctgcagcctgtgttttctattctccctctaccttccccttttttaatttagtttttatttactttacctagtacgtacagcttttttagttgcttctcaagtcagaaaacttcaggaaggtttccctgtgcatttgcaccagatgagtgtttgatgctatgaaaagctttccatatcatcaaaacaaatttgtgtagatttttgcatgaaataaatcataaatttccctcacaatagactgtgttgcagtacacaagttgccataatagtataaaatgtgctttaaaagccattcttttcattttcagagataacataaaagatctttgcatgaggtaaattacagcatagttcatttttagattttgttgagtcctgtaaagaagaaaagtttcagttgtgatagaataccgtgctgtgtttaaatgttaacttgttttcaaactttgttttctatgaaaatgatatggaaacttctaaaatggaatttggtgcatatgtactgctgaataaagaccgatgaagaggtttgagtagatgtacaaatcaagtaatggtttgaacacctttaataatatgcctaatctgtttaattgttttagaatctttttatcttagatgtaggcagccatgaacaatctattttgagccactttagggagaaaactttgtatttttaaaacttgcataaaagttatgcaagtggtttttataaattggaataatacctcagttttgaggttacgcacactaaattaaatatgtcataaattaatttgtacaaaaagaactctttataaggtggctcattgtaggaaatcctgtgccttcccctttgagcacaaatgttgcatgaacaacaatttgctataagaaacataccaggttagccaccattagcatctatatctactttgtgtttaaaaatcaactggtaattctgaaacactgtagaatggataaaaattattttgtgatcataactctttgttgaactagagtatttttgcagcattccttgtcatcaaaaacataggttaaagtttaaaactagaagcagcaagaaaactagcttgtaaaatttataccaagtagactacaggctaggctgtctt

SEQ ID NO: 207 - DNA, 3330 bp, Cricetulus griseus
tctgtgcggccttccaagtatccattccaaagaatttggcagcggttttcctgtcagtgacagtaagcgacacctaaccccagaggaggaggagtacgctacaagtggttggaacctgaatgtgatgcctgtattagagcagtctgtattgtgccacaccaatgcagatatatctggcatgaaggtaccctggctctatgtgggcatggtcttctcagctttttgctggcatattgaggatcactggagttactccattaactacctccactggggtgagccaaaaacctggtatggggtcccatcacttgcagcagagcacttggaagaagtgatgaagaagctgacacctgagctttttgatagccagcctgatctccttcaccaacttgttaccctcatgaatcctaacaccctcatgtcccatggtgtgccggttccacgtccgagggctgctgcacgtcccttggttggagaggagggcagcagcgtgggggttgaggtacctgaagcccagcagctccagcggcaggtggaacaggcgcggtggctggatgaggtaaaacgcacgctggctccctctgcccgaaggggtaccctggccaccatgcggggactgttagttgcgggcgccaatgtagcccctagccctgctgtggataaggtagagctgcaggtactgacagcacactcctggagagagaaggcctccaagaccttcctcaagaagaactcctgctacacattattggaggtgctctgcccgtgtgcagacgccggctcagacagcaccaaacgcagccggtggatggagaaggagctggggttgtacaaatctgacacagagctgttggggctgtctgcgcaggacctcagggacccaggctctgtgatcgtggccttcaagagggggagcagaaggagaaggaagggatcctgcagcttcgtcgcaccaactcagccaagccaagtccactcgcatcattgaccacagcctcctctacagcctctatctgcgtgtgtgggcaagtgccagctggggtgggggctctgcagtgtgacctgtgtcaggactggttccatgggcggtgtgtgacagtgccccgcctcctcagctcccagaggcccggttttacctcatccccactgctggcctggtgggaatgggacaccaaattcttgtgccctctgtgtatgcgctcacggcgcccacgcttggaaaccatcctggcactgctggtagccctacagagactgcctgtgcggctgcctgagggtgaggctctacagtgtctcacagagagagccatcagctggcaaggccgtgccagacaggttttggcctctgaggaagtgactgctccgttgggacggctggctgaactccgccaacggctacaggctgaatccaagcctgaggaatcccttggcttactcttcagatgctggagagggcgctggccatatacctaaggtcaaggggctgttggagaatggggacagtgtgaccagtcctgaaaaggtagccacagaggagggctcagatctggagctactctcctcactattaccacagttgactggccctgtgttggaactgcctgaggcaacccgagcaccactggaggaacttatgatggagggggatctgcttgaggtgaccctagatgagaatcatagcatctggcagctgctgcaggctgggcagccaccagacttggagagggtccacacacttttggagctggagaaggcagagcgccatgggaatcggacacgaggccgagccctagagagaaggcggcgaaggaaggtggatcggggtggggaggctgacgatgcagcccgagaggagctagagccaaagagggtgcgaagctcagaaccagaagctgaggaagtccaggaggaagaggagctggaggaggagactgggggtgaggtccctcctgtacccttccccaccaatggcagccccagcacccaggaggaccaggatggcttagaaccagtgttagaggctggttcagacacctcagcccctttctctgctctgacttcccggctgttgatgtcctgcccacagcagccacctcggcaacaattgtgacagtggctgagcctagcacagacccccaacaaagatccttccttgaactcaaggatcctttctgaccatcaagcctgcttcttggaggtgggcgggtaggtggagagactcccccctcaccaccatccccaagaccgtgacttttatattctgactccaaggtattgttcagacctcagctcctgggggccggcccctggagtcctgcgtccctggtaacctctaaccagcattcccagacaccagaggcagatagacaggtgggcagggggtcgactggggctaggccagcaccattccagagacaaatccagggcacatacaaactggggggacctctcccttctccccagttctggccctgggtcaggtcatgctacactaacctcccacccacccacacacatttttgcctcccctttcccttactgtcccacccaggaggaggaaacttcacatggctgtcctcacttttttattttaaatgaattttgttggggttgaatagggctgcctatggtctgaaggcttttggtgcttgtccacacacccacctcaacccttcctgcccatcctcccctgtctcctcctcctgggttcatgctgtaataaaagaagattgttggtgtgtaattaatttgttcaaaaggagaaaaaaaagcgaaacaagaaactttgttccaactaaagcctattttaatttattttattattttccttgttagaaataaaacccttaggaatgtttttttttttttggaaacatgtttctgaagtgcatttctcttcaaaaggacagtagaaccttccctcgcctgttaatggaacagctacagtgctagtggtagtgccagggccgagtccagggagttagggctctgaatctgaacttaccagcttctctctaaccttggaaaagaaatcctgctcctcccccaagccatttccctgtcttcaaactggtgggcactggtcccttttgggagtttgcacaacagcttcccctaactttgtgctcttattttcctattatccactttttcttcgtggctttattgaagtatagtttccatgctataaagttgagctgttttaaatatgtaatttgttgagttagaccatccttgatgtttctctgttagtttctttctgcccctaatgaatgtgtggttaatttgtaatttctgtgttactgttaaactgctctattgagataaaat

SEQ ID NO: 208 - DNA, 3324 bp, Cricetulus griseus
atagctgctgctaataaagctgtaaagtgtgctgagtctttggtacctcttctgagtaatgtgaacgtatcggatcgagcagggagaactgcattacatcatgcagctttcagtgggcatggtgagatggtcaaactgctactgtctagaggtgccaatattaatgcttttgacaagaaagatagacgtgccatccattgggcagcgtatatgggtcacattgaagtagtaaaattacttgtgtctcatggagctgaagtgacatgcaaggataagaagtcttacacacctcttcatgcagcagcctctagtggaatgatcagtgtagtcaagtaccttctagatcttggagttgatatgaatgaaccaaatgcctatggaaacacacctcttcatgtggcctgttataatggacaagattgttgttgtgaatgagctcatagactgtggtgctaatgttaatcagaagaatgaaaaaggattcactcctttgcactttgctgctgcatccacacatggagcactgtgtttagaactcctggttggcaatggggctgacgtcaatatgaagagtaaagatgggaaaaccccactacacatgactgctctccacggtagattctccagatcacaaaccattatacagagtggagctgtaattgactgtgaagataagaatggaaacaccctttgcatatagcagcccggtatggccatgaactgctaatcaacactcttattactagtggtgctgacactgcaaagcgtggtatacatgggatgttcccactccatttggcagccttaagtggttttcggactgctgtaggaaacttctttcttcgggatttcaaggatataatgcagttcattactcagctgcatatggtcaccgtctgtgtcttcaactgattgcaagtgaaactcctttggatgttttaatggaaacctcgggaacagacatgctgagtgattcagataatagagcaacaaataagccccttttacatttggctgcctatcatggtcatcaccaagccttggaagtgttggtacagtctttgttagatcttgatgtaagaaatagtagtggtagaacacccttagaccttgcagcatttaagggccatgttgaatgtgtggatgtactcattaatcagggagcttcaatcctcgtaaaagattatatgttgaagagaacacctatccatgacagattcaagatggaaatggacagacacctcttatgctgtctgttctcaatggacacacggactgtgtatactcactattgaacaaaggagcaaatatagatgccaaagataagtggggaaggacagcattgcatagaggggcagttacaggccatgaagaatgtgtagatgcattacttcaacatggtgctaagtgcttactacgggacagcaggggtcggacacctatacacttgtcagctgcctgtggacacattggagttcttggagcccttttgcagtcagcagcatcaatggatgcaaatccagccatagtagacaatcatgggtatacagcacttcactgggcttgctacaatggtcatgagacatgtgtggaactactgttagagcaggatgttttccagaaaatagatggaaatgctttcagtccattgcattgtgctgtgatcaatgacaatgaaggtgctgctgagatgcttattgataccttaggagccagcattgtgaatggcacagattcaaaaggaagaactcctctccatgctgctgccttcacagaccatgtagagtgtttacagctgctgctcagccataatgctcaagtcaattccgtggactctagtggaaaaacacccctcatgatggctgcagaaaatggacaaaccaatacagttgagatgctggttagcagtgctagtgcagatctgactttacaagataagagtaaaaacaccgcccttcacttagcttgcggcaagggtcatgaaactagtgccttgttaatactggaaaagataactgatagaaacctcatcaatgcaaccaatgcagccttgcaaacgcctctgcatgttgctgcccgaaatgggctaacaatggttgttcaagagcttctggggaaaggagcaagtgtacttgccgtcgatgaaaatggttataccccagctttggcctgtgctcccaataaagatgtggctgactgcctggctctcatattggccaccatgatgcctgtctcgtctagtagtccattgtcatccctgacattcaatgctattaaccgttataccaacacctcaaaaactgttagcttcgaagccttgcctatcatgaggaatgaacctagctcctattgcagtttcaacaacattggtggggaacaagagtacttgtacaccgatgtggacgagctcaacgactctgattctgagacctactgaaaggctgagttagaggtctaaggaagttctgacactgaaacttcaaaccgggctttttcaaggaaaaattgttttttctaacacagggtttctctgtgtagctctgactgtcttggaattcactgtgtagaccaggctggcctcgaactcacagagatccacctgcctctgcctcctgagtgctgggattaaaggtgtgcaccaccagtgcttggcttcggatcttttctttatagaaatcaacatcaaaccatttggcttcattttcagaaatttagaagtttgctgtagatgataattcataacataaacagaatcaggtcacttggaaggcatttctatattgggcaaaatttaaacgacttcaggttttaggtttgactcagacctagagtagtgtgtttgcagcttgattctgtcggagagagatttcctgccaaattgaagactgcctttcaggtaatagagaaggggctgaattaggctgaattaggcttttaaacacttctctgtggctctgcttttattgtaactgtcactttctcagtaaaaatgatttcatgggggggggtcttaatagagctggataaagttccatacattgcaacaaaatgataccccatttatcttaccctttttgtattgtgaaactggaactttatgacattgtaaattatcagctggtttttctgaatataaagtgtgaaaacacagaacagtattttgatctatttgataattttgtgggttttttgaagaattaatgagcatgtacatagaaatagtgactgcttgaatactgtatttacttgcactctttcagtacatcaagattcctgtatattttagagtataataaaacacagatgtgagttgtatttaatgaa

SEQ ID NO: 209 - DNA, 3322 bp, Cricetulus griseus
aaataaggatcaagcactacaatgacaacctatttggaattttatccaacaaaatgaagaacgagatggggtccggttcagttggaatgtttggccatctagtcggctggaagctacgagaatggttgttccggtcgcagccctgtttacacctctaaaggagagacctgacttaccacccattcagtacgagcctgtcttgtgcagtaggacaacttgccgagcagttttgaatcctttatgtcaagtggattatcgagcaaaactctgggcttgccaaaggaatcagtttccacctacatatgctgggatatctgaactgaatcagcctgctgagcttttaccccagttttcaagcattgaatatgtagttctgcgtggcccccagatgcctttgatatttctctatgtggttgatacttgcatagaagatgaagatttacaagctctgaaggaatccatgcagatgtcattgagtcttttaccacctacagctttggttggacttattacttttgggagaatggtccaggttcatgaacttggatgtgaaggcatttcaaaaagctatgtcttcaggggaacaaaggatttgtctgccaagcaactgcaggaaatgctggggctgtctaaagtacctgttactcaagccacacgtggtcctcaggtccagcagccacctccttccaatagattcttacagccagtacagaaaatagacatgaatctcacagatcttctgggagaacttcagcgagacccttggcctgtaccacaaggaaagagacctttgcgttcctcaggagtggcactttctatagctgtaggactacttgagtgtactttccccaacactggtgctcggatcatgatgttcattggtggtcctgctacccagggacctggaatggtggttggagacgaattaaagacaccaataagatcctggcatgacattgaaaaggataatgctaaatatgttaaaaagggaactaagcattttgaagcattggctaatcgggctgctacgactgggcatgttattgacatctacgcatgtgcattagatcagacaggtctcctggagatgaagtgctgcccaaaccttactggaggatacatggtaatgggtgactctttcaacacttcattattcaagcaaacttttcaaagagtctttaccaaagatatacacggacagtttaaaatgggctttggtggcacattagaaataaagacctccagggaaataaagatttcaggagctattggaccctgtgtgtctcttaactcgaaaggaccttgtgtgtctgaaaacgagattggaacaggtggcacttgtcaatggaagatatgtggactcagtcccacgacaaccttagccatgtattttgaagttgttaatcagcataatgctccaattcctcaaggaggacgaggtgcagtacaatttgtgacccagtatcagcactcaagtgggcagagacgtattcgagtgaccacaattgctaggaactgggcagatgctcaaactcaaatccaaaacattgctgcatcttttgaccaggaagcagctgccattctcatggcccgactggcaatatacagagcagaaacagaggaagggccagatgtgcttaggtggctggacaggcagctcattcgactgtgtcagaaatttggagaatatcacaaggatgacccacaccatttcatgcgtcaagatctgacacagtctctaatcatgattcagcccattctgtatgcctattcttttagtggcccgccagagccagttcttctggatagcagcagcattcttgcagatcgcattcttctcatggacacatttttccagattttgatttatcatggtgagactatagcacagtggcggaagtccggataccaggacatgccagaatatgaaaatttccggcaccttctgcaagccccagtagatgacgcacaagagattcttcactccagatttccaatgccgagatacattgacactgagcatggtggcagccaggcacgtttcctcctttccaaagtcaacccttcacaaactcataataacatgtatgcctggggacaggagtctggagcacctattcttacagatgacgttagcttacaagtgtttatggatcatttgaagaaacttgctgtgtcaagtgctgcttgacatgccagacactcaagatgaaatattactccagtttcccttggctttttccatttatctgtggaaacaacagagatccctctctaaatctgttttgtgtcactgtgatttaaggcaacatatgaacaaatgttgatgattgtagattaagctaaaatataagagcaatgagaacaagtttgtttgcttggtgcagtattataactggttttataaatttgaggtctttatgatttaattttgtttaaagagttagaatggtctgctttgtattgcagataccacttatttgtatactgcagacagatccaaagtggcactggtatcctcattgacctgttagggagtatttaatagcagccagaaaggaacaaattaatagtgatgatatatgaacagttggcttcattgttaaataatttttctggtgtttgttttagcacacacgtacaccctattctatattttgttaaagtagatttattttagaaatgatttgactttatagtagtaattcttatgaagggaatttaatgtttttggttatttgcaaaaattatttaagctaaaaaaatttgagtgaggtaacaacctcatagctaacattaaatagtgaaattcccacactattaaccatattttgttttgttatatcattttgttgtttccccttcttaggtaaatttttcattgtatccttcagtattttaacactattttaggagttttactttttgttttcttcttttttgttgagattaatttgtggttcttactgagacagtattatataatgtttaattgtgtaatgtggagatagttctgtttgatttattgattagtatcattcacttttccctttaaagtttacttgtagcaaatgtttacattgctaaagcagataagtttgacaatgaactttatgtatcatgtgttgcaagtgcaaggtggtgctctgatagttgctaaggacagtgtgactgtgattgaacttgcatgaacacaatcagacgatggcaaaaaagaaacatctaattgttatactcaactgtttaaataaattactttgttctgttttatttgaattgaactgtgctaggccaaaatgccaataaaatattctttttctct

SEQ ID NO: 210 - DNA, 3322 bp, Cricetulus griseus
gcgcgggaggcggcgcgagtggggcggccgaatccgacgctccctccccatggccgggagcgggccgcggaggcggcggcggcgctgacgggctcggggcggggcggccgggggcccggggccctggggaagatgaacgctctcctagagcagaaggaggcagcaggagaggctgcgggaggcagcggccttgggggacgattcgggaggtgcagaaactggtggagagcggggtggatgtgaactcccaaaatgaggtcaacggctggacctgtttacactgggcgtgtaaacgcaaccatggccaggtggtctcttacttgctaaaatcaggggctgaccgcgagatccttacaacaaaaggagaaatgccggtgcagttaacatcaaggagagagatcaggaagataatgggagtggaagaagctgatgacgatgacgagctcccccagctgaagaaggagtcagaactgccctttgttcccaactatctggccaacccagccttcccttttatctattctcctgcagcagaagattccacccagttgcagaatgggggctcctccacacctcctgcgtcaccccccacagatggctcacctccattgctgccccccacagaaccccctctgctaggggcctttcctagggaccacacttctttggcgctggttcagaatggcgatatttctgccccctctgccatactcagaacaccagaaagcacaaaacctggtcctgtgtgtcagcccccagtgagccagaaccgctccctcttctcctctgtcccacccaagccaccagtgtctttggagcctcagaatgggacatatgcaggaccagcgccagcatttcagccatttttcttcactggagcatttccatttaatatgcaagagctggtactcaaggtgagaattcagaacccatctcttcgggaaaatgatttcatagaaattgaactggaccgacaagagctcacctaccaagaactgctcagagtgagttgctgtgagctgggtgttaatccagaccaagtggaaaagatcaggaagttacccaacactctgctgagaaaggacaaagatgttgcccgactccaggatttccaggagctggagctggttctgatgatcagtgagaataattttctgttcaggaatgctgcatccacactgactgagagaccttgctacaaccggagagcttcaaaactgacatactaatgcagcagggtctttatcactgagtattgtgacagtatgtgtcacctctgggccaaaggacaagccattgatcccaaagcctcggatgcccaccagggcccctggtgtcactgcgtagtgtacactaatatcctgcctcagcaggagggaaccccaaccccccagcagcggtgccactcttccaagtctcttggtgcacaataaacctattgctgaatctttgaacagctgaaaagtagtcttgagaggcagaagccggaggtacgatagccagtgttttatgtgcagaatctagagggttgttgaagcagaaactgagagggcggacctgtttccagccacctctgttgacagtgcacctgaagggccaggcgcacttctcgtggtgttgcatgctcatgatgcacctgagattttgaactgactagggaggaggactggggaaagaaaggcacaggccctggacaaagggattctggtgtgacctgtggctgtgaggttccatatagcatatttataaatgttactcaggtttaaagtatttaaaagtatagttacctaactgtaaataggctgttaaccaaaagagcttcccctcccccacttttcttttgtgaccactcatggctgccactgtttcaggacagtcatctttgcatctcctccctccacagccactagagggctctctaatgctttctaaaggaaccactccatttttacactgagcagttcctgtcatccgtgttgaattgcaccatccaagaagagcacaaacactgctggtccacatccaccactctcacttcccaccagaaatgaaaagcagttttcaagcctgaatttgttgctgttttaacagtttgtgggaaactgaactaaaggagttagcatctttattttgtatcaaagataaaggttattttggaaattattaggatttttacataactctgagatctgttgttttttgtaaacaaattgttgaatcttaggaatcccccaccaaccacgggacagtcagttgtgagcacctgatcagactctggagcacagcataagaatctttcccaagagtgctttcagagagtcctccccttctcctcagcatcgttcaagtggaaaagccgcttaactttaggaataggacctggcccatgcagatgaacaggagagcaggggctggagcagctgttgacgaggatccctgctgtcttaagctttctccccatagtgcctatagtttccaaagaaacttaacttcctgactattaattttattagaacgctgcagttgagtggaaacatgcagatgtcaatggaagagaatgttatgctgaggttatggcctcccgctgccacctgaatgctaaaatgaggttaaagtgttcttcaaggtcagctgcgtggggtcgctgtgtgtagtgacttaatcatacccaccggtagagctggtgacttcccccttgtagagtgtttgcatagcagagtggtggttgctcgtcaccccttctcccaagtgctttaatgaagaaacctccctggtgtttcaattaatcagaaactactttatcttgatgtactaacctcccctcctccccaatttgctttggaaaaactagtttactgatacaattgagtgtgattctatcttggaagaaataaattcagtattaattcatgtctaaatgactggggttcaaactccttcagccaccccaattgattagaggttctcagaaacagtagagacctggctgggaggtgggctacagccacatggctctgcccagtaccctatcctttgctggtcctctgcagtcattgcctctggcagtgggatgaagatgcatggttgctcttaggtgagtctgaagtcttaatctatgcattcagagaaatatttttatatgctttgtgtaatttataacaaggggttttcttttcagctttgttaactggatgcacttctcctccttggcatatttaaagcatgtgttcacactgtgtgtaaacattcacggggacttttcctcatgtgttgttgactgttcaaacataacaggtattatgaaaattaaagttcactgacc

SEQ ID NO: 211 - DNA, 3317 bp, Cricetulus griseus
  modified_base (2597)..(2597): a, c, t, g, unknown or other
ggccggcggcctgggacatgtcgcggggctggtagctgggctcggcgccgagccgccgctagtgggtgtccggggtccggggcccggggcgggggtccgggctgggggccggtgcgtttccgagggtcttttcctgaaagaaaatgcacgcagcgttttcctctggatgacggcctttgcttcccctaggacccggcagttgggctcaggagtgtgttattgattcatcctctctctgcctctgtcatcgcaggtttaaacttaaaagatcgctctccgaggaggacagcagcagcagcagcagcaggctcagacacagcagtttcaggcaggacatccagcagcccagcaaccagtcactgctcaattccctgtggtgtcccagggaggcactcagcaacagctgatacagaacttctaccagcagcagcagcaacagcagcagcaacagcagcagctgatgactcagcaggcttcctgcagcagaagactgctgtggtattaccacagcctcaggcacagccggccacagccccacagccagctgctgcccaggagcctgcgcagattcaagctccagcaagacaacagccaaaggttcagacaactccacctccaaccatccagggtcagaaagttggatctctcactcctccatcatcccccaaaaccaacgtgctgggcacaggaggattctcagtgacgtaacacacagtgcagtctttggagttcctgccagcaaatcaacccagctgctccaggctgctgcagctgaggccagtctcaataaatctaagtctgcaaccaccactccctcaggctctccaaggacctcgcagcaaaatgtctgtaatgcttcagaaggttcaacatggaacccttttgatgatgacaacttctccaaactcacggctgaagagctgctgaacaaggactttgccaagctcggggaaggaaagcttcctgaaaagatagaaagaatgtataaactaatgaaggaaatgtttatttttaaattaaggctactgtttcagttctgtgttttctatattttttcttcatgaaaatgttagcaatataatgaaatgtctactcagtttaattgcagctatgaagagtgcagtctagaaattaggttaagtgtctctaaaccattctttcatgcgtcacccgtaattatattgagatcagcatttacttcacagaggatcagaatgagaaattttttaatcttgttgctatttgctggttacctgaataaaagctcacatcattgaaagcttggagattttccttctgtaatattaagcacacacaaccttacctattgcagtcatacagaatccagagatttctattattttaacctgaataatcagggatttgccattaaaatatgggcaaatacaatgtgcatatttttttattttgatcttctctctgctgagtggaagtaattactgtaccagaaaatatcacaaattggtatttccctcccagataaccaaatttaattcccaaagtttctaaaaacagaaagaagccttttctgggccggtggctggcaagcaattccgcccccaggctttgtccaaatattcccgacactatagcccagaagatgagtcaagtccagaagcccagcccatcgctgcctacaagattgtttcacaaagcaataagcagttgctggctggctctgtgtctgtcacatctctgtcctccaggactacagagctgcccgctgcttgacccttttgctttagcgcccttcccttcaaaagcaggcaaacagaaaccctaggagcagaggcccagcctgaggcctgtctctacctaccccaccagcacccatcacaccactcctggcaggccttccagggagtatccactgtgaccttgtagttccctgcctcagagcagaatcacttcaaggcaactagcaaggttgcgtgggaggccatcctgagtggatatttggaagtttgttttacagggtaattaggagtgctgaaagtctatgaaccaatagccggttcccagtgaccgtactctaacagtttttttagtaaggaaggggaaacattgtcaacaaagtcctgcactttgttttaatttctgctgtgtgttagttgctttgtatatttcataggaaacacaggagactgtcaacttttgactcagtagaaagagatgagtcagaatatccttagacaaagccttaagcctatcatgtactaatgaactcctgaatgatgtgctaggctggggacatagctcagagagggaacttggcataggtgaagccgtgagctcttccctgttagctgactaatgagcactgttaacagagttaacttctgtgctgccttgtggtaggaagaaccatgtgtatatatacaccaaggagatcagattcctttggcaaggaatttcagaatggatttttcaacagcagtcaaggataggtcagggttgactgatacccaatacttagtgtgttgacccatatccagtctccagcaccttcatgctgaggtattgggagacagttaaaatctttcccttcagaaaccatagaactcctgctgtgttcngcaagtctaccaaagattgttgtgtgaagagtgtcagcatctgtgtgagtgagtgagtgaacaatcaccctcctgcttccttgtggtgttaactctagcgcttccagttaatcacctaaagaggactggggagggaccacaggcagttagcatcagtaactcacttccctttaaccaaacctctgattttagcatcagagttgtttgcatctgtggtgagggaattgactagccattgcttctgcctccttcccaagtaagcaccttcttgtgggtggcactgggaggactgtggtgacctgcaccgcagggcctgaagatatcattttgaatggaacatttgatgtcatttttagggaacagaaaccaaataacagaggccaaggaccatgcgtatttcgaggagggaaggtgagcaccctctgctggcagtgtttggagttgactgactgaggatctgtgcgcagcctggaaggagtgctggctgaagtcagcaggcctcgggaatccttaacatgcaaacaatcttggggaaaccagaaggtctttcctggcagtttttgtaatacctctcattgcaggctgttggatttatgttgttcactctgggtgtgatctttcttatgtatctgatagtttttatggataattgtttgggttgtaaactcccatactctttattaaaatgaacctaattaagtgaaaaaaaaaaaaaaaaaa

SEQ ID NO: 212 - DNA, 3316 bp, Cricetulus griseus
aagacctttcctcatcccattgataatgggcaattgctgatgcacagtctgccatcgagaacggaacgaagaatcctctttactacctgtggataaatccatccttctttgaaggaagttttggggtacaaagtggactaccatgtgtccctctacattgtggccgtattggagtatatctcagcagatattttgaaattggctggtaattatgtttttaatatccggcattatgaaatatctcagcaagacattaaaagtgtcaatgtgtgcagataaggttctgatggacatgtttgatcaggatgatgacataggtttggtttctctctgtgaagatgaaccaagttcttctggtgagctaaactattatgaccttgtccgaactgaaattgcagaagaaagacagtatctacgggagctgaatatgatcatcaaagtattccgggaagcctttctttctgacagaaagttgttcaagccttctgaaattgaaaagattttcagtaacatttcagatatacatgaattgactgtgaaacttttaggtttaattgaagacacagtagaaatgacagatgaaagtagtcctcatccattagctggtagctgttttgaagatttagctgaggagcaagcatttgatccctatgaaacattatcacaggacattctttcaccagagtttaatgaccactttagtaagttgatggccagacctgcagttgctctacattttcacagattaaaagagaagtttgtcatgaggaaaattcaaatctgtgataaagaagatacttgtgaatacaaacatgcttttgaattagtatccaaagatgaaaacagtgtaatatttgttgccaagtcagctgaagagaagaataattggatggcagcccttatttcccttcactaccgaagtactctagatagaatgctggattctgtactgttgaaagaagaaaatgagcagccattgaggttgccaagtccagatgtataccgctttgtagtaaaagactcggaggaaaacattgtttttgaagacaacttacagagtagaagtggaatccccattattaaaggagggactgtggtgaaattaattgagaggctaacatatcatatgtatgcagtaaagaaataaattactccaaacttattaaaaatgattcgtcatacaacaaacctcacactctggtttgagaaatgcattgtggaagcagaaaattttgaagagcgagtggcagtgctcagtagaataatagaaattctgcaagtgtttcaagatttgaataatttcaatggcgtgttggaaatagtcagtgcggtcaattcggtatcagtgtacagactagaccacacatttgaggcattgcaggaaaggaagaggagaattctggatgatgctgtagaattaagtcaggaccactttaagaaatatctagtgaaactgaagtcaatcaacccaccatgtgtgccttttttggaatatatttaacaaatattctgaagactgaagaagggaacaatgattttctaaagaagaaagggaaagatttgatcaattttagtaagaggaggaaagtggctgaaattactggagaaattcagcagtatcagaaccagccgtactgcgtgtctgcttcttcagaccacagcgtgtttctagacgtggatctcaatagttcctgtggcagtaataccatctttgctccagtcctcttgccccagtcaaagactttcttcagctcatgtggaagtttacacaaactgagtgaagagccactgattcctcctccacttcctcctcgaaaaaaagttgaccatgatgcttcaaattccaagggaactatgaaatctgatgaccctcctgctatcccaccaagacagcctcctcctccgaagataaagccaagagttcctgtccccactggtgcgtttgatgggcctgtgcacagtccacctccacctcctccaagagagcctcttcctgacacccctccaccagttcctcttcggcctccagaacattttataaactgtccatttaatcttcagccacctccactgggacatcctcacagagacccagactggctcagagacgttagtacatgtccaaattcaccaagcactcctcccagcacaccctctccacgagtgccacgcagaagccatttgctcagttccagtcacaacaatctcactcatcctccagctcctcctgttccaccaaggcagaattcaagccctcacctgcccaaactgccaccaaagacctacaaacgggaactttcacacccaccattgtacagactgcctttgcttgaaaatgcagaaactcctcaatgaccttagccatgcgtagtcattgacactggaatagtatttgtaaaggtttttaatttattcaaaagaggcatagtattttagtactttttacaaataatgctatagatgccttttcatggcaacaaatttacacagatacaaagatgtactgtgatgttactggtttttaaaccctctgactatcttctgtgttttaactttatttggtttttacatatctagtgaataacacccactgttcttaaactctttgatgccatgtcttaaatgccagtatttgctgctgaagacaaaaccagaaaatagaatggaaataatagaatgcactgtgtttattattttgttaaaattacaaacaattctatataacccaattatagaagaaaaggggcatgtatctcattaagatgcaccttttgtttgcagtgtatggtgtctttagctaatgatttttagctaatgatttgcctcttgtttgggaaaacaaagttaatatgccatgtatgtacagtttatttatattgtatatatttaaagataatgctaataacctatataaatttaagtgacttgaggcctataatacaatctgctattttactaatttgtaagtcaagaacaaaagtttcttatggcataggaaccaactgccaaaacctattaactttctttaatctcgtgttaattgaaattttttaaaagtttttcctagattggtaatatttgaacagaaaatacttaaagctttattaaatttttaatcaggcagaggataaagcttttgtcatttggacgttctcgttcgaagtggtcaaagggtgttatgccgatagagcagtagcagcagttgtaaagtagccaaaagccacgttgtttatctactggtctgtggcctttgactgtgctttgtatcagagttcttaacaagattaataaatcacctcagtcttaaattttaaaa

SEQ ID NO: 213 - DNA, 3313 bp, Cricetulus griseus
agcattaagaagaaacattcaaacaagcaggagatgggcacctacctgaggttcattgtctcccgcatgaaggagcgggctatagaccttaataaaaagggaaaggacagtaagcatccgatgtaccggaggctggtccattcagctgttgacgtccctaccatacaagagaaagtaaatgaggggaaataccggagttacgaggaattcaaagctgatgcacagctgcttctccacaacacagtgattttctatggagcagacagtgagcaagcagacattgcgaggatgttatataaagacacgtgtcatgagctggatgagctgcagctttgcaagaactgcttctatctatcaaatgcacggcccgacaactggttctgctatccttgcatacctaatcatgagctggtttgggctaaaatgaaaggttttgggttttggccagccaaagttatgcagaaagaagacaatcaagttgatgttcgcttctttggccaccaccaccagagggcctggattccttctgaaaacattcaggatatcacggtcaatgttcaccgactgcacgtgaagcgcagtatgggctggaaaaaggcctgtgatgagttggaactgcaccagcgcttcctccgtgaaggccggttctggaagtctaagaatgaggaccgaggtgaggaagaggcagaatccagtatctcctccaccagtaatgaacagctgaaggtcactcaagagccaagagcaaagaaaggacgacgtaatcagagtgtggagcccaaaaaggaagaaccagagccagaaacggaagcagtaagttccagccaggaaatccccacaatgcctcagccaattgagaaggtgtcagtgtcaacccagaccaagaagttaagtgcctcttccccaagaatgctgcatcgaagtacccagacgactactgatggcgtctgtcagagcatgtgccacgacaaatacaccaaaatttttaatgactttaaagacagaatgaagtcggaccacaagcgtgaaacagaaagagtagtccgggaggcgctggaaaagctgcgttctgaaatggaagaagaaaaaagacaagctgtaaataaagctgtagccaacgtgcagggtgagatggacagaaagtgtaagcaggtgaaggaaaagtgtaaggaagagtttgtagaggagatcaagaagctagcaacgcagcacaagcagctcatttctcagaccaagaagaagcagtggtgctacaactgtgaggaggaggccatgtaccactgctgctggaacacatcctactgctccatcaagtgccagcaagagcactggcatgcagagcacaagcgcacctgccgccggaagagatgagcctgcccgccaccctcacacgcagcggttttgtttccaagaagccaaaattgtttagaatttgcttcccattttgcaccagcctttaaacacttttcgtggtgaaattttgcacagtagtttaaatcttttgttaatgctcctccggcatttttcgggggctgaagtaacatcaatggagggtattacttaaataaattctaattgagaatttgttgcattttcagcaaattttaaaacatttttaggttttacagagattttaaacctttaaacaacagatcttaaaacaacaacaacaacaggtgaatacgagtgagtctaacaaagacggaacagagctgaatgtaagagcggacccggccgcgacctggctgagctggttttgtgcagcttgctcactgttcacaggtgttgcctgtggccgtgctggcggcatgtgattgaatatagggaacagggttgacacagcagggctagccctgcatattttttcttaaatatttcccaattgtgttttcattttttcttttcaatatataacttttataacaaattattagctttgatcttgtagtttaaaattgcagggaaactggggtaatcttttactgagctggatcttagagaaaaatgaatatttaaattttaaagtttgcacatttcatctttgtcctgacatgagtgcttgtaacaaaatcagcagcaaaaacaaaaatcaaaagccaaaaactacctgtactcagaacgtggaatacagctgaggcatggagtttcttcactgagtcccctccctgctactaacgaactccgtcactgtacacagtgaataatgcatgttacttttcttgtattaaagatgccgtgatttgtacaaagtctgtattttgcaggatgtctggttaagaagcattaccggtaggaatggatcgatagttgaataacattttttatatatacatagatatataaaaggcaaccaggaaaattaaatttctttaaaactatctcacaatttgtttctttttctccaagactgatcatagaccaagccaaattcctactttatcctttagttattttttgaggttagagaaataatttgtaaatatttatttagacctttgatatttattaaagcaattactcacaacagaagtgaaagagtcgggagaaaagcctttaaaaaagttttctccggtccatcagggtcactctaaagatgaaagctaggagttctgtgaaacctccttcatccggcgctgatgctattgcagatggtggtaacacaagttaatttacaaactactgccaaacggagcacactcttttgtataaaaaccaccagtaacccaccacctcctccaggttacacagtaacttggcaccacagcttcctcctctgccgcataaccatcattgctgctgcgctgccctaaccaaggacacttgacagtctttgttttcaggttttaaaacttcgatccacccctgtgagagcaagttattgtgggaatatttttggtgtaaaatcattccagagtatgtactatttacctgatagctgcatgaaagtgaggttcctgttactttggcttcttgtctctgtcgacacggctgcacatttccaagttactacagtgtgaaaactgtgtatttaaaaaaaaaaaaaaaaaaaaaaaaaaaaaaaaagagattgtgggcctggttttgtaaaagttttaggtaaaattacaattgattgttttaggaatcattaaaaatttctgcaatcataaagctctatcaaggtgttgagttaagccactctgcacattgtaagtacccatcgtggctgtccagttctatgatgcattctggcattttgtaagctgctctgactagcaatatatagatttcatttactgtgttaacattggttaataaatgtaaatttaaaaaa

SEQ ID NO: 214 - DNA, 3308 bp, Cricetulus griseus
ggcgagaacaacaacgacatcatccaggataacggggccgatccattcctttccggaagcacactgtgcgcgggagcggtcctacagttggggaatggcggtcaatgtgtattctacctcgataacccaggagactatgagcaggcatgacatcattgcatgggttaatgacatcgtgtctctaaactacacaaaagtggaacagctctgttcaggagcagcctattgccagttcatggacatgctctttccgggctgcattagtttgaagaaggtaaaatttcaagcaaagttggatgagtatattcacaattttaaacttctgcaagcatcatttaagcggatgaatgttgataaggtaattccagtggagaagctggtgaaagggcgtttccaagacaacctggattttattcagtggtttaagaaattctatgatgctaattatgatgggaaggagtacgatcctgtcgaggcacgacaaggacaagatgcaattcctccccctgaccctggcgaacagatcttcaacctgcccaagaagtctcaccatgcaaactcccccacagcaggtgcggccaaatcaagctcagcagctaagccgggatccacatcttctcgtccctcatctgccaaaagggcttcatccagtggctccgcatccagatccgacaaagatttggaaacacaggtcatacagctcaacgagcaggtacattcattgaaacttgccctagaaggtgtggagaaagagagggatttctacttcgggaagttgagagagatcgatctgctgtgccaagaacgtgggcaggaaaacgatgacctcatacagcgactaatggaagtgctctatgcttcagacgaacaggagggccaaacagaagagccagaagcagaagagcaagcccacgaccaacagccccagcagcaagaagagtactgaaccatctcagcagctcttgacacttccatcgtgtgtggggacttttcttctggagaattggaacatgtgtggcctggagctcggtagaaaccagctgttcccaacctgccgttaccatccacagcgaaatcgcatctgccagccattgcacttggtcccatttcctttgccaagatgcattcgcagaaggccattctggtcacctgcctgcgaggtcatagggtcacataccttcaacttcaccagttggctgcttgaaattggttctactccttcctcatttctttcccaccaccaccaccatcaccaccaccaccaccaccaccacccctttttatcctggtgtgaaacaatggtaatttggtatatggtatttatattggcatttctcaacccagtgtcactagatgtcacatgcatttgtggtgctttaatgtttgcgagtctaacctcctatcataaatttggtcagataagtaattggaacaaagggaaacagatacttgatatgaaagccatatgacagtagcttgtgtcatgggaaaacacagtttctccctctactcacaacactaaagggaaaaaaatggattcaaaactaggatttcagggcccagcagtgttgatagagcagcatattagacaaccacagttgttagttttcagacattcattcacagacaacaccatctcagctttgcctttgctccgtgtgccctgccctccctccccacttcccaggctctcgtgttattttcttttctcagggtcctctttggtgggggtccattccccgcaagatgttgtcattggcagtctgcagttgcaaaggcagggggtgtctcagaaggcaggcttcctgcctcatccctcttcttccttgtaagggcttcaacacaagccctacaattcacattaggggatctatattaaagggtaacttgaggatgtacccaacatgccagccttctgcattgggttggcctggctgcaaggttggaagtgaagacttgactggtagcatgacttcaaggaagaagtgtagctctacacagaaacaccagtgactcccagtaccctatggagtaaggactctccccacctctgcaatacaggggccttccttgtcattgacatttgctaaaccatggcaatttataacataggaaacattaatgaattgaaagcattccttgtctttaactaatatttgcacattttcttagtgtctttcctggccgttgcctgtcttccccttttgacagatggtgtccctcctagctccctcctttcatttggttttcctaactttaggtttactgtcactggtcatttggccagcaagtgcagaaaaacaagaaacaaatgtgccccccccacttccacttaaaaaaaaaaatctcaaaataaatttctgaattatgcatcataaagctttgaaatttctttattaattgatgagatcctaacttttaaattctagcattgaagctttgcatcaagagaaggctttccgaaataaccctttacagcagctgtatgtactgaggtctttatgggaagatggcttgcatttttgagatgatcacaacacactgtgcagaagcggacagatgttccatggtgtttggttcccctttcttctctctcctgctcactcagccctacagcagtagctcatctctctgaggctggaaagccttgctccttgcagtgacatcctcccacgcctggttgtggtagtggctgtgctatacacagcatcaggcttactggtttgttgctcttctgagcctttttattcacttactttgtttttgtttgttttatatctattataaagaggtacaataaacagcttctcatggatacctgagtggttgatttacctgcccaggagatctcagtaatacctagggctgggtgattcatggccacacttctgtgaatgggtaccagggagtcaggatcttgtcttctcccaggcctcttgcctgttgaactgagagaaggaaactccagaagggaaccacgattccctcccttccctggtgagtgtctccattattccgttaaggtttaatatgcattcagattacttttactaaatagtacaccataaagcttttgttatatattaaatgtaaactgaaaggaatgtaaacatatgtattgttaattataaatatcgataagtaatgacataatagatgaaaaggtcttattcagatgcatcacattcattttacattgcccacctattgtcgcatggtaggatagctttttgtctctgaatatgtgaataacttgacttgcgttgatctttttacatatttaataaaaaaatatatgttaaaacctg

SEQ ID NO: 215 - DNA, 3302 bp, Cricetulus griseus
gaggtgcccatcaacttgggaagaaagtttggcatcgtttgcggtagtggtgtcccgaggatgggcagggtcccgctggcctggtgcttggcgctgtggtgctgggggtgtgcagctcccaaggacacacagactgaggttgacagcccatttgtggggaacccggggaatatcaccggtgccagaggactcacgggaacccttcggtgtgagctccaggttcagggggaacccccggaggtgatgtggcttcgagatggacaggtcttagacctggctgataacacccagacccaggtgcctctgggcgaaaactggcaagatgaatggaaagtcgtcagtcagctcagaatctcatccctccaacttgcagacacaggagagtaccagtgcatggtgtacctggaaggacggaccttcctgtctcagcctggctttgtagggctggaaggtcttccgtacttcctggaggagcctgaggacaaagctgtgccggccaacacccccttcaacctaagctgccaggcccagggaccccctgatcccgtgaacctactctggcttcaagatgctgttcccctagtgcccatcacaggccacagctcccagcacaggctgcaagctccaggcctgaacaagacttcttctttctcctgtgaagcccacaacgccaagggagtcaccacctcccgcacagctactgtcacagtgctcccccagaggcctcaccatctccacgtggtttcgagacagcccacggagctagaggtagcttggacccccggcctgagtggcatttacccgcttacccactgtaacctgcagggcgccaggcaaggacaaccactccaccatctggtgagtgaacccccacctcctgccttctcgtggccctggtggtatgtactgctgggagcagttgtggccgctgcctgtgtcctcatcttggccctgttccttgtccatcggaggaagaaggagacccgctatggggaggtgttcgagccaaccatggaaagaggtgaactggtagtcaggtatcgtgtccggaagtcctatagtcgccggaccaccgaagccactttgaacagcctgggcatcagcgaagagctgaaggagaaactacgagacgtcatggtagatcggcataaggtggccttagggaagacactgggcgaaggagagtttggtgcagtgatggagggccagctcaaccaggatgactccgtcctcaaggttgccgtgaagacaatgaaaattgccatctgcacaagatcagaactggaggatttcctcagtgaagctgtctgcatgaaggaatttgaccaccccaatgtcatgaggctcattggtgtctgtttccagggttctgatcgagagggtttcccagaacctgtggtcatcttgcctttcatgaaacatggagacctacacagtttcctcctgtattcccggctcggggaccagccagtgttcctgcccactcagatgctggtcaagttcatggctgacattgccagtggcatggaatatctgagtaccaagagattcatacaccgggacctggctgccagaaactgcatgctgaatgagaacatgtccgtgtgtgtagcagacttcggactctccaagaagatctacaacggggactactaccgccaggggcgcattgccaagatgccagtcaagtggattgccattgagagtctggcagatcgagtctacaccagcaagagtgatgtgtggtcctttggagtgacaatgtgggagatcgctacccgaggccagactccctatccaggagtggagaacagtgagatttacgactacctgcgccagggaaatcgcctgaaacagcctgtggactgcctggatggcttgtatgccctgatgtcccggtgctgggagctgaaccctcgagaccggccaagttttgcagagcttcgggaagacctggagaacacgttgaaggctctgccccctgcccaggagcctgatgaaatcctttatgtcaacatggatgaaggtggaagccacctggaaccccgaggtgctgcgggaggagcggaccccccaacccaacctgacccgaaggattcctgcagctgtctcactgcggctgaggtccatgctgctggacgctacgtcctttgtccttctacagctccgggacccaccctgtctcctgacagaggctgcccagcacccccagggcaggaggatggagcctgagacagtcttccacctgggacgccctctcaggatccaagctaggcactgccactgggggaaacctcaccccctctttgccgctccaggcctttctccccaactgcagcatggccttctctcccttctcaaattcaggctcttgttgtagacatggacccacttgtccgaaggctctgagattctgtggctctagatttttctggttctcaaattcttggtgatgcccccatggttttcggttgtacagctctgcgataaagaattctaggcgtgaaggttgtaaggcatactgttcccaaatttaacagtaagcgctccgtgtcataatactccagaccataatgcttcagacttttgttttcttaatttctgagattccagcgatggtcagttaaagcctcggaggcattaacatcatagatgcttttatgtaagatcctgcatctcaagtatgattctagaatctgaaactccaaagctttaagagtctccagcctgagtttctaagctatgatgtgatgataacctagaatgtggtccaaggttctagattctctcagattccacatcatatgctccagggttacagatcattaaactctaaagctctaatgatggcctcctcttgatctcaggcactatatgatgctgtggctccaagactctgggtcctaagaggctcacagttaattgtgactaaccagacaccaaagttctaaccatttctaatgctggacacctctaggttctgtgctgctttccgcctttctagcgcctaattaaaggttggagaatacatatttctaaacatattaaggctctaagcactataacttaggaaaccaaggttcctagtgtctaggattctgaaggtccacaggtgtagaatgttaggtacgaagccaaggttgggtgcaatgcattgggaatgtctttccttcaagtgacggaccatcttccctgattttgggtcatgttgcccccttgagccagtccctccacccctgtctaaagtatggactctggtgcctccagagaggctcagaccacataaaatttttgtcaatcac

SEQ ID NO: 216 - DNA, 3294 bp, Cricetulus griseus
tcatggccagaaagttcgatgtgctccgtgccatagagctgtttcatgcctacagagaaacaagaaggaaggaaggcatcgtgaagctgaagcctcatgaagaacctctccgttctgagatcctcagtggaaaaattcaccatcttgaatgttcgagacccaactggagcctccattgcccttttcactgccaggttacatcatcctcacaagtccgtccaacacgtggtacttcaggccctggtttacttgctagacagagctgtagacagctttgaaactcaaaggaatggattggtgtttatttatgacatgtgtggttctaattatgccaacttcgaacttgatcttggcaagaaagtcctaaacttattgaagggagcatttccggctcggttgaagaaggtgctgattgtaggggcgcccatatggttccgagtgccctattctatcatcagcctgctcttgaaggacaaagtccgggagaggattcagatattaaagacatctgaaattacccagcacctgcctagggagtgccttccagaaaatctgggtgggtacgtcaaaattgaccttgccacttggaatttccagttcctgccccaagtgaacggccacccagatcccttcgatgagatcatcctgttttccctacctcctgccttacactgggactcagtacatgttccaggtcctcatgccatgactatccaagagttggtagactatgttaataccaggcaaaagcggggcatatatgaggaatatgaagacatccgtcgtgagaaccctgttggcactttccactgttccatgtctcctggaaacctggagaaaaaccgatatggagatgttccctgcctggaccaaacaagagtgaagctgacaaaacgaagtggccatactcagacagattacatcaatgccagtttcatggatggctacaagcagaagaatgcttatattggtactcaaggccctttggagaatacatatcgtgacttctggctcatggtttgggagcaaaaagttttggtgattgtaatgaccacccgctttgaggaaggtggcaggagaaaatgtggccagtactggcctttagaaaaagactctcgggtccgatttggcttcctcacggtgactaatctaggagtggagaacatgaaccattataagaaaacgactctagaaattcacaacacagaggagcggcagaaacgccaggtgacccacttccagttcctaagctggccagattatggtgtcccttcctcagcagcttccctcattgactttctgagagtggtcagaaaccagcaaaggcaggctgtcagcagcttgggagcacggtccaaagggcaatgccctgagccacccattgtggttcactgcagtgcaggcatcggcaggacaggtaccttctgctcattggacatctgcctggcacaactggaggagcttggcacccttaatgtgttccagacagtgtctcgcatgaggacacagagggccttcagtatccagacccccgagcagtactacttttgctacaaggccattttggaatttgcagagaaggaaggcatggttccctctggtcacagcctgttggccacggagggtcaataactgttccatgaatttctacctgctggccagccttccttaaattaccctggacaccgctgagcctataggttgccatcagttacgctgaagccatggatcaaactctttgtgtctcccagcgcacatgtgcacgcaaggcagcctttccctttggctagataaatgtggtgaaattgccactagaaagggccagcagcaatgtgttcttaattcctagcacctgctattgaactgtgccttattaaaaccaaattgtggctattgatttttgccagggtccctgaggtaagtggggaaggagcccccatctcccaatgccgttcttcttctagaagtctcctccttccctatgctaggatttgacagggaggtttggtgagcattcaccttcctgcccagagagcttgaccaagttacatattctagagaatgtcctgagtgccaagcacgtttatacatagggcgtgtattccagtcttttctgtcattttgtgtgtgtgcgcgtgtacgtatgtgcacttctgtgtatggatccatatgtatgtgtgtatataatatatactgtatgtgataatatggtcgtattctataaatacatatacacacagataatctgtagaagtttcctggggcttcatgttgcagttcagcattccttgcttcttggacgctgctgattagtctggactagctggggttggggatcatgctcatgttgtcagacagcagagtgatagaagacaacacatacttttttcccgggccacaagccctcttccttaatgacatccttccctctggactctatgcttgttggagccaaaaatactgacttatggtaacactggttcaatttagcatggtttgtccttcatctaacaaattctctgtttactttgctgatttggggaacagacctccactgtgattccagactcagtcttattaccccagtgatggggttcaaggctagagatgaatttacagagctgccagagccaaaagtaatcggtacgaagtcttaaaagaaagaaggagaattctggagtgcatgagaggaagctactatgaaattccgttcctgggagaacaaaatggggcccctttttcttttgttggaagattcctttctttatgccattctcctttgtctactgagatgcccagctcttcctgcctgctagcctgccatctcctagacctcaaactggatgggttctatgtctgtataaaacataaactggatgggttctatgtctgtataaaacataagtcccttgactggatgaggtagttccttgcaatcactggtcccctgcccatccaacttgttcctgtcatttcccagtctgattcatcaggaatagaatcaagcgttcccaacactcaattttcctgcaaaaccccactgaacccctaaatcttcccctactccagttgatgaggttggcagctggtcagtcccaataattttatactgtaataagatctttgaatgtgtatattcttattttttacaatcatttcattttgtatttaacaccaatgaactgagtcagattcagtaaataattgtaatgttcatattcaatatcttatagtggtacagttttgtatttacatataaatataccaacatgaattaaaaaaaaaaaaaaaaaa

SEQ ID NO: 217 - DNA, 3293 bp, Cricetulus griseus
  modified_base (41)..(41): a, c, t, g, unknown or other
gtacggcagctgcgcactgcctcatggcagttgtagtcttnttggtgtcaatatgtcaacaagctggcattggtcttcttagccctgtgttgtgcttttcccatccctggccatctatgctggtgtcatcaagacagccttcgccccacctgacatcccggtctgtctgcttgggaaccgcacgctggcaaagcgcagctttgagacctgtgccaaaatgcaggttgtcagcaatgggacagtgaccactgcactctggcgcctcttctgcaatggctccagcttgagtgccacctgtgatgagtactttatacagaacaatgtcactgagatccagggcatccctggtgtggccagtggtgtcttcctggataacctgtggagcacatattctgacaagggggcatttgtggaaaagaagggagtgtcctcagtgcctgtatacgtccttacagacatcatgacctacttcaccatgctggttggcatctacttcccctccgtaacaggggatcatggcaggatccaaccgctctggggacctcaaagacgcccaaaagtccatcccaacagggaccattctggccattgtgaccacgtctttcatttatctttcctgcatagtgctatttggggcctgcatcgaaggtgtggtcttgcgagataagtttggggaggccctgcaagggaacctggtcattggcatgctggcctggccatccccctgggtcatcgtcattggctccttcttctccacctgtggtgctggcctgcagagcctgactggggcaccccgcctgctgcaggccatagcccgtgatggcatcatccccttcctacaggtgtttggtcatggaaagccgaacggggagcccacagtgggccttgctgctcacagccctcatcttctctgatgttgttgcagagaacgaccaaaggcttctgccagctggtggtgtcctctaacctgcgagatggtgcatcccacctgatccagtcagctggccttggtggcatgaaacacaacactgtccttatggcctggccagagtcttggaagcaggcagataaccctttctcctggaagaactttgtggacactgtccgtgacactacagcagcacatcaggcattgttggtggccaaaaacatcgacttgttcccgcagaaccaagagcgctttagtgacgggaacatcgatgtgtggtggattgtgcacgatgggggcatgctcatgctgctgcccttcctgctacgccagcacaaggtgtggcgaaagtgccggatgcgcatcttcactgtaagcccaggtggaatgacaacagcatccagaatgaagaaggacctacagatgttcctgtaccacctgaggatcagcgctgaggtggaggtggtggagatggttgaaaatgacatatctgcattcacctatgagaagacgctaatgatggagcagaggtcacagatgctgaaacagatgcagttatcaaaaaatgagcgggagagagaggcccagctgattcacgacaggaacacagcatcccataccacagcagctgctagaacccaagccccaccaacacctgacaaagtgcagatgacgtggacaaaagagaagctcattgcagagaaacacaggaacaaggacaccagtgcttcgggcttcaaagacctcttcagcctaaagccggaccagtccaacgtcaggaggatgcacactgctgtgaagctcaatggtgttgtccttaacaagtcccaggatgcgcatctggtcctgttgaatatgccaggccctccgaaaaaccggcagggtgatgagaactacatggagtttcttgaggtcttgaccgagggattgaacagggtcctcctggtcaggggtggtggacgggaagtcatcaccatctactcctaacacctgcagcctggacacacctggacggggtcaggactgtgctagcagcctgtggccaggctcgggcccaccagcatgccactgactgatggccactgccctggcatggccctgccaagatgctgcagtgattctggtctcctgccacgtatcgcttcccatggacgtaacacccctaggcttcttccaagcagaaggtgcctaaggggggcagtgcctagagctgttctgacaggaatggctccttgcatctttgtgggtaatggtaggtatgcccaagggactctggggtcagctcttcccagaacacgtgaacaagcacaccgttccttggggctagaatgtcagtgagctgttccccattggcttctgccttctttgttcctttgggtatccttgctgtgctctctgtaagcaagctgaggactgtccactcttacctcctcatttcctgtccacactcctcagggtaccactggaaagtgagagagtgtttacagggtaggcttgggtcaccatttgggtgggtggtggctgccagctgtgttcccacctgagtgaatgccctcggaactcctgcagagagaacctttgttctgccgagccagggctatctgcagctagtcggctttctcttctcatgggaacccagccactttatttcctaagcactgagctgggaacctcaagcaggtgaccacagagagccacagtgtgacaagcaaacagcaagaacgctgagagttgtgcacacagtccatgacagcaggagccttccagagtgtgaaccgtgctgtggttcagcacaccgctttgcacatatgacatgccgtcccatccctcaccacaccctcagcatcagcagccatggctctgggtctttttggctgagtctcttgtcccctaccatggataaccttacttagctggggccactgacacttctgtactttttaagaacctgacagatttgcactttacccttgtgcactctgctctgtaggtcatagtctgttcgaaggctgtgggcaacagcagcaatccgtttctcatgttccgtatggcgtatttatttatttaatcctccctggggaagcttgatagagatagtttctgtgtggataccccgtgctgccaggccctgggccatctctggcttcctccaagagaatcaatcttgtccctattcaggaagttcccattaggggagaagccaagtttgtacctgtacgggttcctcagattttgttaggcagccagaggtcaacttgccagagtatctgctgcccagcaggtgtccccatcagtatagcagtttccactcctgctctttgtatgactttgttagtagaaaagtaaagttctatgaaatagtaaa

SEQ ID NO: 218 - DNA, 3290 bp, Cricetulus griseus
caaggaattggcatgtaagatggccctggaacttctcacccaagagtttggtattccagttgaaagactctatgttacttactttggtggagatgaagcagctggcctagagccagatctggagtgtaaacagatctggcaaaatttaggactagatgatgccagaattctcctggcaacatgaaggacaacttctggggagatgggtgacacaggcccctgtggcccctgcagcgagatccactatgaccggattggtggtagggatgcagcacacctcgtcaaccaggatgaccccaatgtgctagagatctggaaccttgtgtttatccagtataacagggaaactgatggccttctgaaacctcttcccaagaaaagcattgatacagggatgggcctagagagactggtatctgtgctgcagaacaagatgtccaactatgacactgacctttttgttccttacttcgaagccattcagaagggtacaggtgcccggccatacactgggaaagtcggtgctgaggatgcggatggaattgacatggcctacagggttctggctgaccatgctcggaccatcaccgtggcactggccgatggtggccggcctgataacacaggacgggggtacgtgctgaggcggattcttcgaagggctgttcgatattcccatgagaaactgaatgccagcaggggtttctttgctacattagttgatgttgtcgtacagtccctgggagacgcattccctgaactaaagaaggacccagacatggtgaaggatattattaatgaagaagaggtacagtttctcaagacactcagcagagggcggcgcatcctggaccgaaaaattcagagcttaggagactgcaagaccattcctggagatactgcttggctcctctatgacacttacggattcccagtggatctcactggattgattgctgaagagaagggcctggtggtagatatggatggctttgaagaagagaggaaactagctcagctgaagtcacagggcaagggagccggtggggaagacctcatcatgctggacatttatgctattgaggagctccgggcaaagggtttggaggcgacagatgattctccaaaatacaactaccattctgactccaatggtagctatgtgtttgagtgcacagtggctactgtgcttgctctgcgaagagaaaagatgtttgtggaagaggtggtcactggccaggagtgtggagtagtgctggacaagacctgtttctatgccgaacaaggagggcagatctacgatgaaggctacttggtgaaggttgatgacagcagtgaggataaaactgagtttacggtgaagaatactcaggtccgaggcgggtatgtgctgcatataggaacaatatatggaaacctgaaagtgggggatcaagttcggcttttcattgatgagccccggcggagacctgtcatgagcaaccatacagccacgcacattctgaacttcgccctgcgctccgtactgggggaagcggaccagaaaggctcactggttgctcctgatcgccttcggtttgacttcactgccaagggagccatgtccacccagcaaatcaaggaggctgaggagattgtcaatgccatgattgaggcagctaagcctgtctatacccaggactgtcccctggcagcagcaaaagccatccaaggccttcgcgccgtgtttgatgagacctatcctgaccctgtgcgagtcgtttccattggggtccccgtgtcagagctgttggatgacccctctgggcctgccggctccctcacttctgttgagttctgtggaggaacgcatctacggaattccagtcacgcaggagctttcgtgatagtgactgaagaagctattgccaagggtatccggaggattgttgctgtcacaggtgctgaagcccagaaggccctcaggaaggcagagagcttgaagagatctctgtctgtcatggagaccaaagtgaaggcccagactgcacccaacaaggatgtgcagcgggagattgccgaccttggtgaggccctggctaccgcagtcatcccacagtggcagaaagatgaacaacgagagactttgaaatccctgaagaaggtcatggatgacctagaccgtgctagcaaagccgatgttcagaagcgagtgttagagaagacaaagcagctgattgacagcaaccccaaccagcccctggtcatcctggagatggagagtggcgcctcggccaaggccctgaatgaagctttgaagctgttcaagactcattctcctcagacgtctgcaatgctcttcacagtggacaacgaggctggcaagatcacatgcttgtgtcaggttccccagaatgcagccaaccgaggcctaaaagccagcgaatgggtgcagcaggtttcaggcctgatggatggtaaaggaggtggcaaggatgtgtctgcccaggccacaggcaagaacgtgggctgcctccaggaagccttgcagctggctacctcctttgcccagctccgcctgggagatgtgaagaactgacaggagagaagccctcactgggaagcgtttccccatcaaacaaatgtgtcagaatgcaggagtgcacccaggagctcccctgccatgaagacatttgagtcttgggacctttcagtcgccctatccgtcctaatccagcagtaactggaacatacctggagctgtcctgtgacttattgcccctttccgttactgctctgagccatactgtcagcaccatctgtctagaatcactaccccaggaatgctgttgaacatcaccgtgatcatgtctagataagaccactctgccgacctgaggcttctaggtcatctgcaggtaggaagcctttttgctgcagaaaataaaaaggaccatgtgcaatacttcggaagtggctcgtgcgccggtagccgccatgccgggagaccaccgtcgtatccgttcgggttccggttaggtagtctcagccgccgcaactgtacgcggccgacgaagacgagctgcctgctgcccgcgacccgacgcggctacggccggtgtacgcgcgcgctgggctgctgagccaggccaagggctcggcctacctggaggccggaggcaccaaggtgctttgcgccgtgtcgggcccgcgccaggccgagggcggcgagcgcggcggcggccctgcgggagcgggcggccgaggctccggccgccctcccgtggccgcctgctctgtgacttccgccg

SEQ ID NO: 219 - DNA, 3288 bp, Cricetulus griseus
  modified_base (957)..(957): a, c, t, g, unknown or other
gacaggggaaacaaatcttctcatggaagcagtaagcctcaggaagctccccaaagtgtgactgccacagcagcatccaagactcccttagaaaatgttccaggtaacctttctcctatcaaggatcccgatagacttcttcaggacgttgatatcaatcgccttcgtgctgttgtcttttcgagatgtggatgatagcaagcaagcacagttcttagctctggctgttgtttacttcatctctgttctgatggtatctaagtatcgggacatactagaaccccagagagagaccgtgagaactggaagccaaccaggtagaaacatcagacaagaaataaattcgccaacaagtacagttgtggtcataccgtctatccctcatccaagtttgaatcacggacttcttgccaagctaatgcctgagcagagttttacccactcattttacaaagaaacacctgctacatttccagacactgtaaaggagaaggaaacaccaaccccgggtgaagatattcagctagaaagttcagttcctcccacggattctggaatgggagaggagcaagtggctagcatcctggatggggcagaactagagactgctgcaggtcctgatgcaatgagtgaacttttatctactttgtcatctgaagtaaagaaatcacatgagagcttaactgaacatcccagtgaaatgctgaaacctgcaccatccatatctagcattagtcaaaccaaaggtattaatgtaaaagagatactgaaaagtcttgtggctgctccagttgagattgctgaatgtggccctgagcctattccatacccagatccagcactgaagagagaagctcaaagctaattcttcctatgcagtttcattcctttgacaggagtgtggtggtgcctgtaaagaaaccacctccaggtttgcatacactgagggacgttcangggaaatggatgttcagtgagatacgagctgtgttttccagacgctaccttctgcagaacacagccttagaagtgttcatggccaacagaacctctgtgatgtttaattttcctgattcaagcaacagttaaaaaaagttgtactacagcttgcctcgggttggagtggggaccagctatggtttgccacaagccaggctggagacctgctgagggccctagaagggccagaaaactgcctgttcccacgcctaatttctgtatccagtgaaggccactgcatcatatactatgagcgaggacggtttagcaacttcagcaaatcaatgggaaacttttggctcaaatggagatcaatgattccactcgggctattctcctgagcagcgatggacagaacttggtgactggaggggacaatggtgtggtagaggtctggcaggcctgtgacttcaagcagctgtacatttaccctggatgtgatgctggtattagggcaatggatttatcccatgaccaaaggactctgatcactggcatggcttccggcagcattgtagcttttaatatagattttaatcggtggcattatgagcatcagaacaggtactgaagagaagctgcagaagccacgttcaagtgagagcacatatgctctgtggaaaggcagtatctctggtggggacacttgtccgcatcggctctgtacatccatcccacccagcagtcgccgaacatcatagtcaggagccatttcaccctgtttttccgggactgaacaccagctgctgtcaagcaagctcatatcatgtaaattatctgaattaggagacgttttggtaattatttcatatattgtcgtttattgagaaaggttgtaggaagcctcacaagagacttttgacaattctgaagaaccttgtgtccagttgttacaaggtttaagctttgaacctaacctgcatcccatttccagcctcttttcaagctgagaaaaacaaaacccacgtttgatactttgtacatcatatgcatcttatttaaagggatacttttgtaaaagtgaaaccttgtataaagaaagagcagcctttgttaatttactgtggagttacaacctgcatgctccctactccccacgttttgatggaactggtgcattcaagctaggaaatggaaaaggacgcagcttgttcaaagtgttgaatttgggctcaatcagtaatttcgacattttcaccacaatatgatttgcactttttaatctaaatttatcccttctaagagaagtttgctcatacaccgtttggatactaagccattatttgccattgttggtactttatacaaagaaaattcaaccctgccctttaggacttgaagatgcagcagaaagggagcctggggatgagggcctggtttctactgtgtaaatgggagtcatgatcattaatcccattgcatcaacttcccagcacctagacatctctcccctggtgtcagcccactggctcagtctccatgtcaggggaggatgaggatgttaacatttcccctccttggttcttgaatagcttagtttaataatgagtcagacttgattacaacaataactgaacttatctctttcatttcttgtgagattctcacctaaagccacattcctagcctaaggcacttaatcttttacaatataaaatgatggctttcaaatgatttttccattcatcgtccctatccagatatcacccaggggtctatacatttcttcatgtttcttctttgtatatttggtgactgtattgtcatagatgtacatatcgtgtcggtagggctatgaggcatgtaacaggaatgtaattttctcagaatttcactcacttgcagtcatttatttcaaaagataaaacaggataatgggttctttgtattggcactttgcaccagacacataccattatttattgctgtgattacttatttgtcatccaccttgtactaggaagttttagcactgaattattccttcttcattgttgtttgtatttatgaaattctgaaattatggggaatcagtgtactgattacgttattcatcaccaggctgtgagcaatatcttgagtttgtagcttagaattgggaaggcactgaacatctggaagacaaggtcatttcatcttgagatcatggtgaaatattttggatatataaattccttaagctattgtaaccatgttttattgcaaagatgtaaaatatgccagatgtgtgtgagttggaaatcaaaaaaagaaaaataaaatatgcaaaagaataaaaaaaaaaaaaaa

SEQ ID NO: 220 - DNA, 3287 bp, Cricetulus griseus
gcatggacattgaacaagtggttaccctgagcttagcttttctgttggctgtcaagtacattttctttgaacaagcagagacagagtccacactgtctttaaaaatcctatcacgtctcctgtcgtgaccccaaagaaagctccagacaactgttgtagacgggagcctctgcttgtgagaaggagcgagaagctttcatcggttgaggaggagcctggggtgagccaagatagaaaagttgaggttataaaaccattagtggtggaaactgagagtgcaagcagagctacatttgtgcttggcgcctctgggaccagccctccagtggcagcgaggacacaggagcttgaaattgaactccccagtgagcctcggcctaatgaagaatgtctgcagatactggagagtgccgagaaaggtgcaaagttccttagcgatgcagagatcatccagttggtcaatgccaagcacatcccagcctacaaattggaaaccttaatggaaactcatgaacgtggtgtatctattcgccggcagctcctctccacaaagcttccagagccttcttctctgcagtacctgccttacagagattataattattccctggtgatgggagcttgctgtgagaatgtgatcggatatatgcccatccctgtcggagtagcagggcctctgtgcctggatggtaaagagtaccaggttccaatggcaacaacggaaggctgtctggtggccagcaccaacagaggctgcagggcaataggtcttggtggaggtgccagcagccgggtccttgcagatgggatgacccggggcccagtggtgcgtcttcctcgtgcttgtgattctgcagaagtgaaggcctggcttgaaacacccgaagggtttgcggtgataaaggacgccttcgatagcactagcagatttgcacgtctacagaagcttcatgtgaccatggcagggcgcaacctgtacatccgtttccagtccaagacaggggatgccatggggatgaacatgatttccaagggcactgagaaagcacttctgaagcttcaggagttctttcctgaaatgcagattctggcagttagtggtaactactgcactgacaagaaacctgccgccataaactggatcgagggaagaggaaagacagttgtgtgtgaagctgttattccagccaaggtggtgagagaagtattaaagacaactacggaagctatgattgacgtaaacattaacaagaatcttgtgggttctgccatggctgggagcataggaggctacaatgcccatgcagcaaacatcgtcactgctatctacattgcatgtggccaggatgcagcacagaatgtggggagttcaaactgtattactttaatggaagcaagtggtcccacgaatgaagacttgtatatcagctgcaccatgccatctatagagataggaactgtgggtggtgggaccaacctcctaccacagcaggcctgtctgcagatgctaggtgttcaaggagcgtgcaaagacaatcctggagaaaatgcacggcaacttgcccgaattgtgtgtggtactgtaatggctggggagttgtccttgatggcagcattggcagcaggacatcttgttagaagtcacatggttcataacagatcgaagataaatttacaagatctgcaaggaacgtgcaccaagaagtcagcttgagcagcctgacagtattgaactgaaacacgggcattgggttctcaaggactaacatgaaatctgtgaattaaaaatctcaatgcagtgtcttgtggaagatgaatggacgtgatcagtgagacgcctgcttggtttctggctctttcagagacgtctgaggtcctttgctcggagactcctcagatctggaaacagtgtggtccttcccatgctgtattctgaaaagatctcatatggatgttgtgctctgagcaccacagatgtgatctgcagctcgtttctgaaatgatggagttcatggtgatcagtgtgagactggcctctcccagcaggttaaaaatggagttttaaattatactgtagctgacagtacttctgattttatatttatttagtctgagttgtagaactttgcaatctaagtttattttttgtaacctaataattcatttggtgctggtctattgattggggacctacttcttcatgggaagaattacttttattctcaaactacagaacaatgtgctaagcagtgctaaattgttctcatgaagaaaacagtcactgcatttatctctgtaggccttttttcagagaggccttgtctagatttttgccagctgtgccacgctctgcactaaagatatcagagctcttggtgttacttagacaagagtatgagcaagtcggacctctcagaaccatttctctaagccaattttctttaaagacattttaacttatttagctgagttctagatttttgggtaaactatcaaatctgtatatgttgtaataaagtgtcttatgctaggagtttattcaaagtgtttaagtaataaaaggactcaaatttacactgataaaatactctagcttgggccagagaagacagtgctcattagcgttgtccaggaaaccctggcttgcttgccaagcctaatgaagggaaagtcagctttcagagccaatgatggagccacatgaatggccctggagctgtgtgccttgttcctgtggccaggagcttggtgactgaatcatttacgggctcctttgatggacccataaaagctcttagcttcctcagggggtcagcagagttgttgaatcttaattttttttttaatgtaccagttttgtataaataataataaagagctccttattttgtattctatctaatgcttcgagttcagtcttgggaagctgacatctcatgtagaagatggactctgaaagacattccaagagtgcagcggcatcatgggagcctcttagtgattgtgtgtcagtattattgtggaagattgactttgcttttgtatgtgaagtttcagattgctcctcttgtgactttttagccagtaacattttatttacctgagcttgtcatggaagtggcagtgaaaagtattgagtattcatgctggtgactgtaaccaatgtcatcttgctaaaaactcatgttttgtacaattactaaattgtatacattttgttatagaatactttttccagttgagtaaattatgaaaggaagttaacattaaaaaaaaaaaaaaaaaaa

SEQ ID NO: 221 - DNA, 3285 bp, Cricetulus griseus
  modified_base (3107)..(3107): a, c, t, g, unknown or other
aatgagcaacgcagggccagaaagccaaggatgttcgggaaaatccacgtgctatggccaagctgcttcgagaagccaatcgccttaaaaccgtcttgagcgctaatgtcacatggcacagattgagggcttgatggatgatgtggacttcaaggcgaaagtgactcgagtggagttcgaggagttgtgtgcagacttgtttgaaagagtgcctgggcctgttcagcaggccctccagagtgccgagatgagcttggatgagattgaacaggtgatcctggtgggtggggccactcgtgttcccaaagttcaagaggtgctgctaaaggctgtggggcaaggaggaactaggaaagaacatcaatgcagatgaagcagctgccatggggctgtgtaccaggcagccctggggttcgaagcctgaagcacaataaacgtgtgctcttctccccgaatggggccctaccctcagcgcaaagtcatcacctttaaccgctacagccatgatttcaactttcacatcaactacggtgacctgggcttcctggggcctgaggatcttcgggtatttggctctcaaaatctgactacagtgaagctaaaaggtgttggagagagcttcaagaaatatcccgactatgagtccaaaggcatcaaggcccacttcaacctggatgagagtggggtgctcagtttagacagggtggagtctgtatttgagaccctggtggaggacagcccagaagaagaatctactcttaccaagcttggcaacaccatatccagcctgtttggaggtggtacctcgtcagatgccaaagagaatggtactgatgctgtacaggaggaagaggaaagccctactgaggggagcaaggatgaacctggagagcagggggaccttaaggaggaaactgaagcccctgtggaagatacctctcagcctccaccccctgagcctaagggtgatgcagctcctgagggagaaaaacctgatgaaaaagaaagtgggggaaagtctgaagctcagaagcccgaagagaaggggcagtcagggcctgagggtgtccctccagctcctgaagaagaaaaaaagcagaaacctgcccggaagcagaaaatggtagaggagataggtgtggagctggctgtcttggacctgccagacttgccagaggatgagctggctcgttctgtgaagaaacttgaggacttgaccctcagagacctggaaaagcaggaaagagagaaagctgccaacagcttggaagcttttatctttgagacccaggacaagctctaccagcctgagtaccaggaagtgtccactgaagaacagcgggaggagatctctgggaaactcagcgccacttctacctggctggaggacgaggggttcggagccacaactgtgatgttgaaggagaagctggctgaactgaaaaaactgtgccaagggctgtttttcgggtggaagagcgcagaaaatggcctgaacggctttcagctctggataatctcctcaaccactccagcattttcctcaagggtgcccggctcatcccagagatggaccagatcttcactgaggtggagatgacaacgttagagaaagtcatcaatgacacctgggcctggaagaatgcaactctggctgagcaggctaagcttcctgccacagagaagcctgtgctgctttcaaaagacattgaggccaagatgatggccctggaccgtgaggtacagtatctgctcaataaggccaagtttaccaagccccggccacgacccaaggacaagaatggcacccggacagaacctcccctcaatgctactgctggtgaccaagaggagaaggtcattccacctgcaggtcagcctgaagaggcaaagcccattttagaacctgacaaagaagagactactacggaaccaacagactctgagcctctggaattaggaggtcctggagcagaatctgaaccgaaagagcagacagcaggacagaagcggtcttcgaagaatgatgaactataaccccccctcctgtatccccactgtctcgcctccagccccttctcctaccacctctatttattatacatcagggttggggcaaggggtgggttttgcccttaggggctcaagttccttctctcagctgacacaggaggtggctgctcagcagtccttctggaatagctccatgagtgaaatgatctagttctgtccccagctccacgctctggtctcctactctctggccctgtgtttgggaaaaatcactattgtgtcttaattgtttgcctgtgggtaaatgagagaatggctgccagtggttgttggagacctggtaatgggaaggatattttgggacactagagtgcccagtcttctctgagtatcatttcattctttgctgttccacaaaatcagtgtcctgtttgggccagtgtctacagagcctcatcaccacctttggcttcccagtgcctctttttctcttctgtgtcttctctttcccctgcccttcctccttggctcttctgtctgtctttgccttcccagtacagattgggctgtagtcttctagcccaaagcctttcatcatccacactgtgtagagtaaatatgttcttatggttcatgcgccccctggtggctggagcaagcggaagtggttggcaagggtgcaagtatcttgcaggcacttggaatccttatccccagttcctttgacacctaccccttctctcttgctctttcctgcttccccctgggctgaccaaaaacgtgctatctactgtgagccccttttccaagactctgagggactagagaccatggtgtgaatgtaaaaatgtcacctcactctcaggcaagctttgtgggtaaagaagagagtcatggttcaactccccagtgtacttgctaggaggggaagcctcttacccatgatgcccatgtctagagtgcctgtcctccagtattgcacctgtagcaggagctagggctaccccacttctgggacaaagcaaacctggtatgtcagtcattttgtcttttcttcccccctccaccctactcccctcttttttttttttttntttttttttttttgccacattggcagagagacctaaaggtcctatatagtccccttcccttcctgtgtgtttgagttctttcattagcagttcaggctggttagacaggtttgaatcaaattgtactttgttccattgttaattgagaaactgtttcaataaaatattcttttctata

SEQ ID NO: 222 - DNA, 3285 bp, Cricetulus griseus
ggacctcagccatgtggagccaggggtagccaggtcacccttacgtcaccgacgcagcaacgaatgttcaagtccaacatcatctgctacttaccagccgtcctttgctgcagcggtccggagtaacactggccagaagactcaacctgatgtcatgtctcagaatgctaaaaagctgattcagaaaaatctggctacatcagcagatactccaccaagcaccatcccaggaactggcaagagcattgcttgtagtcccaaaaaggctgtcagagatcctaaaacggggaaagctgtgcaagagagaaactcctatgcagtgagtgtgtggaagagagtgaaagccaagctagagggccgagatgttgatccaaacaggaggatgtcagttgctgagcaggttgactatgtcattaaggaagcaactaatctagataacttggctcagctgtatgaaggttggacagcctgggtgtgaatggcaacacagtagatgagtctggttaagcgaggtcagacatccaccagaatcaactgagcctcaggcatccaaagccacatcacagtcggtggtgatgcaactgggggcgttactctgaggaaacctaggaaatctcggtgtactaggaagtgaatcctgcaggacagctgcactcagggatacgcccaacaccatggccagggtcaaaggtgaagaaagcaagctcactgcctgcacacggagattgtctttctgccacagaacagctgcaaacgtgtcaggaggttagctgagaaagaaatcgggatgctgcggagcacagagtgacttggaactccattccacctgaccctgtgtgtacaatccaggaaaacaaaccccgctcagaaacagagaaaactggggccgcgaagaactcacagccacggaagagttgatgcattcagattcttgagaaacacttgttgcttggcaacagtactggttgggttgaccagtaagtaccaaaaggctatgctgtatgaatttcagaaatggactgaaaaaatggagagcagtgtaacagacactacattggaagaactgacttctgaaaatgaagagaaaagcacccatggatcccactcctccccatctacctgttccccggctccccattgacccgctctggtagattagccagctgtcagactcacttttatttcaatccttacactttcataaactgtctgtctccatgctgttaccatagttggagatggaaaacaggagctttctccaaatccaatgaaaacatggaaaattcaaggatttacaagatgtaactctggttatttcagtcatatctgtgactcttatcatgtacagtttccagaattgtcactgtgcatccaaacgtaatgagtctaacagacactgatttcatgtgcactcccctctgcttacagtgtgcattttttggtaggtcattcaaattttccctcttctgtgattgctgtagtttcttttcatagtaaagtagctgatctgatgtaatcttttaccttttaagcagccaggatagagaacctattggagtttgcattgttgatgacaggttcacaataaagtgatgttctggtaggaggtagagtgaaatgttttttaattcagttttctcatttgatacttttaatttacaaagtgtaattttcttgtacgttttaaggtgtaaattaaaagtgctttaatttatctggcatttgggggcatgcaaaatgattctcaccagcacctttaatttcagctggtggtctgtgaggggttctgtttattttctgcatcattttatagcttactgttgagtgactagtgtagtgagtcacgatcaaggcatccttcagtttagcatttttttaccaaagtgtcttgtagttctgtttctagtcatgagctgatcacgaagttggctagatgtatttcttttgatattggtggtgagttttttgaggtgtgagatttttgtgtgaaactgataggtcttgatctactttctaagatcactgattcagagatcaaatcccaagttcagggtgagagttataatacaaaggaaaaactccctttactttgcccttaaacacttgcctctgttacctaagcttagtagttttcttaatattgtccaatgtttggtgttatctacattgtttttggtttaattgtggttgttttgatgtgtgaaatttaaggaaagagccatttaatacatgccaagcagggcaatgcaagtacagccaaatattagagttgatgtgcagtcttaggtcctttttaatctggggtattataggcagtactttaaatcagagtcttcctggcctatttccctccacctttttgtagttactcggggcttacttgtgcagtactaaaattaaaggagctggttcttcttttctcccaattcttttcttagtaatgaacacacctaaaactagcctgcgactcctattcatacacagcagatatcagtgctgtgctgctgttagctggatttcctgcagtgcagggatggaaccttgcacatgctaggcaagtgctctaccctgagttatatacatcctagcccttacaactagcacactgaagtatctttgtttcacatgtgttcagatgagtacaaaaactaacattgttttatatcttccttgaatttataaaatgtaatttagaacctcccccaatcaagtacaaaaagcaaactgagctgagattcaaaaaagcaactgtgtagagaatccttgagaattggggcttgctggggaattctagtgctaatgttaaaaactcaaaatcagctggatgtttgaagatggtaaagatattgttctgaaacatttttccctcaaaacaagctgattaacagtggttgttttcccttttcctacgtttgattcagctcctgtttcagattactgtgttgcttatttttccagttttacatgtcctttatgtttccacctggaatgtcaggtggcaatgacatcacatttcatgtttgtttttttttttaatcccttatttaagagcaagttgagttgagctgaatccttgtcctagtaacattgtacaaatagtggctttaagttgtaatgcctcctgatggatataatttcgtgcttgtatttaagattaaaagttgaataaatcacaccagcttcctgaaaatgtccataatgcatcttttgggaaaacaaaacatgcctactttgcattaacatgataaagattgtatgaaatacctgtttttcaaaaaataaaaa

SEQ ID NO: 223 - DNA, 3282 bp, Cricetulus griseus
  modified_base (3270)..(3270): a, c, t, g, unknown or other
agcagaaccaccgaccaacaagtccctgtctagcctggttgtgcagttgctccagtttcaggaagaggtttttggcaagcatgtcagcaatgcaccccttactaaactgccgatcaaatgtttcctagatttcaaagcaggaggatccctgtgccacattctggcagctgcctacaaattcaagagtgaccagggatggcggcgttacgatttccagaatccgtctcgcatggaccgcaatgtagaaatgttcatgaccattgagaagtccttggtacagaataattgcctgtctcgacctaacattttcctgtgcccagagattgagcctaagctgctgggaaaattaaagacattgttaagaggcatcaagggaaccatcactgtcccgacggaagaagatttcagctaagacattgacagatgaggtaaacagcccggattcggaccgacgggacaagaagggagggaactataagaagaggaagcgttctccatctccttcaccaaccccagaagctaagaagaagaatgctaagaaaggaccctcaacaccttataccaagtcaaagcgaggccatagagaagaggaacaagaagacttgacgaaagacatggatgagccctctccagtcccaaatgtggaagaggtgacactccccaaaacagtcaacactacagcacggcaacaagggagcagaccaagaacccagacctgcacgaggacaacgtgactgagcagacacaccacatcatcattcccagctatgccgcctggtttgactacaacagcgttcacgccattgaacggagggctctgcctgagttcttcaacggcaagaacaagtccaagactccagagatctacctggcatatcgaaacttcatgattgacacttaccgactgaatccccaggagtatctaacatccactgcctgccggcggaacttggcgggtgatgtctgcgctatcatgagggtccatgccttcctggaacagtggggtcttattaactaccaggtagatgccgagagccggccaaccccaatggggcctccacccacttctcacttccatgtcttggcggacacaccatcagggctggtgcctcttcagcccaagaccccacagagaaaccaacagacatgcaaaactttggactgcgcacagacatgtacacaaagaagagtgtcccctccaagagcaaagctgcagccagcgccactcgggagtggacagagcaggagacgctgctgctcctagaggctctggaaatgtacaaggatgactggaacaaagtgtctgaacatgtgggaagccgcacgcaggatgagtgcatcttgcattttcttcgccttcccattgaagacccatacctggaggactcagaggcctccctaggccctctggcctaccagcccatccccttcagtcagtcgggaaaccctgttatgagcactgttgccttcctggcctctgtcgtcgatccccgagttgcctctgctgctgccaagtcagccctagaagagttctccagaatgaaggaagaggtgcccacagccctggtggaagcccatgtgcggaaagtggaagaagcggccaaggtcacaggcaaagcagaccctgcctttggtctggaaagcagcggcattgcgggaaccactgctgatgagcctgagcgcattgaggaaagcagtactgatgaggcacgggcagagggccagacatcagatgagaagaaggagcctaaggaaccacgggaaggagcgggggctgcagaggaagaagcaaaggaggaagccagtgaggctcccaagaaggatgaggagaaagggaaagaaggggacagcgagaaggagtccgagaagagcgatgcggacccaatagttgatcctgagaaagacaaggagccaaaagaaggccaggaggaagtcgtgaaggaagtggtggagtcagaaggcgaaaggaaaacgaaggtggagcgagacattggtgagggcaacctctccacagctgctgcggctgccctggccgccgctgcagtcaaagccaagcacctggctgctgttgaagagaggaagatcaagtctttggtggctctgctggtggagacccaaatgaagaaactagagatcaaactccgccattttgaggagctggagacgataatggaccgggagcgagaagcactggagtatcagcggcagcagctcctggccgaccgacaagccttccacatggagcagctgaagtacgcagagatgagggcccggcagcagcacttccagcacatgcagcagcagcagcagcagcagcagccagctctgcccccagcccagccggggctgccgggccacccacagcccatggcctagccgtggctccagcagctgtggcccctgctcctgctggcagtggggcccctcctggaagcttgggtccttctgaacagatcgggcaggcagggacaactgcagggccccagcagccacaagcagctggagccccccagcctggggcagtcccaccaggggtacccccccctggaccccatggcccctcaccgttccccaaccaacaaactcctccctcaatgatgccaggggcagtgccaggcagcgggcacccaggcgtggcggacccaggcacccccctgcctccagaccccacagctccaagcccaggcacagtcacccctgtgccacctccacagtgaggagccagccagccatctctccccctcactccctgtggagatcacagttccaggaacagccctcccccactactgggaccctccctcagcctggagagttcggcactacgtaaggaaagctcttcctgccccttcaccgcccccaccatgcccagcagaggtgtgcagttttatatccagttcttatccacggacttctgactaaaagatgtttctaatgcctgggagggaggataggatggaatttttttaaaggggaagggcaggttttaagaggaattaaagtttggggcaagttgtggggatggaatagggtaccaagcctgtctccccgagccccttggtagtactgagtcagccccttacccattccagttcacgctaacccctcctgctgcttcgtcattgttgctgttttaggccaccccagctcagccaatgacctttccctctgaatgtcagctttgtgtttgtttttaaaaagtcacctgcttattttcttgttctttttttgttaaaaataattaaattctgcaaaaccaaaaaaaaaaanaaaaaaaaaaaa

SEQ ID NO: 224 - DNA, 3279 bp, Cricetulus griseus
  modified_base (758)..(758): a, c, t, g, unknown or other
cttttggatggagagcagaaatccgagactgctgagctcatgaaggagaaggagattctggatcaatctaaaccggaaaatacaacagaactagaaagaacatcgtaggtgaaaagacgaaggagaaggtaaagcttgatgctgagagggaaaagctagagaggcttcaggagctttactccgagcagaagacccggctggacaattgtcctgagtccatgagggagcagttacagcaacaactcaagagggatgctgacctgttggatgtcgagagcaaacactttgaagacttggaattccagcagcttgagcacgagagccgtcttgatgaggaaaaggagaacttgactcaacagctcctgagggaggtggcggagtatcaacggaacattgtcgctaggaaggaaaaaatttctgcattgaaaaagcaagccagtcacattgttcagcaggctcagagggaacaagaccacttcgtgaaagaaaagaacaatctaataacgatgctccaaaagagaaaaggagaatctttgccatttggaaaagaagtactccagcctcactggggggaaaggatttcctattaaccccaatactctgaaagagggagtcatgtgacaattccacgaatctatccccttccactcagttccctgctgacgctgatgctgctgtcactgagcctgccttggctgtgccggtgagccagccccagagttcagagcactttagaagtctggaagaaaggaaaaacngcacaaagaaggtctctatctgagtgacactttgcctcgaaagaaaaccacaccttccgtctccccacacttcagcagtgccaccacagggagaagcagcaccccgaaggctcacctgcctctggggcagagcaacagctgtggcagtgtgcttccccactctctggcaaccatgaccaaggactcagaatctcggaggatgctcagaggttataatcaccaacagatgagtgaaggacagagacagaaacctgaattttacaaccgcacagcatctgagtcaaatgtctacttgaatagtttccattacccagatcacagctacaaggaccaggcctatgacacgctgagcctggacagctcagatagcatggacaccagcatttctgcttgttcaccagacaatatctctagtgccagcacatctaatattgccagaatagaagaaatggagagactcttgaaacaggctcatgccgagaagacccggctactggaatccagggaacgggaaatggaagccaaaaaacgagctctggaggaagaaaaacgacgccgggaaatcctagaaaaacgactgcaagaagaaaccagccagaggcagaagctaatagaaaaagaagtgaaaataagagagaaacaaagggcacaggctcgtcctctgactcgatatctacctgtccggaaggaagactttgatttgcggagtcacgtggagacggcgggccacaatattgacacctgttttcatgtgtcaatcacagagaagacctgccgaggataccttatcaaaatgggtggaaaaattaagacatggaagaaacgctggtttgtttttgatcggaataagcggacattttcttactatgcagacaaacatgaggctaaattaaaaggagtgatatactttcaagccatcgaagaagtgtattacgatcacctcaagaatgctaataagagccctaaccccctactcacatttagtgtgaagacgcatgacagaatctattacatggtggccccttctccagaggccatgcggatctggatggatgtgatagtgactggagcagagggatatacgcacttcctgttgtaacgaacttcggcaatggtccacttcagggcagactgcaatagtctcttgcaagaatgaagccatatccagcctcagatggaaaggcacaatagaccatccctttaactgtgtacactcagaattcttttcatactggcaaaacactattttgataaaagcatcatttagatgtgcatttctcataaactcttttatcagttgatgttggttaaataaactgaacagtttacacaatgtctgtaaatatgtacttagaatgaaattgttttagcacccaaatcattgccaatggtaatcaactgccttctttgtaggaagtagcattttataaaaataagcaaataatgacatagaaggcaacagatttttgacattttgccttagtttttaaatactgcccgaaaaccaaagacatggctggactcctcttcaacatcagtgttactctctaactacactttaaaatggtattttgatgccaaccctgtagtgtccctcaaagaagctactatgcatagatcataaaccactttcttaaaagaattaaaaacaacagaaacctgtgacatcaggtagtttttagtataggggaatatttagtgggaggagcctgttctgttgaagatttgcccattcctggtgctgagaataaaagcaaccagtagccagtttcctcccgactgcccagttcctcctgcttatgggcaaggcttttacctgtgccctcccgtggataactatgtaaccatcactgttttgctgacaaacagaacaattaaaatatcttgttttttggagacaaccaaaattcaagttaacaaactctatgctatatctttttacatatatctttacaaatagccttgtttttagagataatttttgttgaatgaaatgacttcaggcaagtctcttttataatcatttcccaagtgccatttattttagtttttgtgttttgtgtttgtaagtatgaatgaactctttcctaaaacatgccaaatggatagaagtagaaaataatgattagaaatgtccataaaactttgtcaggccttactgggtacatttttttaaaaacttacagtgtacttttatacctatgtacgtgttaccaataataagatttttgcaactggatgatgcaagattttacttgaataatgagggacaaatatcatgactgtaggaggtatttttcatctgtgatttttgcatcagtcccccttcaattctagtggtctaaaacattaaaatgtaattgcgaagatttggttggttgatgtaaagacacaacttttctgtactgtactttctccataggattgtaagggtgttctaatcaatttgcatgtctgaaccttttagatatatgtgtgttaaatgtattgagtttggattaaaatgttgacctgatttaca

SEQ ID NO: 225 - DNA, 3274 bp, Cricetulus griseus
gtgacgagtgcgagccagacgagggcgcccgggggcccggacggaggtgtgccgccgattgcggcttcctgctactgccgccgccacgccgacgcgcaccgccagaagttcctccagccaccgcctggccgagtacgtccatggcgcccaggcctggaccccgccggcccaggaggacgacgtggtccccgaagacgtcgaggccaaagaggagccgagggagaggtagagagcgaggtggggaagaagagagcgagtcggaggaagacagtgggtcggaagaagagagcgagactgaagaagacagtgaggatgagagtgatgaggagagtgaagaagacagcgaggaagagatggaggatgagcaggaaagtgaggcggaggaagacaaccaagaaggagagtctgaggcagaaggggaaactgaggcagaaagcgaatttgaccccgaaataagagatggaagcggagcgagtggccaagaggaagtgtccggaccatgggctggatttgagcacctattgccaggaagacaggcagctcatctgtgtcctgtgtccagtcattggggctcaccggggccaccagctgtccacgctagatgaggccttcgaagaactgagagatgaggagcagaaggcccttcatttagtggacatccaagaagcaatggccacagctcatgtgactgagatactggcggacatccaatctcacatggataggttgatgactcagatggcccaggccaaggaacaacttgatacctctaatgaatcagctgagccaaaggcagagggtgatgaagaaggacctagtggtgccagtgaagaagaggacacatgaagactcaacattccccgaggaaaacaccccttccccgtgtgtatgtgacagcgtgtgtgtaatggcttctgatatctgtgaaagctgcctggcaacaaacttcttccactggatatgtccccaggtccacagcagacagacatctccaagggacaacaagttttatgcatactgactgtgtgcttcttgttctcgtgtggtaggtcacaggaagagcccctttgatcagcttggaggctcttcaggcaactccccaaaggcaagagtccagagctagaaagaagatatttttagtatgtgaggttatctaggacgtcagattcataattcagtgctgtggaaatggaaaaagtgattgaagaggtaggaaggaaatgactttaaggagtgtagaggggaaaggagcaaagaaatctgattaaaagttgaaatcagtgtttcagaattcagattgcccaaattttccaaactggtcactaaagcatctgataaaatctggattcttgggctagctgtgtggattaataggcctgccacaacatagaaggctggcatgtatattgccaggtgggcatgagcaggcatgccccagagctgaatttcctggccttctcccattcctaggtcatattccttacaaccacacttttcagtgtcaaggaagcagtgatgtgctggtagatacccaaacacaagctcattcgtgtgcaccacatcttcttaagacatgagtttttcttaccaaatgatttgaagtcaggggataaccttattttttaacagaacaatcagttatgttagagaagataatgttcatgcacttaaactgtaaagataaaataggagacttggaaggtaactcttgtttgcaagtgggcagtgtgttccttctcctgcttgtgtggtattcccatgttcacattgagattctgtctgaactgtatccaagcagccttggggttgctattgacccaggtctagacttccatagatggcttagacaattttgatgctttgccatctgtctgcaaagactggagaatttaatacaccctgagttaataaactccaatgatatcctgtttttaaaaaattctaaaaggaccaaaaccattctagaaagaatgtagaaaatcagaagattgaaaagacttcagaaatttggaagcttgtattgtctttccctagtaatcattgtatccaggacagttccaagaagtgtttgacttctagctctgacagccaggaaaaggaagtaacctgaggacagtctaggagccaggctctctgtagatatgcccaaggacaagtcacttgtctgtagttgctagaaaacactggaagcagttttgaacacttctctccctgatctgcagtcagccctctgccccatacatgactcacctacagattcagagcagaaagaggctttcagttccctcagtatagtatgtccattcacattataaagtatttttcaaagacctcaagatggccttattcctctgctttagtagatgtcgtaagtacccattgttaatatctcctgcttcattgttgtagaaaagcaagtccttatgttttagtaaatccagctacaatgttttgtgctctgtgaaaaggtgccaattcaaatcactgactttggactcccttcctggtgtgtgtgtgtgtgtgtgtgtgtgtgtgtgtgtgtgtgtgtgtgtgtgtgtgtgtgtaaatgggcctgagtgtacagctgcagaatttataaccttgtattagtcagaggtctaggaagtcctatcaccccacagagaaaatgtcctgctgatttccttaacattctgctttcatataacagtgttcagtacttgcttttcagtaaattggttgcatgtttactgggggttgagcacatctagatttttggttgttgtttaaagacaaaaatcccaatctaaatcaagtccagccctgccctaagggaacaggccccagaaacaccagaaaaggggcaagagaaggaaagtcgaaacaaatgaagacatttggaggtgcactggtggagaaacagcccgagtccatgctggacttgacgtgactttgagggaccactgatgtatactttatggaagttaaacctgaccagtcttttacagtgacaggccacaatgtgtgagtgggtagaaccaacgaatccattgtcttctgcctgttttcgtgtacacagtcacattcccttcttagtcatctaccccttccaccctttacactaaacaagggaacactcaatctttcaagggaattacatatctgagttaatgtttcagtatatcattttcatactgtaaattattttgtaagagagatttactgctatcccaggatgttcggacttggcgcccctgtgcatttggaaatcaataaactattactggaaatacca

SEQ ID NO: 226 - DNA, 3268 bp, Cricetulus griseus
  modified_base (3058)..(3058): a, c, t, g, unknown or other
cggcggcgttgttcagtcagagcgagaacattccagaggtcgccaggctcggcgctgctggtgtggacgcggacgtcgctgggacagcccctcccgctgctcggcggcggcacctgcccggccgcccctccgctcgccgcccgccccgccgctccggacccggtttccagcgcctcttcctcccagtcccgggcgagccgcgttgggtttatgtctttatttgacgaaaacgagctgttgcgcagccattggtacctgtattggggaaacatagcatacaagcaagaagcttacagcctcagtggcgaaaactttttcatgtcagagaccgagaactcttgcagtcgtttatgtcatcccttcttctccagacagaagataccaaaaagttgcaatcaaagatctgttcatcttattgataaagtcactaataagccaaaatgtctgtcaacgtcaaccgcagcgtgtcagaccagttctatcgctacaagatgccccgtttgattgccaaggttgagggcaaaggaaatggaatcaagacagttatagtcaacatggttgacgttgcaaaggcgcttaatcggcctccaacgtatcccaccaaatattttggttgtgagctgggagcacagacccagtttgatgttaagaatgaccggtacattgtcaacggatctcatgaggcgaataagctgcaagacatgttggatggattcattaaaaaatttgttctttgtcctgagtgtgagaatcctgaaaccgatctgcatgtcaatccaaagaagcaaacaataggtaattcttgtaaagcctgtgggtaccgaggcatgcttgacacacatcataaactctgtacattcattctcaaaaacccacctgagaatagtgacagtggtacaggaaagaaagaaaaggaaaagaaaaatagaaagggcaaggacaaggaaaatggctccgtttccagcagtgagacaccaccacctcctccaccaaatgaagttagtcctcccccacatgctgtggaagaggaggaggatgatgactggggggaggatacaaccgaggaagctcagaggcgcagaatggatgaaatcagtgaccatgctaaagttctaacactcagcgatgatttggaaagaactatagaggagcgtgttaacatcctgtttgattttgttaagaaaaagaaagaagagggcattattgattcatctgataaagaaattgttgctgaagcagaaagactggatgtaaaagccatgggtcctcttgttttgactgaagttctctttaatgagaagataagagagcagatcaaaaaatacaggcgccatttcttaagattttgtcataacaacaaaaaggctcagcggtaccttcttcatggtttggaatgtgtggtagcaatgcatcaagctcagctgatctccaagataccacatattttgaaggagatgtatgatgcagatcttttagaagaagaggtcatcatcagctggtcagaaaaggcctctaagaaatatgtctcaaaagaacttgccaaagagattcgcgtcaaagcagaaccatttattaaatggttgaaggaagcagaggaagaatcttctggtggtgaggaagaagatgaagatgaaaatattgaggtggtatattcgaagactgccagtgtaccaaaagttgaaactgtgaagtctgacaacaaggatgacgacattgatattgatgccatttaaaggatggatgcaacttagcttaacagtataatgctgcaaatttttctccattatcagccagaagtgcaacatgtatgtgcaaaagctaaaatggcttaacatcatgctacacttgatactaaaaagctattactgtgagtggtctataattaagcccaatgagacatctagggagtccatacatatcagtgagcagttgtagtttgcttatttatagcatgtttcttttggaaaaactagtggtggacacatttggatcacatttatacagttataaaataaagatttgattttggtcattcttcagacttcgggctatgaatggcttatactgaagtaattggctacttttaggttgttacaccatttaacttagggtcattgagcctggtagattgtaggtgctgaaacatggagaatgcaaacaattataatgaccttactcagccattaagaaatggagtgttttaaaggttgtatctcagtccccatctgttttggcaactgataattcttgtcattctaagggagactgataagcaaatgacagtgtgacatcttcataagaagtaaaagtgacctgtgtgtcctatggttttaggagcaagttttgaaatttggagttgtggtttttcagtttgtgtacattcaccccaaattgtagtctttggagtcatgtgcattgcacgttggatgagccagggaaataattaacaaaaagtattttgtgtgaatttagtggttgctttgtactgagaaaagcttttgaggtatgattaaatcgtaaactcttgattctatttgggagaaacaggaaaaggtgcacttaatctctagctaaaacagcataatttttcagcttttacccttaaattataatttcaagatgtttagacatactgtatcttgtgtttgtgttctccccctttccccaatattatggtttattcttcaatgccttttaatttggatataatagcttgtactttagattttggttgctatcttgccaaaataagtgttattgtgtttcaagcttgatcccccccaattgtcttatttaaagagaaagttaaaatcatacttctgagtcagagcctgtattttggtgtaagacttgggatattttttacttcacattgaatatagctgggcacatgagaagtctggtgatggccactgggtgggtacagttgctagggcctgaccagcccgttcagagccttggactttagacacacacacatgtgaattctttacccactagctggttggagtgggagccacatacctggaatggtaacaaggggagtgtacactgtccnccaaaaagcagtgtttgcaaactcacttgacttctaggtttcaaattctttgttgcatggcccgcccgtccatttgtcatcattttctgagattgttctcaagtagatcagcacattcagcctcaggttcattgctctattgaggtgtctttaaaagtttcctgtttcaaaacagctacattacttgattaaaccaatgttaaaattaaa

SEQ ID NO: 227 - DNA, 3263 bp, Cricetulus griseus
gtggagcatcatgaagaactgcattggaaaagagctctctaagatcccaatgccggtaaactttaatgagcccttgtccatgcttcagcgccttactgaagatctggaatatcatgagctattagatcgagctgcaaaatgtgagaactctctagaacagctctgctatgttgcagccttcaccgtttcctcctattccactactgtcttccgaaccagcaagccattcaaccctcttcttggggagaccttcgaactggaccgattggaggagaatgggtatcgatccctttgtgagcaggtgagtcatcatccccctgctgctgcgcaccatgctgaatccaaaaatggctggacattgcgtcaggaaatcaaaatcaccagcaagtttcgaggcaaatacctctccatttatgcccctcggtaccatccactgcattttccatgcaactgggcaccattacacttgaaaaaagttaccacaacagtacacaacattattgtgggcaagctgtggatagatcagtctggtgagattgacatcgtaaatcacaagacaggagacaagtgtaatcttaaatttgttccttatagctacttctctcgggatgtagcaagaaaggtgacaggggaagtgacagacccatcaggaaaagttcactttgccctcctgggaacatgggatgagaaaatggattgtttcaaagttcaaccagcctctggggaaaatgggggtgatgctcgtcagagaggccacgaagcagaagaagtagggtcatgctgtggaagaggaatcctttaccgaagaatgcagaaaacatgtactacttctcagagctcgccctcactctcaacgcctgggaagggggcactgcacccacagacagccggttgcggcctgaccagagactgatggaaaatgggcgctgggatgaagcaaatgctgagaagcagcgcctagaggaaaaacagagactttccaggaaaaaaagagaagcagaagctatgaaagccacggaagatggcacaccatatgacccctataaggcactgtggtttgagcggaagaaggaccctgtcaccaaggagctaacccatgtttataggggggaatactgggaatgtaaggaaaagcaggactggggctcttgcccagacattttctgaagcggctgtaactcaaaggaagagggtggatcggagaagacggcagaggatgtgcgggaaggctggcagtgggactcttaccaagtgctttcctcaaatttgtctgtcttaaccaatcactttttccaaatcaatcaccagaagcagacacccgtggtggtgattggctggttgccttagctgattgacgctgaaatcgacgtagtagatacccatgtttgtaagggagcggtttagtggctgaaagttagtgttaccctacatctgcaaaggcaagtaagtgttcgtggtcttttctctgcccccatgtaagatgatgtcgttcactctcccttgtagtgtcctgctcagccaagatctgcgtaagattgtgattcatgagcattttggtgctgttcaaagcaagaactgattttaaagttccttaaaaagaaacacaagacttaaccagcagaggcctcatgcacaggtctcatgttaggaaatgtactcacacgtggggttggtttaatgaggcgtcgtatatagataacaaaggttttggagcatctgccggagagattgttctctagggctggagttctgagttatgttcttggagattttatcttcacttgcatacaacacccctctgctgttttctatctactttgacagcaaccagaggcctctttggtagttgataagagggccacgctatctttataaaggggttttatggtcttcctcaggtggagaacctctgagaacacaggcaggttggaagaagactgctagccacttgtaccttcccagtccttcctatcccgtctttcattgcctttctggcttctctcctggcacattaccagtttgaatttgtgtcacagtctggagccaaacattgcctgacctgttctatatacttcagaatctgagagaagtttctctgcaacacacattttcatcatcttgaaagtcccatggaatggagccacctctggaataatgtgttaaatcatctgtatattatatatatatatatacatatgtagagaaaaatcttaattttttgttttcctctttcccatgaagactcttggttttttttatatcacctgtctccctgggactctcggacgcatgttactatgggttgatgcccctctgctttccatctttgagggcattgcaacccaagcagggtcacatgtggcagttactgaacagggacaaggatgaaggtttgtgtcacggtgacccactgctgcctcagctctgctttcctgattacctggctcttggaaaggaagtcctagtctttttcccacctcagtttccttccttaggaggagtacgggtagaaagtcaggagggtgatttctagcttccttctgtcccagccagctcaggctaaatcccaaaagagttttcttccaagaatgtgagctaagagccctgtgccctgtgggaactgctgggccctggcttcctttcatcattttttctgtattaatttcagtttcctattcagaaatgtaacccttgtgcaatccacccttggttgagggtcataaattgaggtgccttccttatgtactttttgttattgtttttgtttttgttccttaactattgagcctcagccagtgtgggtccttggggaaaatatcattccagaagaagttatccctccagggaaattggattttactgggtaaattagtacttttagtccctcccccaccatctctccctccctagatcaaacatgttcaaagattgagcactggggaatttcctcctaagaaggctttcccccagtacaaggggttactccaggaggcccatgaaatgggcaccatctctggagactttggatagaacggaaatttcccacagaatcttattgctttagccccttcctctgtatctgcactacatttctagcttgattcccagatccctgctaacggaagaagcttagaagtcctgaagatggaataaagtcacatgaaagcaaaacaagactatatatatattttcagtttttttgccttattgctttttttccaaaaaaaaaactactaaattaaataatttttaaaaagctaaaa

SEQ ID NO: 228 - DNA, 3262 bp, Cricetulus griseus
attcctgaatattcctctggacctggctctccactgacaggaaatgcagccactgaagaagttagagggaatccaagagacttaagagtttctgacgctacgacatcaactctaaagttgtcttggagtggggcaccaggaaaagtgaagcagtatcttgtcacgtacacaccagcagcaggaggtgaaactcaagaggttactgtggacggagatacaaccaacacggtgttgaggcgattgaaggaagggacacaatacgacttatctgtgacagcactgtatgcatctggggctggagaagccctttctggtaaaaggaacaacacttgaagaacgtggttacaccccaaaatctagttacaaaagatatcacggacacttctattgggcctattggacatctgctccagatggttcgtgggtacaggagtctcatggaagtcactttatgatgatattgaggctggagagatcatactattgtattagagaatctacagccagagacaaagtacaaaatttcagtttttgcaacttacagcagcggagaaggagagcccgtgactggagatgccacaaccgaattatcccaagattctaaaaccttaaaagtggatgaagaaaccgaacacacgatgagagttacgtggaaaccagcaccagggaaagttgtcaactaccgtgttgtgtatcgccctcaagggggagggagacaaatggtcgctaaggtgccacccacagtcacttcaacagtgctaaagagacttcaacccaagaccacatacgacattacagttctcccgatgtataagacaggagaaggaaagctgaggcaaggatcagggacaacagcttctagatttaagtcaccaagaaacctcaaaacttccgatccaacaatgtcaagtttccgagtgacttgggagcctgcccctggggaagtgaaaggttacaaagtcacgttccatcctactggtgatgacagaagactaggggagttggtccttggaccatatgacaacactgttgtcttggaggagcttagggcaggcaccacctatagagtcaatgttttgggatgtttgatggaggagaaagtttaccacttgttgggcaagaaatgacaaccctttctgacacaactgtgacaccatttttatcctctgcagatgctgtgacattccctctaggagagatgaagcaaaatgccctgctcttccgaatgcttgcacatgtacacaggacagcgttggacctccaggccctccaggccctgcaggaggacctggtgcaaaaggtcccagaggtgaaagaggcatcaatggtgcagttgggcctccaggtccccgtggagatacaggccctccaggccctcagggtcctccaggccccccagggacccaatggactctccattccaggagaacagggtcgccaggggatgaaaggtgatgcgggagagccagggcttcccggccggacaggaaccccaggattgcctggccccccagggaccaatgggaccaccaggagacagaggtttcactggcaaagatggtgcaatgggacctagaggcccaggctctccaggagtcacagggccaagtgggaaaccaggaaaacctggagaccacggcagaccaggtcaatctgggttaaaaggagaaaaaggtgataggggagacattgcttctcagaacatgatgcgagcagttgcaagacaagtctgcgaacagctaataagtggtcaaatgagcagattcaatcagatgctgaatcagattccaaatgactaccactcaaatcgcaaccaacctggcccaccagggcccccagggccccctggcctggtgacagctcctttccacctgagttcagtttctagacaccagtactcttcatgtgctcagctctctgagctgttctttgacgtgaggagtttgaagtcatgaacagttatttagggatttgccagaaatcctacctaagtgacagttgtttacagttctcggcccaatttctgatccttcccaggttttgtccattgattgtatttgctgctggggctttgaaccaaattctctccgcacatgtgcacatggaaataaattgaaccactgtaacacatctatttatggttgtgagattaagactggagtgccgtcacctcaggtgacgacttaacctttgctgtgcatatgtaccttccaagtcatgccataactgtaatgttgaatcggacagagccttatgtgcccgagggtggggcgtacctgcctgatcgtgagcccttcatcgtgcctgtggagcctgagaggacagcagaatacgaggaggactacggtgcagacgagcctgaacgggagcaccctgaccacatgcgttggcggcgcgccctgcgcccaggccctgggcagtgaacctgagacggcagggtcatcgaggtgggaggtgctgggattctcattcacaggtcaggcagggcagcatacatcttttatgtgatgttttctccgcgttgcttcatccacaaatactcttttctgactgtagggaaccttgtttctccaggcagcctagctcgcaccagtctgtagacatccacaccgttgctgttcaaacgcttgcaacaacacatgctgttcacagaagctgcaaggagagaacacgcccagggtgggctgtggcagccaaacttctaggttaaacagaaagccctggaaatcagagcagctatgtattcggaaagagccttaatatttcctactactaatctgcgatccaatcacatcccatttccagtaatttctctcctaaaatcaaaatggaggggagcaccagctcacttcagtgtttcccccctttttccttcctcctgttatgcattagggcgcagaatctcaagtttcttaacaaccacagaccttctgccacgtagctgaagttgttgtatcagctggatactgttccatatcgccatagacgtccttgttttgacacactaacatttatgccaaattgcagataattctgcagaaatggaattgcatgtttgtgttgtatatttagaattaactttttttttttttttttgcaaaacatgtttcttagttatcaaagcagttggaaatgtcttcaagactatgaacatagaattgctgcttttatattttaactgcagattgtgaatttcactgccttatattatttatttctgaaacaaaagaggcatttttcaataaaactactgaaaatttga

SEQ ID NO: 229 - DNA, 3255 bp, Cricetulus griseus
ttccagatttgctaaccgtttccttctccagtatggtgatactgtgactccacatgaggaactcgtctggatgcctggcgtcagtgactgtgacctcctcatgtacttgagggcagcaaggagcatggcagcatttgcaggcatgtgtgatggcggctcgacagaggacggctggtgtcgcagcatctcgggacgacaccactctcaacgcactgaacacactacatgaaagcagttacgatgctggcaaagccctgcagcgcctggtaaagaagcctgtgcccaagctgatcgagaagtgctggacagaggatgaagtgtggagaactgaggagccagggagccctcctccgtggacacccccagtcatgctagccagtccgccaggttctacaaacacctggaccgtggctacaactcgtgtgcacgaacagacctgtacttcatgcctctggctggatccaagctagccaagaagagggaggaggccattgagaaggccaaacgcgaggctgaacagaaggcccgggaagaacgggaacgggagaaagagaaggagaaagagcgagagcgggagagagagcgggaacgggaggcagagcgagctgctaaaggcatccagctcagcacatgaaggccgccttagtgaccctcaactcagtggtcctggccacatgcgaccctccttcgagctgagcgcatggcgtctctcaccggcgaccccctggcccggctgcagatgttcaacgtcactccgcaccaccaccagcactcccacatccactcccacctccacctccaccagcaggaccctctccaccaaggttcagcaggcccagttcaccccttggtggaccccctgactgctggtcctcacttggcgcgctttccttaccctcctggcaccctccccaaccctctacttggacagccccccccatgagcacgagatgctgcgccacccagttttcggcactccctatccccgagacctgcctggggctatcccaccccccatgtcagcagcccaccagcttcaggccatgcatgcccagtcagccgagctacagagactggccatggagcagcagtggctgcatggacacccacacatgcacggtggccacctgccaagtcaggaagactattacagtcgactgaagaaagaaggtgacaagcagttataagttatttatttgttaatgctggctgtggaaaccccagttctagggggcagaaacgggactttacatccagtaggagctgcaagagcaaagaggaatatcgtctaaagatttctctatatatttaaaacccacaactaaaaacacatctgcataatagtgttcgtttgttgagaggatttcccgagacctatttgggtctccctgcatgacagtcccccagaaacgtggtgtgtcttgggttggactgacccctagaaagcttacctgcagtcttggggtttggctttggttcttttccttgatttcccagtaggtgctagagtccgcccacactcttcactgtgcgcgcagacgctgaggcacgcgggctctggaaccgtgaggtttgcagagaggcggcataggagtttgaaatccaagagctataatttttaaaaaatcttttattttaatacattgtagggaatcttcataatttgagacagttctgcagcatggctttttacatctgtaaataaatagttttagaagccttttctttccttccacagacgactattctgatctattttttccagccatgtcacaaagtgtgaattcctaccagctattgacagaatacagagttgattttttaataaaaagttatatataattatccctttaattaaagggaacagatgggcgtttctagtttcaagcaggcaggagcttgggactaggtttggtcaaagcagtgagcatccaggggttggcagggacagtgttacaggctctttattttgctgctttgctttcacttctgtctgtctgtccctcgcatgtgcagtggcaggcatgtttgagcaagcctccttccttattcataggagttgagtgttgacgttgtgttccctggtgtccccatcgtcctgtctttggtatggaaagcgcatgtttacctgtctgtgtctgatgacaagtttccttagagttttatgcacatgtttgatgttgtagataaattgtcataaacagtttaggaaattcaagaactgatgcagtacacagcacgtgcaagacccaggacatgtgctgccaaaggaacatttagagacctgtcagtgtgcgtgtcaccaagccatgcctgccagaggtgtgtcctggccctgtggagagaagtggctcactgctcacctggcattcactctgcccctggctctgactcaggtgcagcaggcctcatgctccctgaaccatgcatggagcagctaggatccatttgtctgttgaaaatgtttgtagggtttttgttttggtttgaactttaattttctcattccttctgccttaactttggttcttcataggaggcaagctcaaattaaccttttattatcaaacttctggccacctcggcatgaaggcatttgttttcttctgggggtggtgacatgctttccagatggtctgccctgccctctggactgaggaaggcctcttcctcatgagctctggccaggcaggttctttctgtcccctgccaccacctccttctccccttgtaactgagtctgccgttcagttaagcctttatcccctctcgagtacccattttccaaagagaacgagtgaagtactttgaagtctgaacttgaaatctgtccggaagtgtttctttgttagttttgggtttctcccctgtcccaaggtgaagcgctgagttcatgtcctccgtgactggctagtttgttcggaggccctggaccttcatggcatctttgaagcccgctgcttggcttccttttggattttccttcctttcgtttgaagtttggtttgctttctgtgttctgtatgtatcttgttcagtgtcgtccgtctccctgcagtggagcgagcggacattgtgatcgctgcgtttctttaggtctcagagctaagtgtatatatgagtagtttgccatgagataacacagtgtaaacagtagacacccagaaaatcgtgacttctgtgttctctccatttgagtattttgtaatttttttgaaatatttgtgaacataaataaaaccaagctacactaca

SEQ ID NO: 230 - DNA, 3253 bp, Cricetulus griseus
gaatcgagccagtcggaagatgattctgggtcggcatcaggctctggatctggctcaagttctggcagcagcagtggtggaagtagcagccagtctgggagcagtgactctgactctgggtctgactcaggaagtcagtcagagtctgaatcagatacatccagagagaacaaagttcaagcaaaaccaccaaaagttgatggagccgagttttggaaatctaaccccagtattctggctgttcagcgatctgcaatccttaagaagcagccacagcagccgcagcaggtgcacgcggcttcatctaacagtggatcagaagaggactcctccagcagtgaagactcggacgactcctccagtgaggtcaagaggaaaaagcataatgaccaagggcagtacctcaggctttttgaacattatgatggagctaaagaaatgttgtaaccattgctacctcattaaaccaccagataataatgaattctataataaacaggaggccttacaacacttaatccgtagtagcggaaaattaattcttctagacaagctgttaattcgcctaagagaaagaggcaaccgagtactcattttttctcagatggtgcggatgttagatatacttgcagaatatttgaagtatcgtcaattcccctttcaaagattagatggatccataaaaggggagctgaggaaacaagcactagatcattttaatgctgagggatcagaggatttctgctttttgctttctacaagagctgggggtttaggcattaacctagcctctgctgacactgttgttatatttgattctgattggaatccacaaaatgatcttcaggctcaagcaagagctcatcgaattgggcagaagaaacaggtgggatatagatgaaatacttgaagagagctgaaactcacgaaaatgagccaggtcctctgacagtaggcgatgagctgctttcccagtttaaggttgccaacttttcaaatatggatgaagatgacattgaattggaaccggaaagaaattcaaagaactgggaggaaatcattccagaagatcaaagaagacgattagaagaggaagaaagacaaaaggaacttgaagaaatttatatgctcccaagaatgagaaactgtgcaaagcagataagtttcaatgggaatgaagggaggcggagtagaagcaggcggtactctggctctgatagtgactcaatctcggaaaggaaacgaccaaagaaacgtgggagaccacgtaccatccctcgagagaatattaaaggatttagtgatgcagaaattaggcggtgaaagagaacaactggaacatactagacagtgttaatcaagattggagaccatatcacagaaatgtctgaaggagtattccaaccctgagcaaattaagcagtggagaaaaaacctgtggatttttgtatctaagtttactgagtttgatgcaagaaaattgcataaattatataagcacgctaattaaaaaacgacaagaatctcagcaaaacagtgaccagaacagcagcatcactactcatgtgataagaaatccggatatggaaaggttaaaagagaacacaaatcatgacgatagcagcagggacggagcgtattcttctgatagacacttatctcagtaccatgaccatcataaagaccgccaccagggagactgctataaaaaaagtgactccaggaaaagaccctactcttcattgagcaatggcaaggaccatcgtgagtgggatcactataagcaggacagcaggtactatagtgacagagagaaacacagaaaactggatgaccacaggagtcgagagcataggtcaagtttggaagggagcttaaaggacaggtgccactctgaccatcggtctcactcggaccatcgactgcattcagaccatcgatcaagttctgaatacacacatcataaatcttccagggattatcggtttctttctgactggcaaatggaccaccgagctgccagcactggccctcgctcacctttagatcagaggtctccttatggctccaggtctccgtttgaacactcagttgaacacaaaagtacacctgagcacacctggagtagccggtaaaacataaacagaagctgataatttatttgtctgtctggacttgggttttagccatagatcataaaccaacacagtaattgccttacatgacttgaaagatgcaaacagttcttctatcagtagcagtattgttacttctttccaggacgcaaggtctattatcccaacagaagagagaatatttttatatttaaggattatgctgcactgtactgctaatactgcagttactttttttttctttttttaaagtaaatggaaatgtttactataacagggacctcaacactgccctcccgtataggctgaataaaactgtttttatgtcagtgatttttcgactgactccatttaaattatgtttgtatatgaactttactctgacctgtgatcatgtttcaggaaggaatgaaagagagctctttttcttaatgaagaaaaaacactcaagaactttgttcactttccaaagctccttgtttacatcgtacactgcgaccaccttgccgcttcccgtcacaagcttgaatatttaaatcctgtacttatgtctgtaatatagccgggaatttcctgtttgtgattattattcttttgactgttcctttccctaccaactcaggccttcttattaaaaaaaaaaatgtcttgatggaatcattgtttagaatgtaaaaatggggaaaggggccacttctttcttttagtcctctttttatattgaatatttttattagatacatgttttatccctccttttggaagtcaatattatgtttgtagttttacaaaagaactggtgagggtaatatgtgaattataaacttcatgctctgggaacttctgtcagacacatttggtttaaaagggtaggtggatgaacactttcagaatccaaaatggccaaaagttattgtaaatccatttgttttcccttttcatgtgggcaataatgtcaaatgtgctatgcagccaggttaacattttagatgaatttgattaacttttaatataaactgttacagtgcacactgattgtacataaaaaccttatatatgacaaattaaatttaagaaaaaggatatgtgggctcctgtagttttctgctccattcttg

SEQ ID NO: 231 - DNA, 3253 bp, Cricetulus griseus
acacacacacacacacacacacacacacacacacacacaatcccgggaactgatattatcgatcagtgttgtgacctaggctaccacgctagcctgaaccgggccctgcgtactttcttgtctgctgaattaaatctggagcaatcaaagcatgagggtctggatgctattgaaaatgcagtagaaaacctagatgccaccagtgacaagcagcgactcatggagatgtacaacaatgttttctgccccctatgaaatttgaattccagccccacatgggagatatggcctctcagctctgtgcccagcagccagtccagagtgagctagtgcagagatgccaacaactgcagtctcgcttatccactttgaagattgagaatgaagaggtgaaaaagacaatggaggctaccctgcagaccattcaagacatcgtgactgttgaggattttgatgtgtctgactgcttccagtacagcaattctatggagtctgtaaagtcaacagtctcagaaactttcatgagcaagcccagcattgctaagaggagagctaaccagcaagagacggaacaattttatttcacgaaaatgaaggagtacttggagggtaggaacctaatcaccaagttacaagcgaagcatgacctcctgcagaaaaccctgggagaaagtcagaggacagactgtagtcttgccaggcgtagctcaaccgtgaggaaacaggattccagccaggcaattcctctggtggtagaaagctgcatccggtttattagcagacatggcctgcaacatgaaggaattttccgagtgtctggatcacaagtggaagtgaatgacataaaaaacgcctttgagagaggagaggaccctctggctggggaccagaatgaccatgacatggactccatagctggtgtcctcaagctttacttccgggggctggaacacccactgttccccaaggacatcttccatgacttgatttcctgtgtcacaatggacaacctgcaagagagagctgtgcatatccggaaagtccttctggtcctgcccaaacccactctgattatcatgagatacctctttgccttccttaatcacttatcacagttcagtgaagagaacatgatggacccctacaaccttgccatctgcttcgggccctcactgatgtcagtgccagagggccacgaccaggtgtcctgtcaagcccacgtgaatgagctgattaaaaccatcatcatccaacatgagaacattttccccagtcccagggagctggagggtcccatctacagcagaggaggaagcatggaggattactgtgacagcactcatggagagactacctctgctgaagactgtgcccaggatgtgacagcagagcaccacacgagtgatgacgaatgtgagcccattgaggccatcgccaagtttgactacgtaggcaggacagccagggagctgtctttcaagaagggagcatccctgctgctctaccagcgagcttctgacgattggtgggaaggccggcacaatggcatagacggactcatcccccatcagtacatcgtcgtccaggacaccgaggacggtgtcgtggagaggtccagccccaagtctgagattgaggtcatgtctgagccacctgaagaaaaggtgacagccagaacaggggccagctgtcccagtgggggtcatgtagctgatatttatcttgcaaacatcaacaagctccgttctgtagaagaacatcccggtcttaataaggagcttttaaagtttttctgaacttacagacttttcttcagttcccgtctttgtctcttgaccaccattttccatttcagatattttccaatattagacaattttatagctagttccttttagagtaaaagtcttaacattttattatgtttatggcaggtttgaaaggggtaggaaatgggtccttcttccttccaccttttttggtattcaaaacttcttaaatttattctattaaaaaaaataagttgctctctgccaatccaaaaattgttcccagattaaaactatttcaagtttacctcttggcttagttttttattaaggctctctggagatggacaggggcttggaaagccctcattcaattctagagaccctgccttttgagactgtgtttgtttatccaaataaggtcaactaagggaactttgactcccacatactcaaaattatctccccaaagccagaatctttaaaaagtaaaatactgaatgcttcatattgggcctgccattggcctttacattcctcttaatctaagtgatagaagtttccagcctgccctttatcctctctccaggacattaccctctaagaagctaaaagcaaagcttcttaaagagcatactgtgggtctgttcttttgttcttgccttctctttcattcctgtacattatttgtgtttgtcatccccttggtcgatgtccatctgctgatttgcataatgaactggacagtgtacaagtggttccctcctaaccccagctctgggagcctcgctgtcttccttatctctggtgcttctgacgcctgtgagatggtcctgttaaaaggagtaggaaccaataggaggcaagtcctcctcggcagagctcacttcaactggaattgaggttgcacactgtgattttacaccccaaagccaaaaggagctggccaccccaggccttaggcaactagccttcctcagataggcttgcccgaaaccagcatgatgcttccaagagccctgctctgcccctcgtggcatggatcctttccctggtgtggactcagtctttggggaagaaaagtggggtggagctaccagcatcccagttcggaaaatagaggaatttgccaccagcagcttaaaaactggaaatgctggtctctgccagcctcctcaggccacccttgtttgtccccatggagatgagaaatccctccaggatgaacagaccactggaagggctggtgtgcatggacttcgcttcagaagagaacttagatcttccagggaactgcaatgttgtggcgtctgatttgtatgtcacatttgtgtaaaatggtatgttctttaaaatggtgttgataactggaatattgtatgtatgcttgaagatgctttgtgtgaacctaagactcactcagccgatgttggattggggaaaatccaaagcacaacttcaaaataaaatatgtttttaggttt

SEQ ID NO: 232 - DNA, 3247 bp, Cricetulus griseus
  modified_base (1893)..(1893): a, c, t, g, unknown or other
ggctcctggtgctgaaggacctgggcatccaagtggaccgctacattgcctcagaggtgtgtgaggactccatcacggtgggcatggtgcggcaccagggaaagatcatgtacgtcggggacgtccgcagcgtcacacagaagcatatccaggagtggggcccattcgatctggtgattgggggcagtccctgcaatgacctctccatcgtcaaccctgcccgaaagggactttacgagggtactggccggctcttctttgagttctaccgcctcctgcatgatgctcgacctaaggagggagatgaccgccccttctctggctctttgagaatgtggtggccatgggcgttagtgacaagagggacatctcacgatttcttgagtccaaccccgtgatgattgacgccaaaggcaagagtgtctggaacatggcagaatagccaagttcagcaaagtaaggaccatcaccaccaggtcaaattccataaagcaaggcaaagaccagcatttccccgtcttcatgagggtgtttggcttccctgtccactacacagacgtctcaaacatgagccgcttggcgaggcagagactgctgggccgatcgtggagcgtgccagtcatccgccacctcttcgctccgctgaaggaatattttgcttgtgtgtaagggacatgggggcaaactgaagtaatgatgataacaaagttaaacaaacaaacaaaacacaaaacataataaaacaccaagaacgagaggacggagagaagtatcagcacccagaagagaaaaggaatttaaaacaaaccacagaggaggaaatgccggagggcgtggccttgcaaaagggttggacatcatctcctgagttttcaatgttaatcttcagtcctatttaaaaagcaaaataggcccctccccttcttcccctcctcttcctaggaggtgaaccttttgttttctactctttttcagaggggttttctgtttgtttgggtttttgtttcttgctgtgactgacaaacaagagggttatagcagcaaaatcagtaacaacagaaagtagtaataccttggacaggaaagggagagagggaaaattctataaaaatttatatatttttttttttttttttattctatatttctctttggttgtctctagcctgatcagataggagcacaaacaagaacagagtagagaccctcgggaggcagagcccctcccagccctgagcagtctcaacagcaccattcctggtcatgcaaaacagaacccaactagcagcagggcgctgagaacaccacaccagaccgaccttttctacagtatttcaggtgcctaccatataggaaaccttgaagaaaaccagtttctagaagccgctgttacctcttgtttacagtttatatatatatgatagctatgagatatatatataaaggtactgttaactactgtacaacccgacttcataatggtgcttccaacagcgagatgagtaaaaacatcagcttccgcctggccttctgtgcaaagggtttccgccaggcctgggggagggaggcagctcgagggcccccgccccatgcccagcttctccctgtccaaaaggggtcaagctgaggcgttcggacctggggaagctgagtgtggactttatccagactcgtgcaataattacctttgaatataatctaaaatgactgccttggtgagatggcatgagaaaactttcccctgattttgaatttgtcagccacattgaaggctcctcgtgggatcagaaagaatccagagtgagggaaagtgatctgccattaaccccacctagagcaaataaaaaacatacaaaatgtactggtgactttctgtctaagttgccttttgtntgttctttatgaggccccccatcatcccctctgcaccaaggcagctctggtcctggaatgtgatgatgtataagaagtatacacagtgggggttggagggaatgggctctgtgttgagcctgggtccctcccacagacagccccacaccagtcagtcagtctaacacatgcacaggaacctgtttctgtctggatgcacaccagggagctcccggcacacttctccctaggatcaggacactggagttggcccgttcagctcttacacctctgttgccctgatgacaggtagactcgatcccgaagttgctaggtgctgaagtcaggaagaggaggtttgatccaagcaggtgcttcctctagcaggtctgtgttctatcccttttgctcctggtgatgtcaaagattccttctgttagcctgtggttactgacctgcaactctaggcaccagtcaagtcagcctttaacaacccccctacctattctccccaaccaaaataaaattgaaatctgtcttggccactgggcttccattagggaaaaaaaaaattgttggtttctatattcttactacaccgtatgtccagagagtagaagtgaatccccagccctgttcagatgcatgcaaagcttttatggcactacagggtcttcaggaactgtcactgtaggagccctggctatggcccagggccacgtgaccagcccagctgagtttccaagcaggcccgtgtttaggtctgagtctagcacttgactgctcgaaatgcttgtgatgaggtggtggcactgggttgtcccacttggcacctgaggacatgagcagtggctaagtctcacctagtcccattttacagactaatttgattgcccagccctagaattctatagaaacaacaacaacaaaagctgaaattccttagaatatgcagagggaggaggtgactcaacaaggtgctaaacacattttattaaaaatatatattgttaaattaagtctgctgtctggacaatgatgttttgttttgttttcttgtagtggagtttaaaagagactattattttactctgatatattattattaaaaaggcattttaactttgtacttgaaaactaagtgagcgatttcacgtgttttagctgaggcatcgaagtagcgggtgctttctcgtgggaagtcatgtattcatactgcaaagtaaactccgtagctgatttggtaataacgtttactgttacaggcgatttcactttgaccccggtggcttttactccacattccacgcagctaaatgcaggaccttccagattcttcctcccttggccctctttctttttggttcctcttcct

SEQ ID NO: 233 - DNA, 3243 bp, Cricetulus griseus
  modified_base (416)..(416): a, c, t, g, unknown or other
  modified_base (1671)..(1671): a, c, t, g, unknown or other
agaaaatggaaagaccgttgtttaccttgtggctttccgatctgttctttgttatgtttgtatggtcctattggatgacaatattcacatctcccgctagcccctccaaagagttctacttgtcaaactctgaaaaagaacgttatgagaaggagttcagccaagaaagacagcaagacattttgagaagagccgccagagacttgcctatctataccacatcggcttcaagagctatccgatactgtgaaaaatgtcagttgattaaacctgatcgggctcatcactgctctgcgtgtgacagatgtgttcttaagatggatcatcactgtccatgggtgaataactgtgtcggatttactaattacaaattcttcatgctgtttttgtgtattccctactatattgccttttgnggctgcaaccaaattccacgtacttttccttttctttgtgtctgcaatgttcttcgtcagtgtgctctcactatttagctaccattgctggctagttggaaaaaacagaacaacaatagagtctttccgtgcacctatgttttcttatggaatagatggaaatggtttttctcttggatgtagtaaaaattggagacaagtctttggtgatgaaaagaaatactggctagttccagtattttcaagcttgggtgatggctgcagttttccaacacgccttgtggggatggatccagaacaagcttctgttgcaaaccagaatgactatgccagaagtactggctcaaatcaaccttttcctatcaaaccacttagtgaatcaaaaaaccgtttgttggacagtgaatctcagtggctagagaatggagctgaagagggagtcaccagatcagggtatataaaacacattttggactattttcagttttattttgtcaagaaaaatgatcggtggaatgaaataattgaagtataacagaagatatatttttaaaaggaagagtttgtacagtttgctggatccacagaagcactatggagcagaaagatgccttaatttttagtgtccatttgtgcagcattgcctcacacctcaaaagtgacttaattttcctttggaaataacacctgtcttgagatgctatcctcacatgttaacatggcatttgtatttctaacaactgagttaaaaacaatagttatttctagtatccacatagatttttcaccccaaaaacaaactaaaaagttcaacatttttaataaagttttttttattattggttatgaaataacactcagaaggattcagatacctaaatataataatttagaacattgaagatgttgatataattcagtgaagttttagttagaagcattaggtgtagtgtgtgcccaaggctcagaagaaacatggtagtaaaagaggtattttgggtactctccgctctttgattactatttcttgaattttcaggggaatttatatgggcatggaagcacagaagttcacgagctatacacggatccaacacagtatgatgaataggtggaagtggactaaaaaaaaagtggtggctcatgtctttactcaaagcactcagggagcagaggcaggtgggtctctgtagtccaggccagcatggtctacagagtgagttccaggacagtcaaggctacacagtgaaacccngtcttgaaaaacaagaaaggaaggaaggaagaaaggaaggaaagaaggaagtaaggaaggaaaagaaagaaaatcaattaccaaccaaaaatacaacctcaatttggtagtttgcatgctgcttttagaagtaacccagtctttctgtttctgtctttagatcaagggatttgcatgcacctagcacagtttgcccccttaacatgctatcatgtagaagtatcatcttactgagttgttatcatttgtttattagcatagtaaactttttaggttttggctttggtagcctttatagccatctattttttttttccaatctaaaatatttacctggttcttgttttgttttgtttttgtgtttagtactggggaatcaaagacccagggccttgtgcatagtaggcaagtcctttaccactgagtatttcaactggcattgagtctactgtctgctggggagaccaggtcaaaattaagctttgccaaaatttcaaacacttgaacatttgtaaaaaattaaataaaataaagttgaatttcaggtcttgcccttgccattaaaaacatcagacaggagacttggtttgctgggtacagaggtacctgacattcagtacctgtggcacctggccactgtcactgtgccaaccaaagcagctgcagtacaccagctattgaaatgaacatgtttacaaagttgagttttctcctcacataagaatgattttttaaaaactttttacatagttatgattcaatgtcttatgagcataacaggtcagcttacataaatatatggtgttttacttgaattttaattcttagagaaagcagattttgactgtttacaggaatgcttgagatgagtcgtgagccctcccgttctctctgaatcaaacctatattaagggcttagtgttagagcctgtgtatttggggcattgaagaggcagtaactcagaaatatgcttagcttacatctcgttctataaaccagtacttctgtccatggatgagtatttttaactaatctgatattaaatcatatttttgcaattcagtcaaattaacaagaacatatgtaaaagtacagataagatataaatctgtaattcatatttcatatgatctaagctgtatttttaaatttaaaatacaatagagattcagaaaggcccgtatttttctaatgacttcaccctatgttatgttattgggttacataaagcaaggaatcatatttgtattaaggggctaggaaagctgttagtttattatatttgtacatgattgcagacaagcctatgcctgtttaaaagaaaagatggatactatttaaggttatatttaatatgcttttctataaacaagtttgaaatatagtttaccttagttgtctttacctatcaagtagcttagccttgtatttatttctcatttgtgtgaacctgaacctggaccatgactttgctctgtactttggatggcctaacctacattaatatgtgcacattttacaacttttttttcagaaatcataattactttattaataaacagataaagata

SEQ ID NO: 234 - DNA, 3240 bp, Cricetulus griseus
ctttgaggaagaaatggacaccagaccaaaggtgtcgtctctcctcaaccgcatggccaactatactaacttgacacagggagcaaaggaacatgaagaggcagagaacatcactgagggaaaaagaagcctaccaagagcccccaaatgggtactttcatgggtgtctacctcccatgtctacaaaatattttggagtgatcctctttcttcgtcttacctgggtagtgggcacagctggagtccttcaagcctttgcaattgtccttatctgctgctgctgtgcagagcagaccattaagcacctaatggaggcagaaaaggtaaaaggattctgccagctggtggtggctgccaagctgaaagagggcatttcacacctcatccagtcctgtggccttgggggcatgaagcacaacacagtggtgatgggctggcccaacggctggcgtcagagtgaagatgctcgcgcttggaagacttttcattggcacagttcgagtgacaactgctgcccatctagccctgctggtggctaaaaatgtctccttctttcccagcaatgtggagcaattttctgagggcaacattgatgtgtggtggattgtgcatgatgggggcatgctcatgctattaccattcctactgaaacagcacaaggtatggcgaaagtgcagcataaggatcttcacagtggcccaactggaagacaacagtatccagatgaagaaggacctggccaccttcctgtaccatctgcgcattgaggctgaagtggaagtggtggagatgcatgacagtgacatatctgcctatacatatgagcgcaccctgatgatggagcagaggtctcagatgatgacttggaccaaggataaatacatggcatccccgggggcaaagggtcaagtcaatggaaggattccaggacctacttaatatgcgtccggaccagtccaatgtgagacggatgcatacagcagtgaagctcaatgaagtcatagttaacaagtcccatgaagcaaaactagttttgttgaatatgccaggaccaccccgaaaccctgaaggtgatgaaaactacatggaatttctagaagtcctcaccgagggattagagcgagtcctccttgtccgaggtggtggcagcgaagtgatcaccatttactcttagtcagcttgtggaagattctgcttggtcttactttccctaaaagactcatcatccaaggagatgacagctctttcctaccactctattcttgcggagctgagccccaactatgctcttggctgcaacatgatctgccatcccagcagaagcaaatactctctcaacatcagaatggtcaagtcctaaaagctatttctatggcagcagaaggcaagtcaaaattaacaagctaagccaaagggaaccttttggcactgctgaaggtagtgagttagtaacatatgatagaaatttaactaaaaacaaaaaacaaagttaaataatccatcattcaggattagtctcagaagacatggttctatgatggcaccaaggagtaacagccagtaaagctgtaaggaagagacactaggactgagtactgccacctctgaggggtcccggcgttaaaggggttcagcaatggacctgggcatgggagagccataccctttacacagtgccaaagtcatctgtctaaagcggcagacaggtttgcattggcctgaggtaagcagctcttctttcacaagaaatcatcaacgtgtggcctcttcatcaaagccatagtgaagacttgaggtactcacctccatgcccaaagctgagctttcccctttcaatgttattcttcattctgactccagaaacttggttcaaagccaagtggttccctgagccaatgatctgctcttgtcagttgtattttcaaaaagctccaaatgtgccaagaaaatatttgtgtaagctcagcttatttttctaatttattgatcatgaacacctggcttaccagcataggaagtccgtgactgagcagtaatttcaagcatgtgaaaccttcatattctttacaagataattaagaaactgtcttcttgcttacatacatggctgcttttaaattccctttcatttatggtaaattgtgctgcactccataccctgtaggacatggaacatccagaattcaacccaagacagaagagaaccctcaaatatggcttaagaagctgagccacatgatttgttcttcatccccccaggcctactcaaggtagcagagaggatccagaatcttttcctgctcctccctgcagggagtagaaactacagttccctttccaacactccattgcatagttgagtatagtcctctaggttccaaggagttaaacacccttccgtaaaagccagcctccccaggaattgcctaacacatctacccctgaccaaagtgataccatcctttttccctatcaaacaaatatgggcagagagtaaagttaacttttacaaaggctgtttgtggttagagctatgtaagaatctttaaaagggtattcagtccctaaaacataaaatcactgttacatggaaaaatggttattaggccagatttatactcatctctgtctagagcatttcatgtctatgtgttgcttatgttgtctgtctacaaagtgtctttatctcttttaatcactgcaaataaagcaatactgaaaacttgagagaaaatgcaccttaggggaaggggccaatgtttctagagggaagagaaagaccttctcctgccttcttacaagacccatcttttgtcttacccatgagtttagcagggcaggctgtaacattcgttctccccaaactggtcctcctcagcctttcatagctatcttaaaagcttgagtttgaactgcagggcctgtatgacaggtgccagcttcctcatggcagaggaaaagtcactgcttttcatcttccattgttgcctcctattcttatggccccaaggatcccatcaatcctctctgcttatgcgatatagaagtgaaatattacagatttaagaggaacttgagaaaacgtaaagcactgttctcgaccattttaaatttattgggaaggagatgctgctactcagcggctgctattcttttgtttacatagagtctggctttgtttgttttgctctgtgctgggaacataaataaaagttcttctacataattttcagtcagaaa

SEQ ID NO: 235 - DNA, 3240 bp, Cricetulus griseus
cggaacccgttcggctgggcccagcggttgccagagaactttctcccgccccaacggtcgtcgcggcccacagcctcgcccacgcggcggcccgaggcgcgtcgtctgctcgtgtcccctcgtccggcgtccccgccgcctctgcccggccccaggcccgtcctgcccgccgcagtgatgtgcgacaaggagttcatgtgggccctgaagaacggggatttggatgaggtgaaggactatgtggccaagggagaagatgtcaaccggacactagaaggtggaaggaagcctcttcattatgcagcagactgtggacagcttgaaatcttggaatttctgctgctgaaaggagcagatattaatgctccagataaacatcatattacccctcttctgtctgctgtctatgagggtcatgtttcctgtgtgaaattgcttctgtcaaagggtgctgataagactgtgaaaggcccagatggactgactgcccttgaagccactgacaaccaggcaatcaaagctcttctccagtaatggatggatggatggactgataatttgggaagaatgactctcctgtggcctcacactgctgcctgtctgtctgtcactttctatctgccagcttcttcagctaaatactttaagaggggtgaggggggagagaaattcggaacaaagcagactaccatgggggggacttgttttggaggagcagtggggaatgtgatcgggcttttagtgggattcccgatcaaaccagcctcttttccatttctagtaaaatagacagcttatacccaagggagagcaaaaatagtgtatgggaatccttggaccttctcagctcccgagttaatttattcattagtgtgtggaaggtctgactgtacaaggccaactctacttattgggtagccctagctgtgaacagtagtggctgctgttaccaacttagggtgctgagataagcaattagctacagccttctgccttaagaatgcactctcctgggggttcctggctaggtaagagcggttagtgatgaaaatctgtcgaatgactttaatctttatgtgaaagctcagataagtggcacacccctaaattgatggacagctaaactttggattttctctcccctttcacatgaattttatgtctctttagataaaactgactagttttatttataaaatgttaaattctaggagcctaaaggaggaatcattccagtatgcttatttctttttttctcctttagtctcagacatttatataacattgaaacactttgagactcctactggtagtaaagggagatttaaaaataaaatcatagccataagcgtgttagtatcttataaagagagaacagttgtcttagtacttacggattttcttcatttgctatttgagtgaatcagccttagttttgtttggaaaatgaagaatattctttggaatgcctctcttaagacccaccatggatgctgattttgtagtgcaccaaagctatcactggggtgagatgtactatttggatagatggaacctcgtcccttcaaaaacctgcttgtttgttaccaggtttccctgagttgttgattgactcttattgggccaaaacgaccccacctgcctaatgtttttgtttctcttacaatcatgtgttgcatacatgtgacaacttcacagtacattctgtgttcttagaatacagtgccctaaaatggtgttctgaggacctgcagtaaaaattagacttatctctaaaattttaattcatgaacaaataaaatagaattaaaacagcattctatagcggggttaaactaactattaccaagaacagtcagcctgactaaataactatcgatcagttgatggctggttggtgtgtgtgtgtgtgtgtgtgtgtgtgtgtgtgtgtgtgtgtgttttcccccatgaactcttttttatcctgtggctttttcactttcaactagcctgaccctgtaatttttctatgtccaagaaaacaatcacaaaacagtagtttaaatactttggtatattggctaactctgctgtcttaatgcaacctactagagttggacatccttagagttggacatcctgatagtaagtgggggcactcagtctgtagctatcatgtaatgcaccagggtgttctgaaacctttgttctcacctcttggcatactgctgtttcaaaggcttgaattttaaccctttacagaattgtcatttttttctttcaaagtgttttgttacagttggctattacagagagtatattgtcttatcattcctaaacttgggtctgctttctacagtcattatggtactgaaaccatacgatcccttgtacagtttatccttgtgttccttgtgatgcagtagaggctattttgccttcccccctttgttggccattttgtaaacccatagctatgaagcaattgcttgagaaaatagcatataaacatagagtaagatagactgaccaggatggtttacagtttctttaaaaaaataataaaataaaataaataaaaagtaaactaggttatttataatgtatttctgaaccacttggcagagaaattcatgacacttaatgttaatatttttgaataaagaaagctaaaatgtctgcttttggtactacacgcattaataaaaggttaagttttgttttccactgaaatactatttaacatctcagaaaaaacctgcatgttctatagttttgtatcaaatccatcatttcatatgcactgtatcaaaacaggtaatttaccttttgatggttagtgtaaaggagcttcagtttatgtgtacttgacttttttttttcaacttcagctcagctgctgtttcttcatgtaacattgtatactggttctgtatagaagaagctggtaagagtgccctcctacctaaataagcaattgcagtgttttgcatgcaaaagttgaaaatttcaattgtcctgattctattttgtaagtggagaaacaatcaatctttctaggcagtatggaggaagactagtgctttgtgcatttttggtatatttgagttcatggttccacagcatcgtcattcctttgacacagttgggtttctcataagtatcctagttcatgtacatccgaatgctaactaatactgtgtttaagtttcgtgttgcaagaacaaatggaataaacttgaattgtgctacagataa

SEQ ID NO: 236 - DNA, 3232 bp, Cricetulus griseus
  modified_base (106)..(106): a, c, t, g, unknown or other
  modified_base (1189)..(1189): a, c, t, g, unknown or other
  modified_base (3226)..(3226): a, c, t, g, unknown or other
cgtagtcaatcaagtattcacccagtgatgtttgacaaatgtattcagattctgaagaagagctggcctcaagaatctaacttgaagtcaaaaagaaaaaaggaanacccaggagttctaagtataatcataggaggggcagaaaaaagaggaaaaaccacccaggaaggaggataatcaggtggatgaattttcaggagaggaggaggaggaagaagaggagatttatttttctgcccgagacctttttcaaatacgaaatgtcatatttaatcttctaaagaattttttaaggcttctgcccaagttttcccttaaagaaaagccacagtctatacaaacttgtatagaggtgtttgttgcattaactaattttgagccaattcctcataaatttcttgtttcacaagccaggaacctcaatggagtaaaacacatatcagagctggcctattatggattgtatttgctgtgctccccagtccatggagaaggaaataaggttattggttctattttccatcaaatgctaaatgtaatattgatgcagtccctggtccagctgctttaataagcttccctctgaggaatatgctacattcattgcctggcgttcacaaatattcacggagttctaagattccacaccgggtattcactcttgatgttgctttagctctcttagagctgcctgaaagagaagtggatgacactgtattattggagcaccagaagtttctaaagcataaattcttcgtacaagaaattatatttgatcgttgcttagacaaggcacctactgttcgaagcaaagcactgtccagctttgcacattgtctggagtcgtctgctagcagcacatcagagagtatattggagatcttcattagcagttgctgctctccaagatcacttgctcatcacccaagctggactacaccaaaataatagagtcatgggagaaactcagcagtgaaaaatctccaaattcaaacaccttaggctacatgctatgtgtcattgggcatattgcaaaacaccttcccaggagcacccaggacaaaatattggtgttgtgaagggcaagctgaatagatttcagtggtctctagagttgatcagttcatctgttgacactttgcaagggctttgtagagcatctgcaaagacattgctggaagaacagganctgctgaagcaggtgtgtggggatgtgctctccactgcgagcagcatcccagcccttgtgcgagaacttgaagtgtgtgaggatgtggctgtccgcaacaatgtcatcattgtgatgtgtgatctttgtatccgatacactgtcatggtggacaattatattcccaatatttccatttgtctgaaggactcagacccatttatccggaagcagacattgatcttgcttaccaacctcttacaggaagaatatgtgaaatggaagggctgtctgttctttccgatttgtcagcaccctggtggatccacacccagacattgccagccttggggagttctgcctggctcacttgttgctgaagaggaaccctaccatgttcttccagcacttcattgagtgtatattccacttcaacagctatgagaaacatgggcagtataacaagttttcccagacagagagagggaagcggctgtttttgctaaagggaaagacaaacaaggagaaacgaatgagaatctacaaatttctccttgagcacttcacagatgagcagcgattcaatgtcacttccaaaatctgccttagtattttggcatgcttcactgatggcatcctgcccctggacatggaggccagcgagttgctctcagatacctttgacatcctcagctcaaaggagatcaagctgttggcaatgagagctcaagcgtgcaaggatctcttggaggaagacgacatggctctggcaaatgtggtcatgcaggaagcccagatgaagatcatctcccaggttcaaaagaggaatttcatagagaatattattccaatcatcacctccctgaagactgtgctggagaaaaacaagatccctgctctgcgggaactcatgaactacctcagggaggtgatgcaggattaccgagatgaaatcaaagatttctttgcagttgataaacaactggcctctgaacttgagtatgacatgaagaagtacaacgaacagttagctcaggaacaagctctgacagcacaagctgatgtgctgctgctgatcaggaaaatgttaatgtgcctgtggccaacagccggccttcagcacctgggtccagcttcacgccaactctgtctcccatatccgaaaatgggcctctgacgatgatacccagtgccaggtccatgtccctgagtaccatcgcaattctgaattcagtcaagaaagccgtcgagtcgaagaacaaaagtcataggcgcagcttaggagctttacctttcagtgtagagtctggaagcccagaaaaatcccgcagccatgcttccctaagcatggagcaagagtctgatgcagctgtcaaacatgtaactaaacgggcaatcagcaccccagaaaagtccatcaataatgtcacatttggagcaggggtcagttacatagggacaccagcaactccactttttaccaaagagaaagtcgaagcccaggatcaaggaaatgacattttatgtttatcactgcctgataaatcgcctccacagtctccacagtggaatgtaaagtctctagccagaaacaaggacaacccaagatccagcaggaggtccctccgcaagacccccctgaagacagccaactgaaaccctttgtttaacttgtgtttggctaaccagccttccatgtttctctttgttactgtagttgagatttgtaaataaatagagagattacatatttagactttttttacaataacaataagctatttaatattgtgacgttgtgtttgagtctcaaaccttctgtggtaagttataatctggtctttaaggaacacaattttagaaaccagctttcttctgtataactcaagtgtctatagcttgtctgaatttgttacaatagatatttcccctcagctaatggtaaaattttttgaaatatttttctattatttataattgcagattttattaaaagagatgtacagtctttctaaaatgaagtaataaaggtcaaatataaatataaaaaaaaaaaanaaaaaa

SEQ ID NO: 237 - DNA, 3232 bp, Cricetulus griseus
agtgatggtgtctgggaccctgagaagtggcatgcctctctctaccctgcgtcagggcggagctcaccagtggaaagtctgaagaaagagccagaatcagaccgaccttccctggtacgcagaatagcagatccacgagagcgagtgaaagaagatgacttagatgttgttctcagcccacagagacgaagctttggaggtggctgccatgtgacagctgctgtcagctcccgccgatctggaagtcctctggagaaagacactgatggtcttcgcctgcttggtggacgacggattggcagtgggaggataatctctgcccgggcttttgagaaggatcaccgtctcagcgataaggaccttcgggacttgagagaccgagacagagagagggactacaaggacaagcgtttcaggagggagtttggggatagtaaacgtgtctttggtgagcgtagaagaaatgattcgtacactgaggaagaaccagaatggttttcagctggacccacaagtcagtctgaaaccattgaactgactggctttgatgataagatactagaggaagatcacaaagggagaaaaaagaacaaggcgacggactacctctgtgaaggaaggcatagtggagtgtaatggaggtgtggccgaagaagatgaagtggaagttatcctggcccaggagccctctgctgatcaggaagtcccaagggatgttgtcctacctgagcagtccccaggagaatttgacttaatgagttcttaaccttgacaaggtgccgtgcttggcttcgatgatagaagatgttttgggagaagggtcagtctctgccagccgatttagtaaggtggttttctaacccaagccggtcagggagcagatccagtagccttggttctacaccacatgaagaacttgagagacttgcaggtctcgaacaagccgtcctctctcctggacagaactcggggaattattttgctcctataccatcagaagaccatgctgaaaataaagtggatattttagaaatgctacagaaagccaaagtggatttaaaacctcttctttctagcctttctgcaaataaagaaaaacttaaggagagctcacattcaggggttgtactttcagtggaagaggtagaagcagggctcaagggcttgaaggtggaccagcaaatgaagaattcaactcccttcatggcagaacattttagaggaaacccctgagtgctgtaaatagcaatcgacagctcaagaaagatggagatatgactgcattcaacaaactagtgagcaccatgaaggcaagtgggaccttgcctgctcagcccaaagtcagtcgaaatcttgaaaatcacttgttggccccagctgagattcctaggccaacctgtccctaaaaaaatcctacaggaacttctgggtcaaccggttcagagacctgcttcttccaatcttctcagtggccttatggggagcttggagcctactgcatctttattgagccaaagagcaccctctcctcctatgtcgcaggtgtttcaaactcgagcagcctcagcagactacctacatccaaggataccatcaccaattggtttcccatcaggaccccagcagctacttggagatccattccaaggcatgcgcaagcccatgagccctgtcacagcccagatgagccagctagaattgcagcaggctgctttggaggggctgggccctcccacatgaccttgcagtacaggcagcatccttctatcagcctggttttaacaaaccacaagtggatagaaccagagacggactccgaagcaggcaacagcgagtatcaaagtcaccagcacccatgcaccgaggaaattcctcttccccagctcctgctgcctccatcacaagcatgctttctccttccttcacccccacctcagtgatccggaagatgtatgaaagcagagagaaaagcaaggaggaaatagcacctggaacagtggttcctggtgatgctaaagaggatactcagaaggccagcgaagagaccctgctgacatctaatcccatatccaatactgatcaagactcttctcctacgacaaatcctaaactttcgacattacagcggtcttcatgctccactccactgtcccagaacaatcgttataccaaagaacaagattatcgatctaaagcagctgggagaaaaacacccacattagcaaccccagttccaggaacaccttttctccgtcctacccaccacgttcccctggtccctcatgttcctattgttcggcctgctcaccagcttcacccagggttagtccaaaggctgatagcccaaggagtacatccacagcatcttccaagtttgctacaagctggtgtgcttccccctgggatagacatggctcctctacagggaatatctggcccactcctgggacaacccttgtaccctttctctgctgctagtcacccaatcctaaaccctcgtcctgggacccctctacatctggcagtgatgcagcaacagctgcagcgctcagttctgcatcctccaggctctggttcccaggcagcacctgtcaacgttcagactcctcagaatgttcccggcaggtcaggcctgccccacatgcactcccagctggagcatcgtaccagtcaaaggagcagctcccctgttggccttgccaaatggtttggctcagatgtgctacaacagcctctgccctctatgcccaccaaagtcatcagtgtagatgaactggaatacagacagtgagcatggcaggtgggctcacccatctggacctatggtggcaccctagtcatgatgctcattctccatctttatttatgggcttttacattggagcactctgtgtgaaggggacccatatacctaccgtgaactacattatgacagaaggctgtaaacaatcaaaatggagcctacacggtccaaatacaagggacacaacattatcaatctttgaagtctttcttttataacatgtgaatgaagtgttggtgtcttctggaagtgacacctaagggttctgaataaaataaaatgtatagacccttatgtacagacctgtgtataaacttttgtatatacgtataggatagcttttttgaacttatacagctgtacataaagtagctattagttaggcctgtgtcaactgtttggatttttttccacttgtatatttgggac

SEQ ID NO: 238 - DNA, 3230 bp, Cricetulus griseus
aaaagaaaaacaagcagttacaacaaacttgctctcatcccgccggccccctccaactcccggcaccatgaaggcggccgtcgatctcaagccgactctcaccatcatcaagacagaaaaagtggatctggagctttttccctccccggatatggaatgtgcagatgttccactgttaactccaagcagcaaagaaatgatgtcccaattgaaagctactttcagtggtttcacaaaagaacagcagcgactgggaatcccaaaagatccccggcagtggacagaaacccatgttcgggattgggtgatgtgggctgtgaatgagttcagcctgaaaggtgtagactttcagaagttctgtatgaacggagcggcactgtgtgccctgggtaaagaatgcttccttgagctggctccagactttgttggggacatcctgtgggagcatctagagatcctgcagaaagaggatgtgaaaccatatcaggttaatggagtcaaccctacctatccagaatcccgttatacctcggattacttcattagctatggtatcgagcatgctcagtgtgttcctccctcagagttctcagagcccagcttcatcacagagtcctatcagacgctgcactcccatcagctcagaggaactcctgtccctcaagtatgagaacgactacccttccgtcattctccgggaccctcttcagacagacaccttgcagacagactactttgccatcaagcaagaagtgttaactccagacaacatgtgcatggggagagccagtcgtgggggccaatccagctgtggcagtttcttctggaattaactcactgataagtcttgccaatctttcatcagctggacaggagatggctgggaattcaagctttctgaccccagatgaggtggcccaggagatgggggaaaagaggaaaaaacaaacccaagatgaattacgagaaactgagccgtggccttcgtctactattatgacaaaaatatcatccacaagacggcgggtaagcgctatgtgtaccgcttcgtctgtgacctgcaaagccttctgggatacacccctgaggagctgcatgccatgctggatgtgaagccagatgctgacgagtgatggacaaggaaggactgggggaaccctgctgagacctttcaaaggactgtgttggctggactcttaagttttaattgttattctatgttttattttccagaactcaattttcacattcaggggtgggagctaagggagctgcagctgtattggccattggtgaggctgaaagagaaaggcaggacctctggggtgggtggggcaacaagttcctgagcagatttttcaggagagaaataaaggtcttctgggaagcgtggtgaacctggcttcatcatcagttatggatctaatagcaggaggacttgtcacatcatgagtaataagattgatgagaatcaatcaaattggaaggtgggataaaacattttcttcaggggattactaaaaagaagaattattaacctttctactttttgaaacaaagatggacttcaaaggaaggggtccaaaagtgtttttacgttaaagtttattttattaaattttgtgccagtatttttttttcttacaaaattgtcttaagctctaattgggggtccagaaaaaaagtagggaaacatgcctggttgtaactaccttgtatcatctttgtgagatttgatggctgactctcagattccctcgaagaccctgaatcactaagaacataactcttgtccatggatgttctgtactgattgagtggagcatccacacaaggaagtgaaggcaaaacatcccagctatatattttgatcttacagatgcaggtgccttaataaagctctcaaaatatttaggagctgctcagggagtattaggtgggatcatttggattatgttgttttatattatgtgatctttgttgggcactggcagtgtgtgtgtgtgtgtgtgtgatgaaagagtacagccagggccgatatcattgcttgctgtttgtaacagggctttaaacaattattttcccaaataatcctcctctcctattcaattcatgctgagaaatcccctactgtgagtctattacctgcagtccccatggcagatgagatgtgagaaagtgcctccttgcacctctcagctcgctgacttgccaagctgccctttctccccaggtccaccattttcaggatttgtagatagtatgttaggcagacagctatgttgtccatctggccagatgctctttctccttttgtccaaaggccagagaccatcctaggaagagtggtgggtggtttatacactggaaatgtagcagcattgttgcattgatgctctttaaaaacacgttaacttcagaggaaggatgaacaaatctgatctagctgggtgacactcttgttttcccagagagacgcattaacctgtgtgtggcttttgactcagagtccaggaggaggggagctccctacatggagctctagttttgtggccgtggagattggtagaagcatttctagatcagaggcgctcttcctcactttggagaccaacactctgggttttaaagcattaaccttcgtggtgaaatcacaccttctctcttccagtcatgctgtgcatgctgctttctgtgttggggtctatataaatttgttgaactcttacatacattccaaagacgtttcatggaaccacaagtatatgtatacaaatacatatatgaagtatatatgttaaaatgaaattatcaggaatactgcctcagttattgaatttttttaaagaatacttttttttttaagctgagaattattggggtgaaaagatgttatattgtgtttgactattttccaacttgtattttcatataatttatattttttaaatgctgaaaatttaaaagcgagatttaaaaaggaaagcaggtgctttttaccaatcagaactgaggtagcttagagatgtagcgtgtgagtgtctatatgttttttgttttttttttaaaaacaaatgcaaaaaattcttatgggggagttttttgttgtttcttttagtagctgatgctggcacatcattttgctggaaagttttttatatactgtagcctgatttcatattgtattttaaactgtgtgaaattaaagaaacaaagaaattcattcataa

SEQ ID NO: 239 - DNA, 3230 bp, Cricetulus griseus
gcagctggagccgcagtcgcgatggccgtggctgtagggagacagagtaatgaagaacttcggaacttatcgctttctggccatgttggatttgacagtctccctgaccagctggtcaacaaatccacttctcaaggattctgtttcaacatcctgtgcgtgggtgagacgggcattggcaaatccacattgatggacactttattcaacaccaaatttgaaagtgacccagctactcacaatgagccaggtgtccggttaaaagccagaagttatgaacttcaggaaagtaacgtacgactgaagctaaccattgttgacacagtgggatttggagaccagattaacaaagatgacagctataagcccatagtggagtacattgatgcccagtttgaggcctacttgcaagaggaattgaaaattaaacgttctctcttcaactaccatgacacgaggattcacgcctgcctttacttcatcgcccccacgggacattcactgaagtccctggacctggtcaccatgaagaagctagacagcaaggtgaacatcattccaataattgcaaaagctgacaccattgccaagaacgaattgcacaaattcaagagtaagatcatgagtgaactagtgagcaatggagttcagatatatcagttccccacagatgaggaaacggtggccgagattaatgcaacgatgagtgtccatcttcccttcgcagtggttggcagcactgaagaagtgaagattggcaacaagatggccaaggccaggcagtacccctggggtgtggtgcaggttgagaatgaaaaccactgtgactttgtgaagctgagggagatgctgatccgagtgaacatggaagacttgcgagagcagacgcacactcgccactatgagctgtatcggcgctgtaagcttgaggagatgggcttcaaggacaccgaccccgacagcaagcccttcagtcttcaagagacgtatgaagcaaaaaggaatgaattcctgggagagctgcagaagaaggaggaggagatgaggcagatgtttgtcatgagagtgaaggagaaagaggcggaacttaaagaggcagagaaagagcttcacgagaagtttgacctcctgaagcggacacaccaagaggagaagaaaaaggtggaagacaagaagaaggatcttgaggaggaggtgagcaacttccagaagaagaaggcagcggctcagctcctgcaggcccaggcccagcagtccggggcccagcaaaccaagaaggacaaggataagaaaaatgcaagcttcacataaagccggccaagccaaggacactcccgcattcacctgctttggcagtaatagcgcatctctgtcgtctgtgccctgtttgattttgtgttgcacccttccccacataccagtagcccttagctcattttgctgaatgttgtcagggggtaggaaaccatagaacaaggggataacagcaaacgcttgtgaggctggactttgtttctggaaagtcgatgatttgctttgtatgcctattccaagtggcaacaggaagcatgtctgtcacttctgtgtcactttggaccaaggacagtggggtaaaatactacctgtatgtctgatgtgaaaactcaccgcctcagcagctgaactaaaaccctgagtagccgtgacaacaacttgcattttcttgattattcatctcatgctcacacagcccctgaattcactgtcccttcttcacatttgccacaggccaaaggtggccttgaaattaggcagaatggtgagtggacatcactgatagcttttcacttgtatgaccttttgttttaatcacttggttatttgatctgagcgtgtggtctgctcctaccctcttaagtatggagtctacatctgaatgcccactctaaagtctggccatgctgctgtggactggtgtaagaaacatggttatattcacctccaccagggattgcttctaaaactatttcctcccactgctcccaagcctcctgtagtttgttattgctgctcttttctttcggtatctatgcctttcttcacagtagtccctggctctgcacggaataaacgatactctcaaatctaattggatgtgctttcgcctttgcatgtaagtacaggagtaagaactctgagatctttctgtttcagattagggaaaacaaaggggacagatgagcttttcttttggaaggggtcctgaaagtacagtctgagtaagctttttttttttctttttctttgcagttgaggactggtttcccagctggggctctgcagtaattggtccaaaggggcatctttcagccagggaaactgttccacttgattttgggtttctcattttcctccttctctactttgttattcaccagcaacagctcttgcttcctctccatcctgtgcccctttgatgggtagacttggtcgtctcactttcctgacacaccccaagtgttccgcagagtcagtgttgagttgccccatgtctacttcccacctgcatcatactgtctctgtgtggtccatttgaatcccttggctttgccattcacaagtgtctggtttgtcaggtgtcagttttcaaaagtcctagttccattgacaggacatttattatggggttgttagctgagttatggcctacagagtctagtttgtatgtaggtatgaagggaatttttaaaaataaattgaaaattaagctgtgaacagcattagaactttgtctatttcttgatttgaaaatatgctgatatgccttaaactgtagttgtagaacagtcatttttgctgtttgaagataactaatgttttctaaacttgttgtgtaatctttcagtgttaatgcagaattgtcatgtatgtaagctgcatgttagacacttgtctttttttaagaactaaaataattgtattgatgtgaaccatacccttcctacaagtgtgaaagtgctgcctcagcagcctgctgagtaactcgagtctgttaacatggtgtggtgacaggtgacctatgcatatatcactagtgccaagacctaaagcggggaaatatattttacccaaccgttaaaaaaaaaaaaaaaaaaaaaaaaaaaaaaaaaaaaaaaaaaaaaaaaaaaaaaaaaaaaaaaaaaaaaaaaaaaaaaaaaaaaaaaaaaaaaaaaaaaaaaaaaaaaaaaaaa

SEQ ID NO: 240 - DNA, 3228 bp, Cricetulus griseus
gtgcccatctacaatgcgattatgtttctctttgtgctggccaacttcagcatggccacctttatggacccaggaattttcccaacgagctgaagaggatgaagacaaagaagatgatttccgagctccactttacaaaacagtggagatcaagggcatccaggtgcgcatgaaatggtgtgccacctgccgcttttaccgtcctcctagatgttcccactgcagtgtctgtgacaactgtgtggaggaatttgatcatcactgcccctgggtgaacaactgtattggtcgcaggaactacagatatttcttccttttcctcctttccctgacagtgatgtgtgtggctggcttgtttttcatccctgtagctggcctcacaggatttcatgtggtgctggtggctaggggacgcacaaccaatgaacaggttacaggtaaattccggggaggtgtgaatcccttcaccaatggctgttgtaacaatgttagccgtgtcctctgcagctctccagcacccaggtatttggggagaccaaggaaagagaagacaattgtaatcagacctcctttcattcgaccagatgtgtctgatgggcagataactgtgaagatcatggataatggcatccagggagaactgaggaggactaagtctaagggaagcctagagataacagagagtcagtctgcagatgcggaacctccacctcctcctaagccggacctgagtcgatacacagggcttcgaacacacctcagcctggctaccaatgaggatagcagtctcttgggcaaggacagcccccctacccctaccatgtataaatatcgaccaggttacagcagcagcagtacatcagccgccatgcctcattcctccagtgccaagctgagtcgtggagatagcttgaaggaaccaacctcaattgcagatagtagccgccatcccagctaccgctcagagcccagcttggagccagaaagcttccgatctcccacttttggaaaaagctttcactttgatccattgtccagtggctcacgatcctccagcctcaagtcagcccagggcacgggctttgagttgggccagttgcagtccattcgttcagagggtaccacctccacctcctataagagtctggccaatcagacacgcaatggaagtctatcttatgacagcctactcactccttcagacagccctgattttgagtcagtacaggcagggcctgagccagacccacctttaggctatacctctcccttcctgtcagcccggctggcccagcaacgggaagccgagaggcacccacgtttggtgccaaccggcccaccacaccgagagccctcgccagtccgctatgacaatctgtctcgccacattgtggcctccctccaggaacgagagaagctgctacgacagtcacctccacttgcaggccgtgaggaagaaccaggcttgggagactcaggcattcagtcaacaccaggctcaggccatgcccctcgtactagttcctcttcagacgattcaaagagatcacccttgagcaagactcctctgggacgcccagctgtcccccgttttggcaaaccagatgggctaaggggccggggactggggtcccctgaaccaggcccaactgccccctacctgggccgatcaatgtcttatagcagccaaaaagccccacctggtgtctctgagacagaggaagtggcattgcagccattattgacacccaaagatgaagtacagctcaagaccacctacagcaaatccaatgggcagcccaagagtataggctcagcttcccctggcccaggccagccacctctcagtagtcccacaaggggaggagtcaagaaggtgtcaggcgtgggtggtaccacttatgagatttctgtgtgaatcttggcacctcccctcccccacacctctacacctacaccaaagggcctcaggtggccaccttctttccctcaaggggctcccttactttgcatggacatttttaaactaccgattccaagaggatgaggcttgttttacaaaatgccatggggttgagagttggggccctgagtcaggggtggcaatccccccctttgatttataagaccttcccttctttgatccctggaccagactcagtggacatttgtgcaattgctcaccctggagggaaccagatcatttttaaaccagaaataattttttttattattgttacggattctatttttttcctcttctccgttaccaggtgtgtgtgtacatatatatatatatatatattataaatatcaaagaaattatatatctatcctgggatgggaaaacaagggagggatatatagatatatatatagatatatatataaggagggggattttattcttccctttccttagaccagcaggaaaaagagacattaaagtcttccttttccccatggttccctctcttttgtcccagttatcaactaaggaaatagcaccctctgctggtgctaagtgattaggaaagaaacctgggtaagtctggggttcttggtcagataaaggaacttgcagagttttctaggctcattgacatccttttcccaggaaaggggtcacagtttcatgatagtggtgggagatcaggaaaagaacttgatctactttacaaaacatcaggcaacccctccccccatttttgggtgatagggattgtggtgggcttagtggacctcttcaatgcttccctattacttacagttaaaatgatcttaaaaatccaaggccagaagagaagaatccaaaaagcaatatttttcatcatatgccaaaaatgggatagagagaaggagtggcagacctaggcccctccaattgtcccctggggtttaccccttagcccacctcaatatggtgctgggtagagggggtagctggattctaacctttaaacagggaagaccccagcctctatacagagaccctttaatttttttattctgattagccattttaaaccaacaaagaataaaataaatcctgatctaaccagctccccctgacttgtgttttatctggttaaggcaaggtgaatggtcttgtgggaagtcaagaggaaagcctcattctctggtctactttttttctggctgtcaaattaaatgtcctactaggtgagagaaacctaacttttcataacaaaaacttctgtctttgaa

SEQ ID NO: 241 - DNA, 3225 bp, Cricetulus griseus
  modified_base (243)..(243): a, c, t, g, unknown or other
gaaggagtagctgacaaactcagggtagagctggccgagaaagcaaacaagctacagaatgagctagataacgtctcgacccttctggaagaagccgagaagaaaggtattaaatttgctaaggatgcagctggtctcgagtctcaactgcaggacacacaggagctccttcaggaggagactcgccagaaactaacctaagcagtcggatccggcagctggaggaggagaagaacagccttnaggagcagcaggaggaggaagaggaggctaggaagacctaggaaagcaggtgttggccctgcagtcccagttggctgctgaagctgaggccagagagaaagaaaccaaagcactgtctctggcacgggccctggaagaagccttggaggccaaggaggaattcgagatgcaaaacaagcagctccgagcagacatggaggacctgatgagctccaaagatgatgtggggaagaatgtccacgagcttgagaaatccaagcgggccttggagcagcaggtggaagaaatgaggacccagctggaagagctggaggatgagctccaggccactgaggatgccaagctccgcctggaggtcaacatgcaggccatgaaggcccagtttgaaagagacctgcaaaccagagatgagcagaatgaagaaaagaagcgattgctgctcaagcaggtacgggagctcgaggcagagctggaggatgagcggaaacagcgggcgcttgctgtggcttcaaagaagaagatggagatagacctgaaggacctggaggctcagatcgaggctgccaacaaagcccgagatgaagtgatcaagcagcttcgcaagcttcaggctcagatgaaggattaccagcgcgaactagaagaggctcgtgcatccagagatgagatttttgctcaatccaaagagagtgaaaagaaactcaaaagtctagaagcagaaatccttcagttgcaggaggagctggcctcatctgaacgagcccggagacatgcagagcaggagcgagatgaactggctgatgagatcgccaacagcgcctctggcaagtctgccctgctggatgagaagcggcgcctggaggctcggattgcacagctggaggaagagctagaggaggagcagagcaacatggagctgctcaatgaccgattccgaaagaccactctacaggtggacacgctgaacactgagttggcagcagaacgcagtgccgcccagaagagtgacaatgcccgtcaacagctggagcgacaaaacaaggaactgaaggccaagctgcaggagctagaaggggctgtcaagtccaagttcaaggctactatctctgccctggaagccaagattgggcaactagaggagcaacttgagcaggaagccaaggaacgagcagctgccaacaaactagtccgtcgaacagagaagaaactgaaagaaatcttcatgcaggttgaagatgagcggcgacacgcggatcagtataaagaacagatggagaaggccaatgccaggatgaagcagcttaaacgccagctggaggaagctgaagaggaggctacacgtgccaacgcatctcggcgtaaactccaaagggagctggatgatgccaccgaggccaatgagggcctgagccgtgaggtcagcactctcaagaaccggcttaggcggggcggcccaatcagcttttcttcaagccgatctggccggcgccagctacacattgagggggcatcactggagctatccgacgatgacacagaaagtaagaccagtgatgtcaatgagacgcagccaccccagtcagaatagacacaggaggctggaggagacgcaggacaggccagaagtcaactcagcgctagtctcgggaatggcaagctccaggattcctcacaggaagatcaaccgtgtcttaaggctttgcggcctgcacagactgtatcctgcttcagactaggtacaattgtcccctttttatatatacacctccaccagacatgcgtattaaacaaactgtttcatcgttgcatctattttccatatattcctcaagagaccacttcatgacacattaagaggagataaccctttttaacaaattctagacacttgttgccagtcactgggccaggggccccaggatggttgctcagttgctctgcatgctctgtcgtctgacaggtaccttagttctgtgctcatgtggccctgacctgacccctcaaccacatccagtctcttagaacattgtgaacctaaccttcgcttgtatcatttcctttgaataatgatcactgtcttggtgagcaaactgtgaaaggggcttttggaggttttaggaggggtgtgttggattggggaagcagcatcaatttggggttaccctgcccatctcccaaggggtggcccttccctcaaatttatggtgtccccaccatctcatgtgaatagtctttggcccagggctgtctgcgcacagagaggatagtggctacaacacacttgcaaattcagccactgctttgagcccaaaacaggaatgttggttttgtgttggaggtgtgttccaagtttgtcaatgaggctacaggacctcaagaacagatgccatctgcctgaatgttgacatgccagtgggtgtgtgatccttcatttttccttttcccttcctttggacagtgttacaatgaacacttagcattctgtttttggttgatagttgagcaaactgacattacagaaagtgccttagacactacagtactaagacaatgttaaatatattatttgcctctataacaacttaatgtattaagtttgactgtgcttcatatcatgtacctctctagtaagtagtataaacaaacattcagtgacagcaaatcagtgttaatgacaaatcccgatccttggcaatgtgcttgaaaacacagaccttttgggttaaaagctttaacatctgttaggaagaatttgtcacgtgggtttggaatctttgatttcccctgtatggattgtactggctgttgaccaccagacacctgactgcaaatatcttttcttgtactcccatatttctagacaatgatttttgtaagacaataaatttattcattatagatatttgcgcctgctctgtttacttggaggaaaaagcacccgttaagaacaaacagacctcaataaacaagagtaatcatgtg

SEQ ID NO: 242 - DNA, 3224 bp, Cricetulus griseus
aaggccctgccgtgtcccagggccgcggaagcccggctacagctcgcgggcgtcggagggctccgcgccgcgccgcgaacttgaagcagctccctacctgccccaggaggagaagtctcccctgttctcagtacaccgtgaagggattcctgaggacggcacaatctacagaataaatagatttagctccatcacagcacatccagagcgctgggatgtgtccttcttcacaggaggaccgctctgggctctggactggtgcccagtgcctgaagggtcagcagcctcacagtatgtggcccttttctccagcccagacatgaatgagacacacccactgagccagcttcattcaggccctgggctgctgcagtctatgggattgcctgtgacagtggctgtatctgggacatcaagttctgccccagtggtgcatgggaacatccagaaacccctcggaaggctcctctcctgcctcggctgggtctcttggccctggcctgctcggatgggaaggtacttctgttcagtctaccgcatcctgaggccctcttggctcagcagcctccagatgctatgaagcctgccatctacaaggtacagtgtttggcaacccttcaggtggggtctgtgcaagcttcagacccctctgagtgtggtcagtgccttagcctggcttggatgcctaccaggccccatcaccacctggctgcaggatattataatggcatggtggttttctggaatcttcccactaattcacccctccaacggatacatctctctgatggctccttaaaactatatcccttccagtgtttcctagcccacgaccaggctgttcgtacaattcagtggtgcaaagctaacagtcatttcctggtttctgcggggagtgaccggaaaatcaaattctgggatcttcggcgaccttatgaaccaataaactgtatcaagcgcttcttgagtacagagctttcctggctgcttccctacaacggtgtcacagtggcccaggacaactgctatgcctcttacggactctgtggaattcattacatcgatgctggttaccttggttttaaggcctactttactgctccacgaaaaggcaccgtctggagtctttcaggttcagactggcttgggacagtagctgcaggagatatatctggggagctcattgcagctattttacctgatatggcatcaaacccaattaatgtcaagaaacctgcagaaagaagatttcccatatataaagcagatctgatagcttaccaggacagtcctgaagaccaagactcctcgacctcctctgagacccccaatcctcccaaagcaagaacttacactgagaccatcaatcaccactacttactctttcaagatacagatctgagttccttccacaacctgctccgtagagaaccgatgttgcgcatgcaggaaggagagggacactctcagctttgcctggacaggctgcaacttgaagctattcacaaggtacgtttcagcccaaacctggattcctatggatggctggtatctggggggcagtcagggctggttcggatccattttgtccgtggactcacctccccgctggcccaccgtgtgcagcttgaaagccgagcccacttcaatgctatgttccaaacctccttttcaactgaagggcctggtttctctccagccagccattgcctttcccccaatccctagtctggtccacacagagctcttggattgaagtctgccaagaacaaatggcccccatgcaacagtgatggtgccaggcctagatctttaggcctatctgcccagaactccttaatccctctcctttcacagacttctatggtcacagctccctgcaggtaggggggctccccctccacaacaattcctatgcctaaaaccgtggctcacaagaaacactcaggcctgacctaggcttgggagtcaaattgctcatattgagcatattgtgaaggaggtaaagctaagtaaaggtactgggtgtttttgagaccacttgtgagtgggtgtttggagagtcggaaaggatatcttcatgaaggctcctgcccttttccaggatttgatgttactgccttccattcttcctctttagaataaccaacacacaggcccaatggggggacagtaacttattggactgaagctgctcgtaatactttaactgaggaacaccataaactccctacagtagaacagcggccagctcttaatggctcctgcttatgaaatattcccaatcattggtcacgtgacactacttgaacactcctagatagtagttttttaaatttttggagctgggtataatggtgcacacccgcaatcccagcacttgggaggccgaggcaggaggatcacaattttgcattcagtctgggctatctcataaaaccaaaaagtaagaaaaaaaaaagtaaaagtaagaaaaaaatttcctttctatcaagtcaagattatacctctattaattttactaatgggtgttaggagattgagtcattcttccctgtgagtgcccttttcagtacttaacagtagctatcatgtgtttccaagccatttttttctctagattaaatatctttagttatttcaatcattcttttacaagtcatgatttttgatcttcatgatatggtcacattgttgacatattaaacatgtttaaactctgtatagaaagtatttagaacccaataatgtattgtcatctggatagagtcctcttgtggatagctgcacctcacatgactgagatactgcctcgaaagcacaggcagcaggctgaggtttggaaggaagtagttagaccatcttaggaaataggaaacaaataggtctcctgcttcctcttggaagagatgcattctagatagtacctgaaacaaaacctagactttagagcactcaagactggtctgtcatatctgggaacagctttctgcctgagtatatagaagatctgtcaaatgccaaatctttcagaagagaatcaagtagttcagtcccttcctatacagaagagggagcaggcctataggaagtccttaagcagcagaaggaccacaacccttgctggtgtgaaggagccaagtgttgtaccactctgttgtgatccaactcaaggctgtgtcaggcttgtctttttgaactaataaagaagtgccttccattgc

SEQ ID NO: 243 - DNA, 3224 bp, Cricetulus griseus
  modified_base (424)..(424): a, c, t, g, unknown or other
gggagtatgatcctggcggattttcaggcatgtaccggcattgaaaacatcgatgaagctattacattgcttgaacaaaataactgggacttggtggcagctatcaatggtgtaataccccaggaaaatggcattctacaaagtgactttggaggtgagaccatgccaggacccccatttgatccagcaagtcaccccgctccagctccaaccccttcatcttcagcgttccgacctgtaatgccatccagacagattgtagaaaggcagcctcgaatgctggacttcagagttgagtacagagacagaaatgttgatgtggtacttgaagacagctgtactgttggagagattaaacagattctagaaaatgaacttcagatacctgtgcctaaaatgctgttaaaaggctggaagactgganatgtggaagacagtacggtcttaaaatcactacacttgccaaaaaacaacagtctttatgtccttacaccagacctgccaccaccttcatcatctagtcatgctggtgccctgcaggagtcattaaatcaaaacttcatgctgatcatcacccaccgagaagtccagcgggagtacaacctgaacttctcaggaagcagtaccattcaagaggtaaagagaaatgtgtatgaccttacaagtatacctgttcgacatcagttatgggagggctggccagcttctgccactgatgactcaatgtgtcttgcggaatcagggctctcttatccctgccatcggcttactgtgggcagaagaacttcacctatacagacccgcgagcagtcagaggagcaaatcacggatgttcatatggttagtgatagtgatggagatgactttgaagatgcttcagaatttggagtggatgatggagaagtatttggcatggcatcctctgccctgagaaaatctccaatgatgccagaaaacgcagaaaatgaaggagatgccttattacaatttacagcagagttttcctcaagatatggtgactgccatcctgtattttttattggttcattagaagctgctttccaagaggccttctatgtgaaagcccgagacagaaagcttcttgctatctaccttcaccatgatgaaagtgtactaaccaacgtgttctgctcacaaatgctttgtgctgaatccattgtttcttatctgagtcaaaattttataacctgggcttgggatctgacaaaggacgccaacagagcaagatttctgactatgtgcaatagacacttcggcagtgttattgcacagaccattcggactcaaaaaacagatcagtttccacttttcctgattatcatgggaaaacggtcatctaatgaagtgttaaatgtgatacaaggtaatacaacagtggatgagttaatgatgagactcatggctgcaatggaaattttctcagcccaacaacaggaagacataaaggatgaggatgaacgtgaagccagagaaaatgtgaagagagagcaagatgaggcctatcgcctttcccttgaagccgacagggcaaagagagaagctcatgagagagagatggcagaacagtttcgtttggagcagattcgcaaagaacaagaagaggagcgagaggccatcagactttccttagaacaagccctgcctccagagccaaaggaagaaaatgctgagcctgttagcaagttgcggatccgaacccccagtggcgagttcctggagcggcgtttcctggccagcagtaagctccagattgtctttgatttcgtggcttccaaaggatttccatgggatgaattcaagttactgagcacctttcctaggagagatgtaactcagctagaccccaataagtcattattggaggtaaagttgttccctcaagaaacccttttccttgaagcaaaggagtaaacatgactcagcggtggaagcagccacttctgacaagccagtggcacatgtcaagagatgagctcctcaccaacccacccacatgctcttctcactcacttcaatgtcacacttctgcctcttgcaagattgctaggaaaaaagtaataaacatagctaacttaaaatttaccaggcctcaaacttgcagtcatctacttcagcttcccaagtggtaggataacaggcatgccccataatacctggccatcacttggtgttttaaacaccttctctattgccaaaatcagctgccctgtggagtctcctgcaataagggacttgctctataattttagtttttggatgttttaatattagatattggatttatatcccaaataaaaggtatctcatcctttggctaaaaattcagacttcatatatttaagagagcaaatttgggggcttagcctagaattcatgtgttgcctgaattgatatgtagtaatctggggtttgatttgtagatgtggacttcgttaatctatggatttaggatttggggtagttcataagaatatatttatatcttcacagccaaacaagttccttttagtcttgaaatgttctctatggaggtttttgtatcatctctagtctttatctttagagctggcctcccagtctggttattttgtaagtgtgttaggtgtgtttccctggttccattatggggttctgagaagacttaaccaaagctgaagatatgtctggtcacttttccctctactcaaaaagtattggcctggaaaagtcacctgttttcctctgatgctcagccaagaacgttccctgaaaactcttctgagggattgttgctaatgccactacgcttcatccgccaactgcctgagaagaagggagctgactgtgaagggagttccacctaagcactttctctccagctctgctccttccttccttcctaatcgagtggcaccacaagctgacatttccgaagctgcagctgtactagggcaccagcactctttttccagctagaccttgttctgtagctgctgtgagaagccacggccctgaactcaagccatactcagaaacagcagccagggtatgggcaggggtttgagaggtctctgaactcactcttatgtttaacctgttccatctgatctggatttgacttcattatatgattccctaccattcctgtttacttctgtataccaacatatagactttactctgaaaccaatttcctaaaccttattaaatgttacttgaatgtg

SEQ ID NO: 244 - DNA, 3218 bp, Cricetulus griseus
tttggtgcctgaaggaggagacagtgaccgagctggagactgcagttctctgtccttcacacagctctttcagcatgcctgggtcacttcctttgaatgcagaagcttgctggccaaaagatgtgggaatcgttgcccttgagatctactttccttctcaatatgttgaccaagctgagttggaaaaatatgatggtgtagatgctgggaagtataccattggcctgggccaggctaggatgggcttctgcacagatcgagaagatatcaactccctttgcctgactgtggttcagaatctgatggagagaaatagcctgtcctatgactgcattgggcggctagaagtcggaacagagacaatcatcgacaagtcaaaatcagtgaagtctaatttgatgcagctgtttgaggagtctgggaatacagatatagaaggaatagatacaactaatgcatgctatggaggcacagctgcagtcttcaatgctgtgaactggattgaatccagctcttgggatggacggtatgctctggtagttgcaggagatattgctatatatgccacaggaaatgccagacctacaggtggagttggagcagtggctctgctgattgggccaaatgcgcctttaatttttgaccgaggacttcgtgggacacacatgcagcatgcctatgacttttacaagcctgacatgctctctgaataccctatagtagatgggaaactctccatccagtgctacctcagtgcattggaccgctgctattccgtctaccgcaagaagatccgtgcccagtggcagaaagagggaaatgataacgattttaccctgaatgattttggcttcatgatcttccactcaccatactgtaagctggtgcagaagtctctagctcggatgtttctgaatgactttctcaatgatcagaacagagataaaaacagcatctacagtggcctggaggcctttggggatgttaagttagaagatacttactttgacagagatgtggaaaaggcatttatgaaggctagttctgagctctttaaccagaaaacaaaggcatctttgcttgtatcaaatcagaatggaaatatgtacacgtcttctgtatacggttcccttgcttctgttctggcacagtactcgcctcagcagttggcagggaaaaggatcggagtgttctcttatgggtctggcttggctgccactctgtactcccttaaagtcacacaagatgccacaccaggatctgctcttgacaaagtgacagcaagtttatgtgatcttaaatcaaggcttgactcaagaacatgtgtggcgccagatgtctttgctgaaaacatgaagctcagggaggacacacatcacttagccaactacattccccagtgttcaatagattcactctttgaaggaacatggtacctagttagagtggatgaaaagcacagaagaacttatgctcggcgcccctccactaatgaccacaatttgggtgatggagtgggacttgtgcattcaaacacagcaacagagcatattccaagccctgctaagaaagtgccaagactccctgctaccgcagcagaatcggaatcagcagttattagtaacggtgaacactaagagctttgtgggcttcacagtggcttgaggctggggtggggtatggaaacagttggaggattgtatgtctggggacaattttaaagagtacatgttgcttaaatgtaatgtaactgaatgtaactgacacggagcctagaaaactattatgttcttggaaaagtctttgctgaacttgctaacacgcttcctgttgtgatctggccaatggttaatgtgctgcaatgatgttaaagggctctgtaaaactttatacctctctggacgcctatatgcatgcagtttagtttccaaacatggcatgaaccgagtgcttctgccaacaataagcggaggtactagtgtccaatttttaaaaatgggtttgtttttttttttttttaatgtgtaagaattttgtactttaacaaataaaagagtacttgtagcttttgaaaaacttttctatgttggggattgtggaatttaaatgtcacacacaaatcctgcttgaaaatggcaaggcaaatatctttttcgaagacttgtaaatcctgaagagaggatcaaccatcggtgtgagaaaggttagccgtgaccagagagatgatcagagagatgctggctctgagcaggcctctgccacagcaaatggttcacgtgggcgctgtaagcgcagctgggaactggtttcagccagttcaagtggctagtctctgcagcactcagacgctggtgtgagggaacttgttgccatcctgggcaccctccttgcaaggctaaaatgtaatgtaggaaggatggggcagtgcattattaggtcacagtgttacaaacccagttcataggctggcagcttaaatccaccagacacctttttctttgtggtatgtgtattttgtgttttgtttgtttttgtatctgttctaacccacattttcacagagtgaaaatttcacatagtctgacaagccaaaaggaatattcatttcaagatctagaagtagaattcataacattttcccccttgactttcacttttaaaacaacaagatctaccacatgagatgagtaagaaaattcactaggagttctctgggtggttttggtgctgaacaatgacatgaccctcacagactgtaaaatagagatagttggaactaatgtacagaactaaattttttaactttatttgctgttccattctgtgaagtttcagttatctaaaataaatgtgtaaaagtttcagattgcaaggtaatatgtaatgtagcatttgtaagatattcttgtcaatattaaccagtagaattttgatttgtacagttttaattggttaaaatggtttcattttaacatccactgctatagatgaataatgtaagttcagatttaaagaatggtggggaaatggtgcatgtaattcttttgcaagtattgagagttctgtatgttttgaaaagagtaatgttctggtgccaagaagtggattttctcagagtccattgccagcagtgggcaagcctggcgatcctggcacggagcgttaaccatacaccttactaatagcaaggtggataacttttaaataaagttttagac

SEQ ID NO: 245 - DNA, 3218 bp, Cricetulus griseus
  modified_base (2186)..(2186): a, c, t, g, unknown or other
cactgtacatgggatctaaggttcttctgaccctgcctgagcagcaccgggccagctatgcccacttgtcctccagccctctgctcatgttagagcagctgctgatgaacatgaaggtggattgggccaccatggccgtgcagactcttcgccagctgctggccggacagggagattggcttcaccctggacgaggttgactcactgctctccaaatatgcagggaaagccctggacctcccataccctctgagggaaaagcgatcagattcagtgattcggtggtggaaggctgccgagaaagcccttcacgagtgtgtgaccagtgctacagttactacaacaaagatgcaccagaggagagcccatgccagtcagaagtttcagacagctctaagaatgaaagccctccatattcagctgtggtgagagtccccaaagcaactgaggtggaatggatcttgagtcttaatgaggaagaaaatgagctggtgcggggtgaattttactatgagcaggcccccagcgacctccctgtgcaatcgccatcctgaacctgcaccgagacagcattgcctgtggtcaccagctgatcgagcactgctgcaggctgtccaagggcctcaccaacccagaggtggacgccatgaagcagctgctcttcagcgccaagatgatgttcgtcaaagctggccaaagccaggacttggctctttgtgacagttacctcagcaaggtagacgtcctgcatattttagtcgccgctgcctatcgccatgtgccatctctagaccaaatcttgcagccagctgcagtaaccaggctgaggaaccaacttctagaagctgagtactaccaactgggtgtcgaggtctcaacaaagactgggctcgattccacaggggcatggcatgcctggggcatggcctgcctcaaagctgggaacctcactgctgcacgggagaagttcagtcgctgcctgaagcctccccttgacctcaatcaattgaatcacggctcaaggctagtccaggatgtggttgagtacctagagtctacagtgagaccccttgtttccttgcaagatgacgactactttgccaccttgagggaactagaagccacccttcggacccagagccttttccttgaggtaattcctgacgggaagataatgaacaacacctactaccaagaatgtctcttctacctgcacaactacagcaccaacctggccatcatcagacttctaacatgaggcactactaccacattctgtatgagctgcagcagtttatgaaggaccaagtccgggctgccatgacctgtattcggttcttcagtcacaaagcaaagtcctacacagagctgggagagaagctctcgtggttgcttaaggccaaggaccacctgaagatctacctccaagaaacatcccgtagctccggaaggaagaaaaccaccttcttccggaagaaaatgactgccgctgatgtgtccaagcatatgaatacacttcagctgcaaatggaagtgaccagattcttacatcggtgtgaaagtgctgggacctctcaagtcaccactttgcctctgccaacactctttggaaataaccacatgaaaatggaagttgcctgcaagggagagagaaaaatatggtgagattcgacagctgctcaaatgtgtcagtgagtcaggcatggcagccaaaagtgatggtgacaccatcctccttaactgcctggaagccttcaagagaatcccgccgcaggagctggagggactgatccaggcaatacacagcgatgacaacaaggttcgagcctatctgacatgttgcaaactgcgttctgcctacctgattgctgtgaagcaagaacactcacaagccgccgccctcgtccagcaggtgcagcaggcagccaaaagcagtggagattcgtgtagtgcaagacatctgtgctcagtggcttctgacaagccactcccgtggtccccatggctcaggctccaggaagtgaccctgggcagcagaacctagaaaccatagcctatggcagctatggccacaggcacaatgctacacaatgccctccatgtccgtcttcctatgggatggaacttctggtcctgccccaagttggagtgagcaggttggaccctacttgcctgtgcaggcaagngcaggtcctttcacacaagtgccatgtaaagttgtagaatctagaagtttgcctgtggaagatgacaacttccctggcaacacctctcacaagcacaaggctctcgggtggcaggcatctgaaagctccggtgacaacataaatgatcagatctgggcaggcccatcacattcatccagagcggaggaaagggcaggtaggcctcttcgagcacagagctggctcttgtcaggaaccctgctgcagggtggatgggtaaaaacacatggctttttctttcagcatctagggaaagagatggtagccaggatcctgggactgaattaatggctggactctacctgtttgagttccattcttgtttgtgcctcttgaattagttaagaaactatttctctatccctcatgcttcccttcagtctcctccctaaagaaaggcttgtagccccaagtttcccatcgggcagagctcagcctattggtctcccctttgctgccaaagcaacaggaactggaaactgaagtcagtgtctctggtgcttagaagccctgttcatttcttctgaaccaagttttccttataaacaactgttaatggacatctgtctgagtccaagctttggccccattagagaagaaaggctgaaggaaaatactagatcccttaagggtgcagtttgaccttcccttccttgcattgtagaacacaccacccagctcccaagaagcccccattgcctggtgtctgcttacactcaaggctgtcctttctgcactgagaataagcactttacacacctgggttgtaagtctcacagcccttgacttagggtgtcacaaccagatttctctgactttctcctaacttgaactgcaaaataggtaaccattgaccaggttaacagagaagacactgcatacctaagacatcactgtggtttcctgcaaagcaacaataacatcaaaaccattgtacatgttgaggggttatgtgttctacaaccaagccacaataaactgtctatcccacct

SEQ ID NO: 246 - DNA, 3218 bp, Cricetulus griseus
agaaaagaagagtctctgagtgagcatcccctacctatagagttttctgatacacagactgaacagagtgagaaacactttagtgaagataacaatgaaacagtacctatggagtgcgactcattttgtagtgaccagaatgagtctgaaatggaatcatctgtaaacactgactgaaggttgaaactgtagctcaaccagctgaaagcctactggacaaagccccaaagcctcgtactcgaagatctagatttcattctccatctacaacttggtctcctaacaaagacactgcacaagaaaagaggcgggctcagtctccatctcctaagagagagactgcattagaaagcaaggattctcagtcaccatcccccaagagagagtctgctagaggacggagaaaatctcgttctctttcaccaaaaaaagatgtggccagagaagggaggccgtttcggtctccaaagagagaggatgctaaggaagccaaaagatcggagtccatatcccctagacgcgatgctcctagagagaaccagagatctcaatccagagtgaaagactcttcctcaagagaacagtctaggtcccggagcagagaaagagagagcgagagagatggccagaggagagatcgagacagagaaaggagagtcagaagatggtcaaggtccaggtctcgctctcgatcaccatcaagattgagaacaaaaagtaagagttcatcatttggtagaaatgaaagagatagttactctcctcggtggaaggaaaggtggacaaatgatggctggaggtgtcctcgaggtaatgaccggtaccgaagaaatgactcagagaaacagaacgaaaatacaaagaaaagaaaaaatgacatttctgatactaatgatccaaattccacagataagcataggaatgactgtcccacttgggtaaacggaaaaaataaactctgggccagatccaaggaccagaaatcctgaaaagttaaaagattcccactgggaagaaaatagaaatgaaaattcagggaattcttggagtaaaaactttggtggctctggctggatctccaaccgtggtcgaggtggccgagggaaaggcacttacagaggtaattttgcctacaccgaacagagcgagaacaggtggcaaagccgtacacccctttcagggagtgactccttcaagtctgtggagcagcaaccctctaagcgaaaaagtgagcaagacctctctttcggtacgcctgcagacaggtcaggatggacatctgcctccagttgggcggtaagaaagactctgccagcagatgtacagaactattactctcggcgtgggaggaactcttcaggtccacagtctgggtggatgagacaagaagaggaagcacctgaacaggactgtaacttaaaagaccaaacaaaccaagttgatggttctcagctacctgtaaatatgatgcagcaacacatgaacgtaattcaacccccaatgaacccacagcatcagcctatgagcatcttcccatacccagtgggtgtgcatgctcctttgatgaatatgcagcgtaacccattcaccatgcaccctcagctgcccatgcatctccacacaggagtgcctctcatgcaggtagctgcccctgccagtgtacctcagggactgccaccaccaccccctcccccaccatcccagcaggtcagctacatcgcttctcaaccagatgggaaacaagtgcagggccttccaagtgcttgtcatgtaagtaataacatgactacacaagtcttacctgctccagcagcagccccaggaaacacaggatcagttcagggaccaagttctggtaatacttcatcatcaagtcacgtccaagcctctaatgctgctgtaaaattggcagaaagcaaaaaattgcaaattcaagaaaaagcagcacaggaagtaaaattggctattaagccattttaccaaaataaagacatcaccaaggaagagtacaaagagattgtacggaaagcagtggacaaagtttgtcatagtaagagtggagaagtcaattctactaaagtggcaaatctggttaaagcctatgtagacaagtacaaatattctcggaagcaggactctgtcaagatgtctgcaaagtgcaattcaacgtgtacccttactgaaaaatcagacaactgtgatcgaaatctgattttgataaaattatttttttttattgtaggatataatgttttgttctaaatatagctgtgcactgcaacttctatatctaacccccaccctcaataaaacaaattcaagggaaaagagttagaatatgcatgctttgtgttaagaaatagcattgcttttacatccttggtttttctttttttcctaaattcacattggttttgcatgtgtataaacttatcagtttgtggagttgcaggttctcttgatcatgactcagtattgacttgactttggaaccttgggccctttaacttgatagtcacattgatccatgtttctggctgtaaaaatgcccagtagtagttactcattattttaacattccaaaaatttcatatctgtttgttgctgttctggtaacaaccaccacatcatctccattatctgcctttaagtggccatggtgtgcactgctgacagaaatgtggcctcagaagcatagtggctgccctgagtcttgaccttgcagtatgagttgcagtgctgtgtgctgaaacaacactctaaagccagattgtggtctgtaatatatcctaataaattcttttgctaaacaaagtagtgtctttaaaattttattaagttttctgggaaatgatgacttttatatcatttaaaccatttccaaatgtgttgaattatttcttggaaatttaccaaagtaatgagcatcatgattacattaacatccaggcaataaaaaaggtcagagttagctataagcatatattttaatagtagttttcctaattatataattacttttaggaaatttaaaacatttagtgatttctaaagatagaagagactgggaaacaaggaaaagtatctgtaattctaccaaagttaacttcttgaatttcaaggctggctgcaatggacattgctatgttataacctattcttttcaattcatgtattgagaatattccattttaataaaaattaatttgacagcatga

SEQ ID NO: 247 - DNA, 3215 bp, Cricetulus griseus
gaggacagtagtggaccatgatgcagagttttcaagggactaaacgagcttgtcgatgtcttgtattggatgattgtgagaaaagggaaattaaaaagatgactgtcagtgaggaagggccacttaatactgccatagtagaagaaatcacaggctatttgactgtcaatggtgttgaggacagtgactcagctcttgtaaactgtgaggactgtcagcctgacgggagcactaaacacaatagcactggttcctatgtgttgcaggaaaatcagtagctggaaatggggattcagaaacccagactccaatgttctttgggtagtaggaaggaggacagttgtagagcagtgtgatgagagcggcagtggccctctggactcaggtactggaagcatgccagtctctgcggagccagagcccgcctctctgctagactgtgcttcggctcagatgacatctttagctgaacctcaagaacatcggtataccctgagaacttcgcctcgaagggcagctccgagcagaggtagtcccactaaaaaccgcatctccttatagagaaaacggacaatttgaggagagtaatctcagtcccaatgaaaacaaatacaactgctagtgataacgtaagtgagtctcccagaaatcctgttgaaaatgcaaaggttctgtgttgtgactctcaaagctatggaagtgaaggactgagtgagccaccctcagaggccagagtgaatagtgggacatgtgccatctgaccaaagagagtgttaccagcgactgctgcagaccattgccgtccttgaggctcagcgttgtcaagcagtccaagacctggagagtttaggcaaacaccagagagaagcactaaaaaatcctattggatttgtggaaaaactccagaagaaggccgatatagggcttccatacccacagagagttgttcagttgcctgagattgtgtgggaccagtataccaacagccttgggaacttcgaaagaagaatttaaaaatacgcaaaagacattctagaagagttaagttagttttcgataaagtaggcttgcctgctagaccaaaaagtcctttagatcttaagaaggatggagagcccctctcttactccgtgttgcctttgagtgacggtccagaaggctcccatagtcgccctcagatgataagaggtcgcctgtgtgatgacaccaaacctgaaaacaaattcaaccagctgtggactgttgaagaacagaaaaaacttgaagagctcctcctgaaataccctcctgaggaagtagagtctcggcggtggcagaagattgcagatgagctgggcaaccggacagccaaacaggtggccagccgtgtacagaagtacttcataaagctaactaaagctggcattccagttccaggccgaacacctaacttatatatgtactctaaaaagtcttcagcaagcagacggcagcaccctctcaataagcacctcttcaaaccctccactttcatgacttcccatgagccgccagtgtatatggatgaagacgatgaccgctcctgttttcatggccacacaagccctgctgtggaggaggcgtcggatgaggaaagcattcctgtcatgtataggagtttacctgaatataaagaactattacagtttaaaaagttaaagaagcagaaacttcagcaaatgcaagcagaaagtgggtttgtgcaacatgtgggctttaagtgtgataactgtggtgtagaacctatccagggtgttcggtggcactgccaggactgtcctccagaaatgtctttggatttctgtgactcttgttcagactgcccacatgaaacagatattcacaaggaagatcaccagttagaacctgtttataagtctgagacgttcttagacagagactactgtgtgtcccagggcactagttatagttaccttgaccccaactacttcccagccaacagatgacatggaagagagtgccggcactagttctcgtcagcacacagcactggcatcattgttggtgctgtgtgcggttcggacactcgggcatgagagctcccgagtgttctcgtcaagtgcagctccacaccgagtggctgtggatgagcagctgaacattcctggtgagctgagagtttccctggtgaaattgtcaccaccacagagagccttgtaggtggtgatcgtgatgggtgaggtggaagcgagagcttgagttaatgccagagtaaattccaaaggtttcagagacctcagtcataactatgatgatggaaagacaaagtatttatattaaatcagttcagtagctttcagttttgtgaaaatagtattcagagcagaaactgacatatagacgaagttttaaccaatgatggtgtttgcttctaggatgtgtactctaaaagaactcactgtccggtggtcactgatggcctttagtagactggagctgcttaatggtgtggtcctaacttgtaatcacgatgaactgtccttccccagggcacagcgcgagatagctgtgcttggtttccgtaaccagctcatggggtgtgaatggcataaagttgtcacgcaggtatattttttaaatgtcatgttgtataagatgatcatgtgacgtgtacagactgtggtgaaaagtgccagtggtagtaactgtaaagtctggttcacaacattaaccctttaaaggacacagcctctgcctctgtgtcaaagaaaactgcctaatataaaaatcatatatatggtgataattttcccctcttttgtagtctgcacaagatccataaaagattgtatttttattactatttaatgagtgattaaatgtagtctgcacagtgagcaagagttcacaagcattcttttatactgctggattttgttgtgcatcatttaaaacattttgtatgtttcttatctgtgtatacagtacgttgttgaataatgttcatttgtcgggagaactgtgaggaataaagtatgtggctatgtttgtttatatataaaaatgaatacatgaacaatttctctgtaatagctcagatctggtctgtggccaaagttcaaaccatacaagtggatcagaattttaaactcttttactgtgtttgcttctgtttggaatgaaagcttccaaaggctttccagaacgatgtgagttacaaataaatagagaaagaa

SEQ ID NO: 248 - DNA, 3215 bp, Cricetulus griseus
gcctttaatccctacctggggcctgtttccccaagcctggttccagcagaaaatcttgcctactgcaccaatgttggttacagggaatcctggagttccagtgccagcagctgctgcagcagctgcacagaagttaatgcggaccgacagacttgaggtgtgtcgagagtaccagcgaggcaattgcaaccgaggagaaaatgattgtcggtttgctcatcctgctgacagcacaatgattgacaccaatgacaacacagtcactgtctgcatggattacatcaaagggagatgttctcgggaaaagtgcaaatactttcatcctcctgcacacctgcaagccaagatcaaggctgcccaataccaggtcaaccaggctgcagcagcacaggctgcagccactgcagctgccatgttttaaagcacatcatggctttaagtaccatgttgttaaggattctcatgaagtgccatagactgtacatcaaattagagtattatttcttcagtgttattattttcagagccacattttgttgcttatttgctagtactaatcaatcaaagggcaccattcttcttttctttttctttttgtttttgaaaccaaagctgtctcagaaatggccaatttaactttacagtaacaatagacagcacaacacaaactcaatacagataaactttcacatactggagatatatataatagatatataaaattattttaatgcattgtagtgtaatatttatgcatactctactatataacatgttattcaaaagggatatgccatttctgagacacaataacaaaaaaatgtttgaggaaattattttgcttctatttatagcctctgtcaaaagtcacaagactataaatgctttgcagaaatggtttcacgtttgcttaaatgcttcatcacagtcacattcaaaatagtgactctaaacaaagagaacagcaccgtcatcagatgcatgataaaccaaaatatgaaaatgggaaatgtttaattaacctagtaactgggtgggttaagtacatgggtgaattttatatgtgattcttttgttcagattaactgcttatagccttagaaagccttttaaaaattttaaaaatagatgtgcattcagtttttaagaatggattcatccaaaggaattccccttttttgtggtttggatgttgcagctagtaaaggatatttttgctctgttcagcatttctaaatatcgctgagtaggggccaggtcactggcagttctagtgtggaatgggagaagtgagagttccgttatagaactttccatacttccaagtttactgcaagtttttatgcttgagagagatgctttctaatataagactgatgtgttgattttactgattgtactgtacatctattaaagccttagattattacattacgggttggaacccataccaatgtaatttcaatcgtgttaagagagtaatggtgacttcacatgttattgtagttagttacattatagaatattacttatttttcttgttaaaatgtagtttttcatttcctacatttattagattttcattttctattaacaattgaataccatttcagtttatagactattgttttattagattttgccaatgaatttttcaaaatacaaaaaaattaaagtagtttttccttcataacatactcagttttaaattacatgtagtgtcatatgaatatccgtattattgttaactaaatgatttatattttactgatttaatattacagtgtaagaatgtcagtcattgttcttgtctagttttcattaaaagaacaaagatcttttatatggatatcttataaatatataatcattgctaagtaagaagttaagttgttgctatggcaacaatcctggcagacaattgagtaatattttgatgatttattttgtttgtaattagttattatgagaagatctagatcctagatattagaataaaatttattttctactgtatccatttcaaatgttaaagtattgtttaatatttttgaaatccctgaatatcaggccttgttataaataagctgcataatcaataaatagaacaagggactttttgttgataatccaaatactcaaagtttacgtaatgagaattttagcgtgtgtgcaaactcttgggggttgatgatgctgcagtttagcatgttggaaagtctagagagaaagattgactttttgcacttctgtatatagtcaaaagagagaaacatgtataatagcaagatcttattttgaataaaaacgtctataattacaaggagttttgttaaggctaatgaaatgacagactgagcaaaattgcttgcaaaagtggcacagagttagcactccatacccttcagacacgttgctttgctttttgtggacagcttgtagtttgccaggatatttcagctggaaagatttgccatccttccaagatctcatgactgacaaaactccattgggccaaatctgcctgaagatcattaccaaaaatagcaggtacttcagccattaaggtgaaatcatggatcagatattccttacattgttttcaaaactactgcatgtttaaaacttcaacaaaaatgagagaaagaactatgctaaggacataatattattcaaatcggtttctgccaatttcaatggttcattgttcacaaaacgaaatctttaaaacaagtattgactttcacaaaaatttaatccataaacaggcaaaccagacagcacacctgtagttgttatgtgattgttttttaattgctgtagatcttgttctttccgcaggtgaaaaaaaaaaaaaaaaaaaaaaaaaaagttcaaatttcacaattttaagtttcaactcagaagcactcaaaagagcaaaatgtgatgctggccacctgtttagtgacttggttggccagccttcaccccagctggctaccaatgttgcacttccagcaacccgaccactttcatctgctgaaaggacaatgcgcttggttttactattatgtaatcacaacttactttctgcttgtagttgcttaaaattatgtattttgtctagggctgcaatttgttttacgcttattttattattactgcagtagttgactttgctgtatggaaaaataaagtgaaattgccctaataaaacttctctttcttaagta

SEQ ID NO: 249 - DNA, 3214 bp, Cricetulus griseus
  modified_base (2571)..(2571): a, c, t, g, unknown or other
tatctgaatgattctgtctatgatggagctgttgggtacagcatgactgaaggactaggccagttgactgattggggtgtctggcctggatgattttacccagacccatgaataccacgtgtggcctggctatgactacgtggttcgcggaattgagagtgctaccaatggcttacattgagatcatgtttgaatttgaccgaatcaggaactttactactatgaaggtccactgcaacaacatgtttgctaaaggtgtgaagatctttaaggaggtccagtgctacttccgctctgaagccagtgagtggaacctactgccgtctcctttcccttgttctggatgacgtgacaccaccgaatggctagtgccatcaaatgccagtaccattttgccgacacatggatgatgttcagcgagatcactttccaatcagatgctgcaatgtataacaactctggagccttgcccacctctcctatggcacccacaacctatgatcccatgcttaaagttgatgatagcaacactcggatcctgattggctgcttggttgccatcatcttcatcctgctggctatcatcgtcatcatcctgtggaggcagttctggcagaagatgctagaaaaggcttcacggaggatgctggatgacgaaatgacagtcagcctttccctgcccagcgagtccagcatgttcaataacaaccgctcctcatcaccaagtgaacaggagtccaactctacttatgatcgaatctttccccttcgccctgattaccaggagccgtctagactgatcagaaaactcccagaatttgctccaggggaggaggaatcgggctgcagtagtgttgtgaagccagcccagcccaatggacctgagggtgtgccccactatgcagaagctgacatagtgaatctccagggagtgacaggtggcaacacctactcagtgcctgctgtcaccatggacctgctctcgggaaaagatgtggctgtggaagagttccccaggaaactgttgactttcaaggagaagctgggagaaggccagtttggggaggttcatctatgtgaagtggagggaatggaaaaattcagagacaaagattttgccctagatgtcagtgccaaccagcctgtcctcgtggctgtgaagatgctccgagcagatgccaacaagaatgccaggaatgattttcttaaggagataaagatcatgtctcggctcaaggacccaaacatcatccgtctcttagctgtgtgtatcaccgatgacccactctgcatgatcacagaatacatggaaaatggagatctcaatcagtttctttcccgccacgagcctctgagttcttgttccagcaatgccacggtcagttatgtcaacctgaagtttatggctacccagattgcctctggtatgaagtatctctcatcccttaactttgtccaccgagatctggccactcgaaactgcttagtgggcaagaactacaccatcaagatagctgactttggaatgagcagaaacctgtacagtggtgactactaccggatccagggccgggcagtgctccctatccgctggatgtcctgggaaagcatcttgctaggcaaattcaccacagcaagtgatgtgtgggcctttggggtgactctgtgggaaactttcaccttttgccaggagcagccctattcccagctgtcagatgagcaggttattgagaatactggagagttcttccgagaccaagggaggcagacttatctccctcaaccagctatttgccccgactctgtgtataagctgatgctcagctgttggagaagagagaccaagcaccggccatcattccaagaaatacaccttctgcttcttcaacaaggggatgagtgatgccatcaatgcctgccaatgttcctgtggcctgggtcctccccacaagacctactgctcacccacacacatctaagccactccgtctggacatttatggacccaagagacagagaagtgttcactttgcctcttactgtctcttgcctcctccacttcacttccctactccctaccactgattcatatatactttttttacatgaaataactaaaaaagaaaaaaaaatacagagcagataaaatttagtaaaataaatattacttgatataccaaagtgttaggtaataaaggctagaggctcagataatttataaaggttatgcttataagtataagtgtgcagatcctacaatattttccacgtcactttctgtaaaatacctttaggaagaaaacttgaagaatatgaatgtcttcggaagcatgagattatgtttaaggaaaatacttggtagccatgaagaattgcaggacttggcattccacagctaaaggatggttttcttatttggtctctctctctctctctctctctctctctctctctctctctctctctctctctctctctctctctctctctctctctctctctctttcctgtcaaagtgagtggcttgcacttaactcaccagacttttgcctcctcgcccagttctgctgngttttgtgcttgccgaagaactagattgtgattggtgaaggttcagttaatctcttgctcagaaaaattgtggccagtaagagatcccaggagacagcattttaatgacactgatgcctgcgtggcatctgctctagagtgaccaggtatttccacacattatctctatttgatagttctagggccagacatgtttctttcacaactcttgactatgtactcttgaaatttccaggactttcttatggaaactgatgtataagaattcaaatggtacttaataggaggagggatagttttcggataagaatataacacaaatgtaaacccctaatgtgagataaaacactctttcagagtagcagagaagtctcatttgcttaaatgttcttctgtaattgtaataacaactgctaaagcaaatgcaaatacaacagcttcctgggaaaaaagttgaaacttctagtttcatggatcatgactttgggttttctgttggacatttttaagctgccctgcttaagggctacatgataatagctgtctgtggcttatgaagcccctagcccacaagtgaatattttgtgaattttatgttttcaataaataaagtatggaaaaactactgaaaaaaaaaaaaaaa

SEQ ID NO: 250 - DNA, 3211 bp, Cricetulus griseus
cacggacgaggtcctcaagctgctgcaccgcggcgccgacatcaattacgccaatgtggacggactcaccgccctgcaccaggctttgcattgatgacaatgttgatatggtgaagtttctggtagaaaatggagcaaatatcaatcaacctgataatgaaggctggataccactccatgcagccgcttcctgtggatatcttgatattgcagagtttctgattggtcaaggagcacatgtaggagctgtcaacagtgaaggagacacaccattagatattgcagaggaggaggcaatggaagagctacttcaaaatagaggttaatcggcaaggtgttgacatagaagacagctacgaaaagaagaagaaaggaataatgcttagagatgcaaggcaatggttaaatagtggtcacatcaatgatgtccggcatgcaaaatactggaggcaccgcgctccacgtggcagctgccaaaggctatacagaagttttaaaacttttaatacaggcaggctatgatgttaatattaaagattatgatggctggacacctcttcatgctgcagctcattggggtaaagaagaagcatgtcgaattttagtggacaatctgtgtgatatggagatggtcaacaaagtgggccaaacagcctttgatgtagcagatgaagacattttaggatatctagaagagttgcaaaaaaacaaaatctgctccatagtgaaaaacgggataagaaatctccactaattgagtcaacagcaaatatggaaaataatcagccacagaagacttttaaaaacaaagagacgctgattattgagccagagaaaaatgcatcccgcatcgagtctctggaacaagaaaaagccgatgaggaggacgaaggaaagaaggatgagtcaagctgctccagcgaagaagacgaggaggatgactctgagtcggaagggaggctgataagacaaaaccaatggcttctgtaactaatgctcaccacttccagcacacaagcagctcctgcagctgttacgacacctactttgtcttccagtcaggggacgcctacatcacctgttaaaaagtttccaacttcaaactacaaaaatttactcccaaagaagaagaaagaaaagatgagtctcctgcatcctggaggttaggacttagaaagactggcagctatggtgcactggctgaaatcaccgcatctaaggaggcccagaaggaaaaagactctgcaggtgtgatacgttcagcttccagtcccaggctttcatcctctttggataataaagaaaaggagaaagatagtaaaggaacaagacttgcgtatgttgcacctacaatcccaaggcgactagccagtacatctgacattgaagagaaagagaacagagactcttcaagtttgcgaacaagtagttcttacacgagaagaaaatgggaagatgaccttaaaaaaaatagttcaatcaatgaaggatccacttaccatagaagttgctcctttggtagaagacaagatgatttgattagttctagtgttccaagcaccacatcaacaccaacagttacctctgcaactgggcttcagaaaagcctactttccagcacaagcactactgcaaagagtcccacggggtcttcctccgcaggcacacagagcagtacctcaaatcgtttgtgggctgaggatagtactgagaaagaaaaggacagtgctcctaccgcagtgaccattcctgttgctccaactgttgtaaatgctgcagcttctaccacaacgctgaccacaactactgctggcactgtttcctccacatcagaggtcagggagagacgcaggtcatacctcactcctgttagagacgaagagtctgaatacccaaagaaaagcaagatctagacaagcaagacagtctagaaggtcaacacagggcgtaacactgactgatcttcaggaagctgaaaaaacaataggaagaagtcgttctacaagaaccagagaacaagaaaatgaagagaaagaaaaagaggaaaaagaaaaacaggataaagagaagcaagaagaaaagaaggagtcagaaacatctagagaagatgaatataaacaaaagtattccagatcatatgatgagacttatacacgttacagaccagtgtccaaccccccagttccaccactccatcatcctcctcactttctactgtcagcagctcactctatgcttcaagtcagctaaacaggccaaacagtcttgtaggtataacttctgcctactcccggggattaacgaaagaaaatgaaagagagggagagaagaaagaagaggaaaagaaggtgaagataaatcacaagctaaatcaatcagagagcgacggagacctagagaaaaaaggcggtcgactggagtttccttttggacacaagatagtgatgaaaatgaacaagagcggcagtcggatacagaagatggttccaataagaaggagacacagacggattctgtttctaggtatgacagcagttccacgtcatcaagtgatcggtatgattccttgctgggtcgctctggttcatatagttacttagaagaaagaaaaccttatagtagcctgacttcaaaagctttatgaacaaattttagccgaaaatgaaaagctaaaggcacagctacatgatacaaatatggaactaacggatctaaagttgcagttggaaaaggctacccagagacaagaaagatttgctgataggtcactgttagagatggaaaagagggggaacgaagagctctagaaagaagaatatctgaaatggaagaagagctcaaaatgttgccagacttaaaagcagacaaccagaggctaaaggatgaaaatggggccttgatcagagtcataagcaaactttccaaataggacggagaagagaaacaagcaaagcagcaggacttgcacatactccgcagtggaccacattggcagccactggacacccgaaagaacctttggagactcatttcccgatatcctgccaaatgccctcttatctaggagttttgtttggtttcattttctgccccaccccttggttatcaagaccattgtttcatgttaaagcagctgctgagaagattctgtttttcaatgactgagaaaactcgtttacagctccagcaaataaagaaagtgttcaaggcc

SEQ ID NO: 251 - DNA, 3211 bp, Cricetulus griseus
aatatcttcccaccatcagccactctgcatctttccaacattcccccttctgttacaatggatgatttgaagaacctttttacagaagctggatgctcagtgaaggcttttaaattcttttcagaaagatcgtaagatggcactcattcagttgggttctgtggaagaagcaatccaggcccttattgagcttcacaatcatgatcttggagagaatcaccacctgagagtttccttctcaaagtccaccatctgagctctctgtgaattttagactggaccataatttcagtaaagtcttcaggcacagactgaagcagctcaagaccaattctgcctctttcacaaaagtaactctttgggagtttgatattcaagtacatttaaaacaagagatacttctttttttctgattttctcaccaatgtatgatcaaaggtttgcttttcctttgtactgcagtttctatgaaaataactttcaggaaaaaagatcaggaaaatattttttaaataatttaattccctgaattagatttcaaaaggacacttataaattatatcagatattttgcatctattgatagttattatatataaccacatggagttatattggaagcaggtttataaacatgcatgctttctttcaatgtttttttttttccactgtatgacactcctttgaataatgtgtatcttctctttcaaagactatttggaaaagcaaagtgttgcaattgtctccagggatacataagtgggattcagcctgaatctgttaaaatatcagcataattaatcattttaggaaaaaaaatcatgttttaaatttcaaaatgacatttgtcaagtaatgtaatgtgatcttggaaaattttaaaagaaaataatcctacttttttataattgttttacagaaaaaagtttacagtcttaaggaaaatattcaggtctatcatatggtttgacagattttttaaaagttatttttggtaaggtcttcttttaggtgggcttggaagagcattctgttatttttccttgtcttggattttaagggtttttttcatttcaattttaagtggttttcaataagtaatagttttattcagatttttggtgctttggtgtagagatgggatagagaagggtgagtggtttgggaataacttggtgtgcacctgtaggcctctgcccacatatttggagtatgagaaagtgggttattttttatactctgaccctctaatttttttggttgaatgtaaagtacatgttaatgttgcttcagagattgtttcatgtaaaattgttctttttaatatgaaactgcttttgttaattattccttcaaatgcttaatcagtttttacaatacagaatttgtcaaagggatcaattttgtccaccctctttcacttttagtattctcagagttgatcatctcatcttttaaagagtatctcagacttctattttcagccattaatttttctttaaaaaaaaaaaaagtctcccaaatttgcttttttcttatcacaagacactatattaattttcagtgacattttaaatttggattgcttctttattttgagttgggaactactatgtagtttattaattcatgacatgtaacatccagcataagtgtagcaaaagttattgataacagaagggaaattataatagtgttgaatgtaattctgaagtagggatggcctttaaatctgagaaaacattgaaatccttttcagggatttgtgtagatatgtgtgcgtctgtgtgtgtgtgtgtataaataagtgtatgtacatacatatactcttttaatgttatacaaacttatctcttagaaaacccagggtgtactgctatttttaaaaccaaaaagcatgcctgtgatcagagcatttttctcagcttttcctttgtcttgatctattgtcaatgagaataaaactgccacacttaaaatattcactgttgtgctaaaagaaacacaatttagattgtatataacttaaagtgtaactcagctgtcttttaaagggttttttaaggtagaagactgtttgcagtctttttcagagcaaatcctaacaggtacttatgaattgttttttaaaaatagaaaattacagaaatgttaataattgggggcgtgtaaaagagaaaaacaaaacaggaccaaagtttatgtgccttctgtagtcttaattgaccttttcttcatatttgagcctaaggtagcattggtattttgatttttcaggaaatatgtattttacagtttaagagaatgttgtcccacaaactagttatacaagcaaatagttataactgaataagcaaaatctcagttacacttttgccttcagccagaactttaaaaatacatcccatatccaggaagtactaattacaaagattgctgaccacaccaagttatacattgaaatgtcacctcattgctctgaccaaagactgcctgttctggttttaactcatctgtgaagcattttccatgagctcttttctgaaagatcccaggcagagcgagcggccttgactttccatttcctattgatgaatagactgcttagagaaaatgggaattttactgtgaacagaatggagtgggacaacaaaaatggatgttcattttcagtactgtatttgagggggaaatagcacagctagaagcctctaacattgtctagtgttttacatggtctgttcataaaattccctttttctgtttgtaagaatgttcatctaacagaagaaaatgctgtaaatatttgtaacaacattttttaaaccaggccaaaaagaaaaaaaaaaaaggttttagggaacaagttaacatataaagtggttttatagaaaacagcgattgtcttgtatattttgataagcagcagtaccagatttcatttgtaatacagtttgtggtattggaagaaaaggattctgtgattgtctaagtgaattatgttataaatgcaaagaggagaaaatattaaaaaccatattttctaactgtgtagtgcatggttaattcaaggttctgtacactacaatattggttccgttttccttcagtttgtatatttgatacctgttacttggaatctcagtctcttttcctaacaagtatagcattgtagcatgccttttaataaatgtcatggcatctgtactct

SEQ ID NO: 252 - DNA, 3209 bp, Cricetulus griseus
ggcccaagccccagctggagcagaaaacctcaaaaagctctcctcccctcttctgattttgcaaaggaggaagtgattggcatggtgaccagagcccacaaggatacctttctgtataatcaagagcatcgggaaacctcagctgagagcatgccatcccagagaggagaacggatccccaggaacgtggagcaatataatttaaatcatgaccactgtagcagtgggcttcacagccactttacctgtagtgagagccagcagcatctcagtggacagtacaaagggaggaacataatgcattacccaaatgggcatgccatttgtattgcaaatggacaggatgcatctggtttgtcctatgagcaagtctccatatgtggaccctcagaagtctgggcatgaaatctgggaagaattttcaatgagttttacaccagcagtaaaagaagtggtggaatttgcaaaacgtattcctggtttccgagatctgtctcagcatgatcaggccaaccttttaaaagctggcacttttgaggttctaatggtacgatttgcttcattatttgatgcaaaggagcggactgtcacctttctaagtgggaagaagtacagtgtggatgacctgcactcaatgggagcaggggatctgctcagttctatgtttgagtttagtgagaagctgaacgctctccagctcagtgatgaggagatgagcttgttcacagcagttgttctggtatctgcagatcggtctggaattgaaaatagtcaactcggtggaagctttgcaagaaacgctcatccgtgcactaaggaccttaatcatgaaaaaccacccaaatgaggcctccatttttacaaaattacttctaaagttgccagatcttcgatctttaaacaatatgcactctgaggagctcttggcctttaaagttcacccataaggccttggaacctgaactgatgcagctgtacattatgtgctaagatgcttatttatatgtgtataccatatgtggaattagaaaagaccttagacagtgccaggtcctgggctgtctctgtagtcagttaccagtagctgtttggatgagaactcattgccatgttagacacccacccccccccccagaccaatcggctgtgttgcacttagactggagaagttacactgagttataaccacactgaatgttagactttttcatctgccaaagccaaaataccatttgatctccctgtggtagaaatctaacacacattggtgatataggaagacttagacattaacccattgtgctgagagttctgttgtaccacaagactgaaatgtagtaagggagactgagagcctagaggtctttacatgtttgaattttgctctgccgatgtcaaagtacattgtcctagtagtccctgggttgtggaaaatgatagtgtccccaatgtcctgcctcacagagatactgaaaaatatccatgaagcatattttacctcttgggagataggcactatgtaaataaggtgaagttttattataattgctcataataatattcttgtcttatttctaagcatttcttgaaaactgtttgacagtccacaccaatctgttcagggttcctgctcaagtggggtaccctactgataaacacatattccaggtttatggacacctcagatagtatgtgtacatagtatgtatgtgaatataattatatataaaatctcacttcacaatattttaaactgtgaagaactttatcgtacaataaacttaaacaagaaggtgtcaaggacccaaattaggtgcattttacctgctgctgctgatgtataaccattgctttacgatctttaggtggtagaatactgaaattatttttatttaaagcaacatttaatgtaaaagtgtgatgggcagtcaaatccagatttcacaaaaaaaaaacaacatgtattttagagtacatctttgatgtcaagtctacagttgaaatactaggtgtttcagagcatttcagctttctcccttgtgctgatagaggtggtattgctgcctcttacctgttgcaggtggatggaaggtttgggttgtgtgtggaggatgaagttttgtttaaggaaacttccgttaaccctgttggcatgtctgtgccaagtccacttttctttccttccctaaataaaactacagggatttttatcaaattagatataatataatttgaaaaactttttagtaaagtagcaattaattgtattttgggggtaaaattgctgtctgtataatgtttggattatatgaaattgtaaagacattaagaatatgctttactattttaagcttgttacttttgtgacatgtaagcagaatgccttattttgtagtcttaacttgttgctacaggatttgaatttctgtggcacagttaagagagtttgaaaaagataaacccttgttgtcaaagaggaaagctgatggtgtatctgtcatacagtagggaccataactgctgtttaccttcagtgggtatggctttcatgggttatacaaataggttttgtgaatcctttacatgatagcattatccttttatatttttttcttagaataaacaaatacatagtttcttctatggaggatagagagcttttttgaaataatactatgttgattcttcattttttgcctttgacataagtgtctttataacatgtatctttaaaatagttaagtctttgggaatatgtaactagaactgttagtattgcttgtaatgctttagttagggttagtatatacatgtacacacctaaatataagcatgtagatttgcattttgtctcgtaaaattttatttcaataaattcttcctgtagtaatgggaaacaaaattcatagttcatatgccacatgtagtatttctgtatttgaaagttgcccaaatatgagcgttctaattctaaattaaaccagcagcctaatacaagcacactctttgattgagtcatgcttaaacaagtaataaatgacaacagccagatagggaacttctgagtcagtggggcactgttgataattaataatgtactgtatgaattaagtgaagctttaactctgacattgtggttcaaggttaaaatatgggcattatctcaccagacttatgggcattatgttagcaagatgaacctttttttc

SEQ ID NO: 253 - DNA, 3208 bp, Cricetulus griseus
caccgggcgggacccaaatgatgtgaggcccatccaagccagattgctggccccttttctgggtcctggtggaggtagaggacgtggtagtttattgctaaggcgtggattctcagatagtggaggaggacccccagccaaacagagagacctggaaggggcagtcagtaggctgggtggggagcgtcggacaagaagagaatcacgccaggaaagcgacccagaagatgatgatgtcaaaaagccagcactgcagtcttctgttgtagctacctccaaagagcgtacacgtagagacctcatccaggatcaaaatatggatgaaaagggaaagcaaaggaaccgacgaatatttggcttgttgatgggcacccttcaaaaattcaaacaagaatctaccgttgcaactgaaaggcaaaagagacgtcaagaaattgaacaaaaacttgaagttcaggctgaagaggagagaaagcaggttgaaaatgagaggagagaactgtttgaggagagacgtgctaagcagacagaactgcgacttctggaacagaaagttgagcttgcacagctgcaagaagaatggaatgagcataatgccaagataattaagtatataagaactaagacaaagccccatttgttctatattcctggaagaatgtgtccagctaccccaaaaagctaatagaagagtcacagagaaaaaatgaatgctttattttgaaggtagacgcatcgaattttgcagaacaaataaataaaatggaggctaggcctagaagacaatcaatgaaggaaaaagagcatcaggtggtgcgtaatgaagaccagaaggcggaacaagaagagggtaaggtggctcagcgagaggaagagttggaggagacaggtaatcagcacaatgatgtagaaatagaggaggcaggagaggaagaggaaaaggaagcaggtgtagttcatagcgatgcagagaaagagcaggaggaggaggaacacaagcaggaaatggaggctaagatggaggaggaaactgaggtaagagaaggtgagaagcaacaggatagtcagccagaagaagttatggatgtgttagagatggttgagagtgtcaaaaatgtaattgctgagcaggaagtaatggagactaatcaagttgaaagtatagaaccttcagaaaatgaaactagcaaagaattggagccagagatggagtttgatgttgagccagataaagaatgtaaatctctttctcctggaaaagagaatgttaattctctgcatgtggaaaaggagtctgaggaaaaagaggaaaaagaagataaagaacctgagccccaacctgagcctatggctcagcttctgcccccacctcagcccctgccccagagccagccccaccctcagctgcactctcagccccaacctgtgctccagtcccagcctctcactcagcctgagactttgccattagcagttttgcagcctccacctcaggttattcaggagcaagggaatctactgcctgagcggaaggattttcctatagagtctataaaactccctgagatgcctgtagagccagtcttgacagtacattcagaaaacaaaaataaaaacaaaactaggagcagaagcagaggtcgagcaagaaataagacaagtaagagtagaagccgcagcagtagcagcagtagttccagtagcagttctaccagtagcagcagtgggagcagttccagcagtggcagcagcagtagtcggagcagttcgagtagcagttccagcaccagtgggagcagcagcagagacagcagcagcagcactagcagtagcagtgacagtagaagtcgcagtaggggccgaggacataaccgagatagaaagcacaggaggagcatggaccggaagcgaagggacacttcaggactagaaagaagtcacaaatcttccaaaggtggtagtagtagagatacaaaaggatcaaaggataagaattcccgatctgacagaaaaaggtctatatcagaaagtagtcgatcaggcaaaagatcttcaagaagtgaaagagaccgaaaatcagacaggaaagacaaaaggcgttaatggaagaagccaggctttcttagcctatttgcagcagaagatttgatgagtaaaaggattaccttgtaaggaggatgctgccttaagaattgcatgttgtaaaaattctttttggaaaatacagactgtttgtttaccagacattcttgtactttttgcataattttgtaagagttatttatcaaaattatgtgaggttccaaaatatgtaaaaataataataataaaaaaagattaacatcccttgtcatctttttaaataccctattactcttcagtcagaatctgtatattttaataggtaaatctttaaattgttcctttatgttctgtaccatacattgcttttgtagaaataaatgtgcatctttcattatttttgggatgtccttgttaacacttgtataataaatatctttatatcattttcagtttgtcacaagatactgaacataattagaatgtttttgaaagtttcatcacttggatttgcctgataacagttaccaggtctttacagctttgacgaggaatagttctttttaagcatttaattatttcctatcttactattttaatctaagcattttcctgttttcatttaaaccattcagttggtagataatttaaacagtataatttggttgtcatttcatggttatgggaacatcattctctgtcctcacagctacttgtgtgataacaacatagtgtataaatctgtcatagttatcacctcctgggtggtgggggggagcggtaaaagtatcttctgaacttggtttttgaatttgtggtcttgtcttttctgttgactataactgaaacatgccagtatatgttttcaagaatttttgtttaaggaagtattgtatggaagtttacacaatgaaggaagctcatctaggcttgactatgtaaactattcagaagtgtaccaagtgatcattaactttgtttataaatttgtatggacttggagtatctgttgcccattactatatgtgtgcaaataaatgtggcttagacttgtgactgtttaagattagtacttgtattaacattcctatgcatatgagagcatttaaatggcagtggttatttt

SEQ ID NO: 254 - DNA, 3202 bp, Cricetulus griseus
  modified_base (3194)..(3194): a, c, t, g, unknown or other
cagtatttgcagatctatgctgtgactcccattccagagagccaggaaagtactgcagagagagggggttcctgacaacatcaagagcttctacaaagtaaatcacatctggaagttccgctatgacaggccattccacaaaggcacaaaggacaaggagaatgaattcaagagtctctgggtggagagaacatcactctacttggtgcagagtttacctggcatctcccgctggtttgaggtggaaaagcgtgaagtggttgaaatgagtcccctggaaaacgccattgaagtgttagaaaataaaaaccagcaccttcacaaaaaactggtggaccagttctttgtgatgaaatcgagctttgggatccaggagttccctgcttgtattcaggccagtcctgttcattttcctaatggaagtcctcgtgtgtgtagaaactcagcccctgcttccatgagtccagatggtaccagggtaattcctagacgcagcccattaagttacccagctgtcaaccggtattcctcgtcctcgctgtcctcccaagcctctgctgaagtaagcaatattacagggcagtcagaaagctctgacgaagtctttaacatgcagcccagcccatctacctcaagcctgagttccactcactctgcttcacctaatgtgaccagttctgctccatcgagtgccagagcttctcctttgttgtctgacaaacacaaacattccagagaaaactcttgcctgtccccaagagatagaccgtgcagtgccatttacccaacacctgtggagccttcccagagaacactgtttaatcatattggagatggggccttgccgcgcagtgaccccaatctctccgcacctgagaaagctgtgaatcccaccctagcagctggagcctggacagtgggaaagaagccaagaacatgtcggatggtgggaaacttatttctccccccgtccctccaaggcccacacagactgcttcaccagcaagacacacaacaccagtatccccgtcacctgttggacggtctccattgaagggctcagtacagtcctttaccccatctccagtggagtacaactccccaggactgagttcaaactccccggtcttgtcgggcagctacagcagtgggatctcatcgcttagccggtgtagtacgtcggaaacctcaggctttgaaaaccaaccaaatgaacagtcggtggccatgcccgggcccgtgcccgtgtccgtgcccatgcccgtgcccagcttcagcgggtcggaggagccagtacgcaaggaaagcaaaaccccgcctccctacagtgtctacgagcggactctgaggcgccctgtcccgctacctcacagcctctccatccctgtcacctccgagccacctgccctgcccccaaacccttggctgcgagatccagccacctagagaatgggacccgaaggactgagcctggcccgaggcccagacccctgccccgcaaggtgtctcagctctaagtcacttttctatgtacctgcgatgatgaattctttgccgtttacaaaataagtctgatgagaagacatttagtgtaggcactttaatatcttactcagacctttccttaaatgaatggaattaattttgcttattaatataatgttgcacaatattaaaagttactgatctaaaacgccagatgttacatgaagtatggctgagtctcattaaaacgtttctcatttgaaagtggtaaatagtgaaaagactccttttgtacctttttgtgttcacttttttttacatagtttaatctaaaaaccaatacaatattgtcaggcaacacaatgcgagatgatattgtattcctttttctgaatacttgatactctgagaaagttgatcgtgtctgcgcacagcctaacacaacggcccttccttaagaagaccctagtaattaaggtttggccctccccttgagcagaatgatgagcgcacatcctcaggattaaaagttaaagcaagctggttggtgaatcggttgctaaatctttaagtgccctgacactatgctatctactgtattacttttcaaggtgcaaattgctttcagagtcccaattagctagattaagcaaaagaaccctcccccaaggagaagtgtttacttgaaatttgtgcttccttacttgatgattacctatataaaatttgtcggagatgaagaacagacgttcaaggattaaatggacacaaattactatgtcccattaacaaggatttgggaatcaatacaggacagtattaaatcaatagtgtgaaggaagacaaaaaccttagtggaaatatattagcatgactgaatgctaaaaggactttgagaaggtgagggcattgacattcaatcctgcagaaaataaagaatttttccaactctccatccttaccaggatagtttagcttctcagctcatcccctggtccttctgttggaggaggaggattgtggaccgttctagcatggatatggcaatgtagcatcttagatggtgaatagactagacatgctgatgtggcagttgtaggagtgtgaaaatgcaccttgtatgtagtaatgtatttcttatccttgttttttccttttactgactgtttataacactcaatttacaatagatatgaactgtattttaaatcacgctgttaaatattttccctcttttgttgggaagctcatcttagtttagttgtgtttgtttttgttgctagcttatctggaaggcagtgacctactttttttatattctcttaatgaaaccattcagcaggtatatgctgttgaggctggttatagtaggttttctataataaatgttcaagtatttttgtacataactggttaattttaataagagataccattatgtaagtaaaaaaaaaagtaaaaataaaagcaaacagttgtggatgcagtatgattgttataattatgaccaaatactttatgtatggaaaatatttgtacatatgtgcttttaaatataatgtaaaaatatttatgtttagtgaaagtattcataattgaggaaaggaacatataaattttagctttgtatcttgcaggttttgcagttagaaaattttcttgaactagcgtttgcattttgataataacactctgtgtttgtaaatcanaccctaaa

SEQ ID NO: 255 - DNA, 3201 bp, Cricetulus griseus
aattaaaaaggcagttcttagcagctgcagaggaaaacctggaagtggctcgggcagctcgcctagcacagatcttcaaagagatctgtgatggtatcatctcttacaaagattcttcccagcaagcccttgcagctccacttttgaatcttcccccaaagaaaaagaacgctgactattatgagaagatctctgaccccctggatctcagcaccatagaaaagcagatcctcattgggtattacaaaacagtggaagcttttgacgctgacatgctcaaggtctttcgaaatgctgagaaatactatgggcgtaaatccccaattgggagggatgtttgccgcttacgaaaggcctattacaatgcccggcatgaggcatcagctcaaattgatgagattgtgggagaaacggcaaggtgaggcagacagcagtgagacctcagtctcggtatggcagcactgtgactgcatgggtgtgaacacagatgtggagcattacctttgtgagcagtgtgaccctcggcctgtggacagggaggtacccatgatccctcggccccactatgcccaacctggctgtgtctacttcatctgcttactccgagatgacttgctgcttcgtcagggtgattgtgtgtacctgatgagggacagtcggcgcacacctgatggccatccagtccgacagtcctacagactgttatcacacattaaccgagataaacttgacatctttagaatcgaaaagctttggaagaatgaaaaagaggaacggtttgcctttggtcaccattatttccgcccccatgaaacccaccactctccatcccgtcggttctatcacaatgagctatttcgggtgccactctatgagatcattcccttggaggctgtagttgggacctgctgtgtgttggacctttatacatattgtaaagggagacccaaaggagtaaaggaacaagatgtgtacatctgtgattatcggcttgacaagtcagcacacctattttacaagatccatcggaatcgataccctgtctgcaccaaaccctatgcctttgatcatttccccaagaagctcactcccaaaagagatttctcacctcattatgtcccagacaactacaagaggaacggagggcgatcatcctggaagtctgaacgctcgaagccacccctaaaagatctagggcaagaagatgacgctttgcccttgattgaagaggtgctggccagtcaggagcaagcagccagtgagttgcccagccctgaggagccacaacaggaaagagtcactgctgacatcagtgacaatggaaagaaaccagaggaaagtagtcaagagccccagttagccagcacacctgaggagagaaagcacaaccaacgggaacggctcaaccagatcttgctcaacctccttgagaaaatccctgggaaaaatgccatcgatgtgacctaccttctggaggagggatccggcaggaaactgcgaaggcgcactttgtttataccagaaaacagctttcggaagtgactctcaaaggaacaagaacttggagcatctggaatcagtgaagccaacaagtccggtctcttactctctgcgtgtggacaggggcggcaaaattccgtccaggcaaggggagtccggtcacgtgtttgacattaggtacttacttaaccttggagctggtggagagggagaaggagaggaagtaggcttgtctgaggcagttgagtttacttctcctctggctttacccaaggttactgtagagaggaggaccacactaggaatagcagaagctgttgggcctttacagcactttatatccagggtctccttccctcccagtctcttgaccacaagttcacaaaccatactgtgttctttacaagtaaaattaaaaagctttgctttgtcttctcaaacatacatatgcatatacattttagatgctcttataagagaaaacatggtttttaaatgtgccaagttatgtatatgtgtgtgtgtgtgtgtgtgcgtgtgtgtgtgtatatatatatgtgtgtgtgtgtatgtgtattgtgtgtgtgtgtgtgtgtgcgtgtgtgtgtgtgtgtgtgtgtgtgtgtgtgtgtgtgtgtatatgctgtgagattggtaagcaatacattagtaaacacatcctcattactctttccccaatgctggaccaatgatgtcctaactgtacatttccttccccttatgatgacgacgctctggctcatttagatagaaacatttgaccacctttcattccattgactttcttttcctttttctcctttctgtgttattcttaagggaaaaagaggagaggggatgccatagatccccttgagcagagaaaaagcaaaatattttattaaagaaaaaagagaaattaagaaaatagtttggagtattttcttactgtagagaagcattgtacattaccacgagacctgggtataagatactcacgtgtggagctggagatcgcatgtccaagcccatcggagtggtttcttttgtttctcattgcagggagtgggtgggagggaggtaggactaagggcactttgaggatctccttttagtcaaaagcaagaaaatggcaagaaagagcttaaaattcaatgttttcctttaatagtgttaaacactaaaattttaaaaaagaaagaaaaaactttgtaaaatgtaagaacagaagcaaaagacactacgctgtcattttatctttcttttgttgaaagattaaaaaccgaaatgtttttagacaatcaaatgttaggtaagtgcaaaaacttgtttttcttactggtgtagaaattaatgccttttttatttttcagttattttataataacaaaataaaacaacccccagctgccaggtgggttttggtgtttgaaatgcggggcaaagcactacatcactgcaaatagatacagagttagtctgcatgtctgtaggctgtgtgattgcggaaaatataaatgctgctaatatatttcctttttacagaaaagcatatctaaatagatgattgttttgatgttaatctttgtaaattatgtattaccaattttaacattggatgtaattgcataaaaggcttgcatctcaatccttgaaagtctagcattaaatggaaacaacttttacctaaaaaaaaaaaaa

SEQ ID NO: 256 - DNA, 3198 bp, Cricetulus griseus
caacttcgtagaaaaactctcttgccaaaaagaacagcgtgccctacaaagaacagtatggagggtgcctcaacttcaactacagaaaactttggtcatcgagcaaagcgtgccagagtgtctggaaagtcacaagatttatcagcagcacctgctgaacagtatctttcaggtgaaactgccagatgaagtagttttaaaaattttctcttacttgctggaacaggatctttgtagagccgcttgtgtgtgtaaacgcttcagtgaacttgctaatgatccaattttgtggaaacgattatatatggaagtatttgaatatacccgccctatgatgcatcctgaacctggtaaattctaccaaatttaatccagaagaatatgaacatccaaatccatggaaagagagttttcagcaattgtataaaggcgcacatgtaaagccaggatttgctgagcacttctacagtaaccctgcaagatacaaaggaagagaaaatatgctgtattacgatactattgaagatgcccttggtggagtacaggaagcacattttgatgggcttatctttgttcattctggaatatatactgatgaatggatatatattgaatctccaatcactatgattggtgcagcacctggaaaagtggcagacaaggttatcattgaaaacactagagactcaacttttgttttaatggaaggctctgaagatgcttatgttggatatatgacaataagattcaaccctgatgacaaatctgctcagcatcacaatgcacaccactgcttagagattacagtaaactgtagccctattattgatcactgtatcatccgaagcacatgcacagttggttctgcagtatgtgttagtggtcaagggagcatgtcccactatcaagcattgtaacatcagtgactgtgaaaatgtcggactttatataacagatcatgcacagggaatatatgaagataatgaaaatttccaataatgcgttagctgggatttgggttaaaaatacatggaaatccaattattaagacggaagtcacattcatcatggacgtgatgttggtgtattctacattcgatcatggcatgggttattttgaaagttgcaacatacacagaaacaggatagcaggctttgaggtaaaagcctatgcgaatcccacagtggttcgatgtgaaattcaccatgggcagactggaggaatatatgtccacgaaaaaggagaggacaatttatagagaataaaatctaatgcgaacaactttgcaggtgtatggattacctcaaatagtgacccaacaataaggggaattctatatttaatggaaatcaaggaggagtttacatctttggtgatggacgaggccttattgaaggaaatgacatttatggcaatgcgttagcaggaattcagattaggacaaacagttgccctattgttcgacataacaaaataccatgatggacaacatggtgggatttatgtgcatgaaaagggacaaggtgtaatagaagagaatgaagtttacagcaacactctggctggagtctgggtgacaactggcagcacaccagtactgagaagaaaccggatacacagtggcaagcaggttggtgtttatttttatgacaatggacatggtgtgctagaagataacgacatctacaatcatatgtattcaggggtgcagataaggactggaagcaacccctaaaattagacgcaacaaaatttggggaggacagaatggtggaattctagtttataattctggtctaggctgtatagaagacaatgaaatatttgacaatgcaatggctggcgtctggattaagacagatagtaatcctacactaagaagaaataaaatccatgatgggagagatggtggcatctgtatatttaatgggggtcgaggtctccttgaagaaaatgatattttcaggaatgctcaagcaggtgttcttatcagcactaatagtcatccagtcttaaggaaaaacagaatatttgatggatttgctgcaggtattgaaattacacaatcagatttttaactaaccgattgaggctatttttagcatctggtgttaatgtgacaatgaaagataacaaaataatagaacaaatcaagatgccatagaaaaggactgttagtagaggacaatgtttatataaaatatcaagttataccagctatcccatgcatgacttctacagatgtcatacttgtaacaccacagatcgaaatgccatatgtgtgaactgcattaagaagtgccatcagggacatgatgtagaatttattagacatgacaggtttttctgtgactgtggtgctggaacattgtccaatccttgtacattagctggtgaacctactcatgatacagacacattatatgactctgctccacctatagaatctaatacgttgcagcacaactgaattccttctctaaagaaaaagtcctgccattctaacatcgtaacttaaaacatttttggtaagattttttaaaaataccttgcccatgctacagaaagagactgtactgaaaagtggatacacaaggtcagttgacactatgaagctcaagctaccaaaaagaaagtggcaatatattgactcaggatctccaagctgggtgttttagcattactgtgtaaagacttttgaagggacagaagtgaagaaagtaagctgcaattttgtacagataccaacttgtgaaagagctggtgtttttacaactaactagcattgaatgcagtccgacttgcagtagtaatcttcaatagacaagcagctttgttgctgccgttatggacatgggtaccaattgcttttgtaatatggtaaaaatgtgagctagcacttctgcattgatttttttttttttttaacatgtattcagattgagaatatgattttaatgctttaatctcatgtagtttgtttttaatttcaagcaaaaatcttattgtacttgaatgtgccctgttttgttagcacacctagacttgctgtaactgtactcatgtcccagtatgtacgttctttctatgaaagagaaaaacactaatcttaaattatatccagcaatgtttttctggtatcctttaagaaaagttaagactattatttccttccctctcctgtgcagcattcaaaa

SEQ ID NO: 257 - DNA, 3198 bp, Cricetulus griseus
tactgctgcaggccttaacaaggagcaatggagcaatccagaaaattgtggcttttgaaaatgcttttgagaggctgctggacatcattacagatgaggggaacagtgatggaggtatagtagtagaagattgtttgatcttacttcaaaacttgttaaagaacaacaattccaatcaaaacttttttaaggaaggctcatatattcaacgtatgaaaccttggtttgaagttgcagatgaaaattctggttggtcagcacagaaagtgaccaatctacatttgatgctacagcttgtccgagtactagtgtctcccaccaaccctcctggtgcgaccagcagctgccagaaggccatgtttcagtgcgggttactgcagcaactttgtaccatcctgatggctacaggaattcctgctgatatcctgaccgagaccataaatactgtatctgaagttattcgaggctgccaagtcaaccaggactactttgcttctgtgaatgcaccttcaaactcccccaagacccaaaccaattgttgtacttctcatgtccatggtgaacgaaaggcagccatttgtgttacgctgtgctgtcctctactgtttccagtgctttttatataaaaaccagaaaggacaaggagaaattgtggcaacacttctaccgtccactattgatgcaacaggtaactcagtctcagctggtcagctgctctgtggaggcctcctttctacagattctctttcaaactggtgtgctgctgtggcccttgcccatgcactgcaagggaatgctacccagaaggagcagctgctcagggttcagctggccacgagcattggtaaccccccagtgtccctgctgcagcaatgcaccaacatcctctcccagggaagcaaaatacagacaagagttgggttgttaatgttgctttgtacctggctaagcagctgtcccattgcagtaacacattttcttcacaattcagccaatgttccatttcttacaggacaaattgcagaaaatctcggagaagaagagcagttagtccaaggcctatgtgcccttcttttgggcatttcaatttatttcaatgataattcactagaaaactacatgaaagagaaactaaagcaactaatagagaagagaattggcaaggagaatttcatagagaaactaggattcattagcaaacatgagttatactccagagcctcacagaaaccccagccaaacttcccgagtccagaatacatgatatttgatcatgagtttacaaaactggtgaaagaacttgaaggtgttattactaaggctatttataaatccagtgaagaagataagaaagaggaagaggtaaagaagacactagaacagcatgacaacattgtgactcactataagaatatgattcgtgagcaagacctacagctggaagaactgaaacagcaagtttctacactgaaatgtcaaaatgaacagctgcaaacagcagtcacacaacaggtgtctcagattcaacagcacaaggatcagtataatctccttaaagtccagcttggaaaagacagtcaccatcaaggctcccacagtgaaggggcccaggtgaacggcattcagctagaagaggtcagtcggctgagggaagaggtagaagagctgaaaagtcaccaggggctcttacaaagccagctagccgaaaaggactctttgatagaaaatttgaaatcttcacaagcgtctgccctgaatgaacaggcttcagtaacagcttcacccagagattcagagcaagttgttgaattaaaacaggagctgacagcattaaagtcccagttgaactcacaggccctggagatcaccagactcaaggcagaaaatcatgagctgctccagagagcagaagccttggcaaagtcagtccctgtacaaggagagagtgagaatgtgacaactgctaaaactactgatgtagaaggaaggctgtctgccttgcttcaggaaacgaaggaactaaagaatgaaattaaagcgttatctgaggaaaaaactgccattaaaaaacaattggatacatctaacagcaccattgccattctacaaacggagaaagacaagttagatttggaagtgacagattctaagaaagagcaagatgatctcttggtactgttggccgatcaggatcagaaaatcctgtcactgaagagtaaactcaagaacctcggtcatccagttgaagaagaagacgaatctggagaccaagaagatgatgatgatgaaatggatgatggtgacaaggaccaggatatctagctttaaaccctagggatggtagagattatgtcattactttgaagaagtcttcagacagtgctttggtttgcctccacacaaaaaataaagatttagaaccaggcagaaagcattcactaataaaattattgatgtatgttttttagtattgcctcccatgtggaaaactctaacttcatgtggaagttttatttatgttcatctgaactctcccaaaatataatttgcaaaaagcatcaggctccaaaaatagaccatttgaaggcatgtggtggcgatacagtatgccttattggttcactggtggtttgctcttcagaatctgtgacttcagtactaacacattgaatttcttttgtattgagttgaaatcattgtttctaaatcagcatttgcgttctcagctggtaatttcattgtaaagaattgattctacttatgtgtgtcatcaccccacccaccccagtgtgccttcctgaagagcaggatgggacagtgtagagtgagtgtttgccattcaatagggccacattctgccttctgaagaaaggaaagactgtccctaagtgtggagggctgttccaagaaactgcagcaatgtgttaacatggctggttttctttctgtttaagctaaagaaggaaaacaggttatagtcaacaattcatacagccgggatttagtattgtttgattatcacaaaacatgttcttagttttaaaaagacccaaactatgatttatataatttattggcatttttgctgaataggtgtaagtcagataatagatttttaaaaagcaaatgaagcaatgtgtctaagtctaatgttttcataataaaaatagatactatgttcacaaaaaaaaaaaaaaa

SEQ ID NO: 258 - DNA, 3197 bp, Cricetulus griseus
gatcaacacatcaccttgcatctcatggcttctatgaatttttaaattggtttgatgaaagagcatggtatccactaggaagaatagtaggtggcactgtttacccagggttgatgataacagctggccttattcattggattttaaatacattgaacataacagttcacataagagatgtgtgtgtattccttgcaccaacttttagcggccttacatctatatctacattcctgctaactagagaactttggaaccaaggagcgggacttttagctgcttgtttattgctattgtacctgggtacatatctcggtctgtagcaggatcctttgataatgaaggcattgcaatttttgcgcttcagttcacttactacttatgggtaaagtctgtgaaactgggtctgtgtttggacgatgtgctgctgcttgtcgtatttctacatggtctcattcattatgggatactgggtatgcaaaaaatacacattccaattattgcatcagtgtgcatcagcctacgacttgggtgtctttcttctttgatctacatattcttgtatgtaccttcccagcaggcctatggttctgcatcaaaaatatcaacgatgaaagagtgttcgttgcttttgtatgcgatcagtgccgtctactttgctggagtgatggtgcggctgatgctgactctgaccccagtcgtctgcatgttgtctgcaattgccttctccaatgtttttgagcactatctgggagatgacatgaaaagggaaaatccacctgtggaggacagcagtgatgaggatgacaaaagaaacccaggaaacttgtatgacaaggcagggaaagtgagaaaacatgtaacagagcaagagaagaccgaggagggcttaggccccaacatcaaaagcatcgtgaccatgctcatgctgatgctcctgatgatgtttgctgtccactgcacgtgggtcaccagcaatgcctactccagtccaagcgtggtcctggcctcctacaatcatgatggcaccagaaatatcttagatgattttagagaagcatacttttggctaagacaaaatacagatgaacatgcccgggtcatgtcctggtgggactatggctatcagatcgctgggatggccaacaggactactctggtggataacaacacctggaataacagtcatatagcactggtaggaaaagctatgtcttctaatgaaacagctgcctataaaattatgaggtctctggatgttgattatgtgttggttatttttggaggagttattggctattctggtgatgatattaacaagttcctctggatggtcaggatagctgaaggggagcatccaaaagacattcgggagggagactacttcactcagcagggggaattccgtgtagacaaagctggatctcctactctgttaaattgccttatgtataaaatgtcatactacagatttggagaaatgcagctagattttcgcacacccccaggttttgaccgaacccgtaacgccgagattggaaataaggacattaaattcaagcatttggaggaagcctttacatcagagcactggcttgtcagaatatataaagtaaaagcaccagacaacagggagacactaggtcacaagcctcgagtcaccaacatcttccccaaacagaagtatttgtcaaagaagactacgaaaaggaagcgtggctacattaaaaataagctagtttttaagaaaggcaagaaaacctctaagaagactgtttaaacacactgttctggcctgacttgcagcagtcgtccttgtgagaaccggtctttgccttcagctcatgtcctgtttcacagcaccaagggtacagaaccatcgctgggccaggtcaatgtacaaaattttctggcaatgtctcatttaaaattaaattggtttattgagaacagctgttttcaatttgtaatgtgaagcaagacagagccatgctgtgagcatctggcagaagatttttattattattattattattggtacatattacccttcaaatatgagaatttggactaattgcaccaaagaaccctctaatttggtccctggcacatgcatacttgtcagtttcttttttccttttacaagacctgcattttatttgaattacccaaatagcaatatgtaagacacaaatgacagctgtaacaagagcttcttgaccagtaaacaaactagcccagatctgagaaagaagtgttagaggagagtccttccatgaactctatttattttccggtttctccggtgtgaagagtgtttcatcaaatgtccactttgtcactcactgccgctataagcagctgctgctgacggtgggcctctgtgttgctatcggactagataggtgtttatgttcaggcatgcatccgcactgcggttagcaggtgttttcaccaggtacttaacagagcagatttcatgcattgttcattcaagggctaaatttatatcctttgggaatcatggcaagcacacacagaatgttgctggctgggatggctttgttacattagtactgaggttggcaccgtgtttacactcagaagattaaggggaaagcccttaaagtggacaggtatccaaagttcatttctgtgacttcaaaatgacaaaggatttgtaaactttgcctggattttcctcattttataccagttttgttcatcacaatgatttctgttcactgctccatgttttttaataccgtaagcatttgatgaaacactctttagtgctatataggcattttcttacttttattacaaatgtgacaattgtcaaaagatgcactaaaatataaatggagactgaacatgttcattttccagcttataggcaactttatacagacttgaaaactttatccagttgtttagtaaagtgagagagaaaggtttcctgccgcaggagaactttttatacaacacgccactgcttttggtggggaagtacagaatagtatgtaccttttatgaagaaaccgtaatttacaatgttctgtgagaatgttactgctgatttcctttttcaaggtgtagaatattctttgatttatagaattcatttttgacccggatgatggttcttttacagaccaataaaaaaaaaaaagttaattaaaaaaaaaaaaaaaaaa

SEQ ID NO: 259 - DNA, 3195 bp, Cricetulus griseus
gtggactacattacaataagacagaggctgtctgacagagcagattaccctgaagtagttagaatggtatcttgcaatatattcagaactctccctcctagtgacagcaatgaattcgacccagaagaagatgaacctaccctcgaggcgtcgtggccccacttacagcttatatatgaatttttcatacgatttttggaaagccaagaattccaacccagcattgccaaaaaatacatagatcagaaatttgtattgcagcttctggagctatttgacagtgaagacccccgagaacgagactatttaaaaacagtcttgcacaggatttatggcaagtttcttgggcttagagcatttatccgaaaacaaattaacaatatttttctaaggtttgtttatgaaacagaacacttcaatggtgtagctgaactgctggaaatattaggaagtattatcaatggcttcgctctaccacttaaggcagaacacaagcagtttctggtcaaagtgttgatccctttacatactgtcaggagtttatcactcttccatgcccagctggcgtattgtatagtacagtttctggagaaagatccttcacttacagaaccagttattagggggttaatgaaattttggcctaaaacatgcagccaaaaagaggtcatgttccttggggagctagaagaaatcttggatgtgattgaaccatcacaatttgttaaaatccaagaacctttgtttaaacaaattgccaagtgtgtttctagcccccattttcaggtggcagaaagggcactctattattggaataatgaatacatcatgagtttgatagaagaaaactctaacgtcatccttcccatcatgttctccagtctttataggatttcaaaagagcattggaatccggctattgtggcgctggtgtacaacgtgttgaaggcctttatggaaatgaacagcactatgtttgatgagctgacagccacatacaagtcagatcgtcagcgtgagaaaaagaaagaaaaggagcgtgaagaattgtggaaaaaattggaggatctggagttaaagagaggtcttaggcgcgatgggataattccaacttaacaacaatctgaccgcgacatcactaacccatggggtcacacgcttatgtagtagaaggatggagcaacagttttctgtattgtgcaactttacagtagatttcacatttgtctcattattacaacagcactgtatatacctgtctctaagtaaaggaaaacataaggacttcaatccaaagtttggacagtagatggacttctcagaactttgcaaacataatcattgttctaaccctcttaaaaacaaacaaaacaaacaaaaggtcttcagagatctgttggtgaaattgctatgttaaaattccattatcaggagttctttatttatcactagcagagagtatgatacaattttcaaatgtgaacaatcttaaatttagcttgtctttctgctaagctgttaaatgtatttatagtaaagggagaaaagattgtcatttctttataagtttgtataacaccctcctctggacaacttgactgtaatttgacatcctttccttttgcacatcctcatgagtcgaatgtccacgtggagtggagcagtgaattacagaggtcccttgtgaaatgtgtccactgggtgaacatcttcccagtggccaggtgttcctggtactcctttagttttccgattaggagttaaaaaagaagaggtgataaacatagtagcgaagggaatgttgggcttcgtatcagatatggtgagtccaaatcaatgtcttgaatcctttgaaaacaggcagcgggatgtgtgcgccacaggcttcagcacctccagcattagctgcagacatccttgtgcatccagaccagagacgatttagaaatgtcagaggaacatcctttccgaccctatgaagcaaggaagacagaacactaagcggtataaccatgaagttgagcaccaggactgcgcatccaattgggaacccagttgagcaaacagcacgaactgtttggagttgttgccttactttctaatgtacttataaagtatttcagcaaaagaggatgcagatcctcattctatagctcatcacagcgccagccctgtttttagccagagaggattcaggatcaacattatgcgttctgacatggatgcatattcctaactactgtatttgttaccaaaagtggttctacaaatgctactgaaaaaaaatctggaaattcctaatgtcctgagtattaataataaagtttaaaaaatgcttttatatcaaaagtgcattgtgaccaaattgtttaagaaaaaaaaaaaattgctgatatactggtgtgcagtatgtatttgcctgatgtggttgcattgctgtgtactgacaaatgtgtgttgtggggtttgtttccagggaagcttttgcttgttagagacagacaggtcagcagtgagccggcaaccccgaaccatcatgtccagctgtgttcttggtgtagagccagttctgtgttgatatgttgagttgtgatcatagctaatatgaacacatgatctgttgttgctctcagtagaaatgccgtataaatatgagcttgtatattttcttccttttaaatgtaaagtagaatatgcagtctttgttgtttgcaagacaaaggaggggaagcattgacctttctctacttatgaagttgttttcagtattgtcagtcacactgtgtacaataaaagtaagaaagggacaatgtgacacttctgtcacattgtgtgtggtgacgagaagctagcccaggtaacctgattgttgcactttgtgacatacttaaggacatacttgctgcatttgcagcagccccctgtctgaccctccctgggcaatcctgctgtcgctcatcttgagttaactgtgacaaattcagctctgtgttctattttgtttgcttcatagtttccagaactatatataaatatattttttcaattagcaaatattgtagttagcgagtggtgaacactctaaccttatccctaccatattggtttcagggataggaccaagagtgtccttggaataaaaacaaataaaattttaagaaaagaaaaaaaaaagttaattaataacccctaaaa

SEQ ID NO: 260 - DNA, 3193 bp, Cricetulus griseus
gaaattgggggaagggggcgcaccggcgacagtaggtcctatgggcctgagtaccatcagccgggccaagcgtgaccagacgtggcgagaggacgtagtgaccaatggcattggccgtgtggaaggcattgcagtggactggattgcaggcaacatctactggacagaccagggtttcatgtcatcgaggttgccgactcaatggctctttccgtcaagcctcgggccatcactgtccacccggagaaggggtacttgttttggaccgaatggggtcattaccctcgtattgagcggtctcgcctagatggtacggagagagtggtactagtcaatgtcagtatcagctggcccaatggaatctcagtagactatcagggtgggaagctctactggtgtgatgcccggatggacaagatcgaacgtattgacctggagacgggtgagaaccgtgaggttgtcctgtccagcaacaacatggacatgttctccgtgtcagtgtttgaggattttcatctactggagtgacaggactcacgccaatggctccatcaagcgcggattcaaagacaacgccacggactctgtgcctctgagaactggcatcggtgtgcagcttaaagacatcaaggtcttcaacagagacaggcagaatgggtggccggaaacgtgtactggaccgactctggccgagacgtgatcgaggtggcacaaatgaagggagagaaccgcaagacactcatctcgggcatgattgatgagccccacgccatcgtggtggacccgctgaggggtaccatgtactggtcagactggggcaaccaccccaagattgaaacagcagcgatggatgggacccttcgagagactctcgtgcaggacaacatccagtggcccacaggcctggctgtggattatcacaatgaacggctatactgggcagatgccaagctttcagttatcggcagcatccggctcgatggcactgatcccgtcgtggctgctgacggcaaacgaggcctcagtcaccccttcagcatcgacgtgtttgaggattacatctatggcgtcacttacatcaataatcgtgtcttcaagatccacaagtttggacacagccccctgatcaacctgactgggagcctgagccacgcctcagacgtggtcctctaccatcagcacaagcagcctgaggtgaccaacccctgtgaccgcaagaagtgtgagtggctgtgtctcctgagccccagtgggcctgtgtgtacctgtcccaatggaaagagactggataatggcacctgtgtgcccgtgccctctccaacaccccctccggatgcccctaggcctggaacctgcaccctgcaatgcttcaatggtggtagctgtttcctcaatgcacggaggcagcccaagtgccgctgccagccccgttacacaggcgacaagtgtgaactggaccagtgctgggggtactgtcgaaatgggggcacctgtgccgcttccccctctggcatgcccacgtgccggtgccccacaggcttcacgggccccaagtgcacgcagcaggtgtgtgcaggctactgtgccaacaacagcacctgtaccgtcaaccagggcaaccagccccagtgccgatgtctacctggcttcctgggtgatcgttgccagtaccggcagtgctcaggctactgtgagaactttggcacctgccagatggctgccaatggctcccgacaatgtcgctgcactgtctacttcgagggaccaaggtgtgaggtgaaaaagtgcagccgctgcctccaaggagcctgtgtggtcaataagcagaccggagatgtcacttgcaactgcactgatggccggatagcccccagttgtctgacctgcgttgatcactgcagcaatggtggctcctgcaccatgaacagcaaaatgatgcccgagtgccagtgcccgccccatatgacaggaccccgttgtgaggaccacgtcgtcagtcaacaacagcctggacatatggcttccatcctgatccctctactgctgctcctgctgctgcttctggtggcaggagtggtcttctggtacaagcgccgagtccgaggggccaagggcttccagcaccagcggatgaccaatggggccatgaatgtggaaattgggaaccccacctacaagatgtatgaaggtggagagcccgacgatgtcgggggcctcctggatgctgattttgcccttgaccctgacaagcctaccaacttcaccaacccagtatatgccacactctacatggggggccatggcagccgccactccctggccagcacggacgagaagcgagaactcctgggccggggacctgaggacgagataggggatcccttggcatagggccctgcccccaacggacatccccagaaagcccctgccagacacgagtccttcaatgagccccctccccagccagcccttctccggccctgccggatgtacaaatgtaaaaatgaaggaattactttttatatgtgaacgagccagcgagcacagtattatctcttccattacccttcctgcctgctcctcagccaccccccccatgctgccttgagcgggcagggagggctctgtggctcaaaggtatgaaggagcccatctctgttccctactacacacccggaagctggtgacacagccttctgcctgtgcgagacactcgtcagggctccctgtcccagcttccacctcctcagttatctgggggttccttctggggaggtggagtcctctgctgaccctgtctggaagatttggctttgtgaggtaggaatgaatttttagtccttgagggaagtcaccccaagtcccagctcccacttttggggcacctctgagatggccatgctcagtatcccttccagacaggctctcccctctccagtgcccccactgtggctcctagggctgtatacattctttggtaactgtcccccagctccccctccccttgaggaccaggaagagttggggcataccaaggaagggcaagcgggcagccccattttggggacgtgaacgttttaataatttttgctgaattcctttacaattaaataacacagatattgttataaataaaattgtaaaaaaagaaaaaaaaaagaaaagaaaagaaaagaaaaaaaaaaaaaaaaaa

SEQ ID NO: 261 - DNA, 3192 bp, Cricetulus griseus
  modified_base (1546)..(1546): a, c, t, g, unknown or other
  modified_base (2577)..(2577): a, c, t, g, unknown or other
aatgtccccttgtctgtagagatgatttgcagtgcagcccggctgaagctgaccgaatgagactatgggctgtgcctctgccaagcatgttgctactgttcaaaatgaagaggagtctcagaaagggaagaactaccagaacggagatgtgtttggcgatgagtatagaatcaaacctgtggaagaggtcaaatacatgaaaaatggggcagaagaggaacagaaaatagcagccaggaaccaagaaaacctggaaaaaagtgccagctcgaatacaaggcttaaaactaataaagaaatccctggattggtccagcaacccagagcaaacatgcacatctctgaaagccaacaagaattcttcagaatgctggatgaaaaaattgaaaagggccgggattactgttctgaagaagaggatatcacatagcatcggttctcccactcagaccaggagctactactgtgtaaataggttacaccccagttgaaacctttgcaaaggtcggttctcttcaccgaacagcactatagcaaaagaagaccgttccatatcgtatgcccccttaaatcacagtgtttcttaatgaacctgacaaaggaatattgctaaacacaaacacacacacacacacacacatccacacatccacacaacaaaaaaaaaaactgttctggaactttctttgttgctgctagttaaaacttgttgcaacttttcacttctctcgtgtccaattatgcagcaaagttctgcacttcaccttaaagatactattggttatccgatactctccagcctgttttctataagacgagatagtgatgaactctgttacagacttcagttctagcctggttctgctttgaagtcaagcttctcctcccccctttcctccttgtccatctcttctacgtggtccagagatggccctgagccttgcttctcaactaggtaatgtggtctttggagatgggatggtggcttttttttcttaagaaataaacattttactgtttttatgtatccttgtcttctcccattcatccagttcagcattttcagatgatcttaggtgtggaagccaagtgttccttcatagcttctacccagatgattggcctaaatggctccccacccgtctgttgatggctaccttggtttggaagggctgtgagtggttagaagagatgaggggacaaccccatgacttcttaggagggctggaaaccgtggggagtgttgactgtgtgtccagtagagtttatttttccatgctatatgaagaggatgatctcttctcaaagacagaagtaatatttttaacaaatattgtcacaagtaaatagcaatcaaaaggagaaaataacttttgtatttttttatcatgtttgatagctttgacgagggttctctttgttactttcaggggagggcaccctattaaatgccatgccagcagtccagggttgggtttgtcctacacacacacacacacacacacacacacacacacacacacacacacgaatgctgtgtttttcnctcttggagggttgtgagtttcagggacctcactatcagccacactgccacctttggaaggtggaataagttacaagagggatggttaagatgttcccagttgtcaaaaaatggactacagaacaaaataaaatagcaaaataaattcgtgccaaaacaagcaatgagccttcaaaactttccgaaaaatggccgaaaaatggcaagattcttcatctcctgccagacccaaggcaacaaaagggaaggaaagaaaatgcagtcgagtgctacagaaaacggactcgagtgtaagcaacaaaatcccataattcttgcagccagcagcagctattttggggagcagctgtggttgttacataaatagagttacagccaaaagctaaggcttttttatccagcatcaagcagaaaaatgcagggagagtcgagtagtctagggttttaagttccctccccttgtatggtttttggccaaaggacgaaaatagttttcctcaactgtaaatgaactgctaaaccccacctcaacttgttcactggagactttgttcactgttctgtggatggccttttccggaatctcatgtttatatcaagcaagaatgaaatgagtgttaacgtcttccatttgactcctctacttggtgtctaagagtgtcttaccagaaaaatcaccaccctctacccgaagatgaaacacccttgtccttttcctcagtcacatttagcattttggatgttacacatgtttcttggaaacctgacttttgagtgttaataaaaccctaagtgctgtttaggaaacagcggtttttcacagttctgtctcccgtgtttcacactggataccctccttcgctacacagaagtgagttcatcttcagacacatttggtacctctagaaataggtccaagaaatgggatggttgatgcgcagctttcttttgctttggcagagattcagggtcacagagtaccgctctcataattgaatacgtgtttcttgctggcagacaaactcaaaagnggctttttacctccatgaggcctcctagtgtccttgcccaggttcgtctctctctctctctctctctctctctctctctctctctctctctctctctctctctctctctgggtatctcctggcatgttggatactcacttgaacaccactacttggtgcaaatcagtatgccatgatggcatccccagaccactgtttggcactcagcctatagatggaagaagtcacaaggcaatccccaagagctttgactctgagaaatctgaggcaagcaaactcacacagtgtagatttaaatacctgaggcccctgatgggagagctggacagtagtggctactggtgctaagaacaggtacactggacagggccaggtgttgtccaccttccctcccgcatctccagaaaaggacattgtacaaaaaaccccaagactgtctcctgaatggaattgcgtgaaccctcaaaagtgcttcagctgtaccgatcccatggcaccagtggactgtggcttgcatattatttttgattttgactatcgggatgttatgatgattttgttccactttgaaaagggtcttaaataatatgaacagttaaaaaaaaaaaaaaaaaa

SEQ ID NO: 262 - DNA, 3191 bp, Cricetulus griseus
cgcggatcaggagctagcgtctcccgcccgcctgccgccccggtgccgctgggaggaagcgagagggaggctgcctgagggtttgtcaccgctgttgatccaccgcctgagtgagtcaagcccgggcctagccggtcgcctgccattctcgtagccgttaccctcaggccgccacagccgccgaccgggacaggcgcgcgccatggcctctggagccgattcaaaaggtgatgatttatcaacagccattctcaaacaaaagaaccgtcccaatcggttaattgttgatgaagccatcaatgaagataacagtgtggtgtccttgtcccagcccaagatggatgagctgcagttgttccgaggtgacacagtattgctaaaaggaagaagagacgggaagctgtgtgtattgtactttctgatgacacatgttctgatgagaagattcgaatgaatagagttgttcggaataacctccgtgttcgcctaggggatgtcatcagcatccagccatgccctgatgtaaagtatggcaaacgtatccacgtgctacccatcgatgacacggtggaaggcatcactggcaatctctttgaggtataccttaagccctacttcctggaagcttatcgacctatccgtaaaggagatattttccttgtccggggtgggatgcgtgctgtggagttcaaagtagtagagacagatcccagcccttactgtattgttgctccagacacagtgatccactgtgaaggggagccaatcaagcgagaggatgaggaagagtctctgaatgaagtaggctatgatgacattggtggctgcaggaagcagctagctcagataaaggagatggtggaactgccactgagacatcctgcactctttaaggcaattggtgtgaagcctcctcgaggaatcttgctatatggacctcctgggacagggaaaaccctgattgcccgagctgtggcaaatgaaactggagccttcttcttcttgatcaatggacctgagatcatgagcaaattggctggtgaatctgagagcaaccttcgtaaagcctttgaggaagctgaaaagaatgctcctgctataatcttcattgatgagcttgatgccattgcgcccaaaagagagaaaactcacggggaagtagagcgtcgtatcgtgtctcagttgttgacccttatggatggcctgaagcagagagcacatgtgatagttatggcagcaaccaatagacccaatagcattgacccggccctacggcgatttggtcgctttgacagagaggtagatattggaatccctgatgctacaggacgcttggaaattcttcagatccataccaagaacatgaaactggcagatgatgtggacttggaacaggtagccaatgagactcatggccatgtaggtgctgatttggcagccctgtgttcagaggctgctctgcaggccatccggaaaaaaatggaccttattgatcttgaggatgagaccattgatgcagaggtcatgaattccttggcagttactatggatgatttccggtgggccttgagtcaaagcaacccatcagcacttcgggaaactgtggtagaggtgccacaagtaacctgggaagacattggaggcttggaagatgtcaaacgggagcttcaggaactggttcagtatcctgtggagcatccagacaaattcctcaaatttggaatgaccccttccaaaggtgttctcttctatggacctcctggttgtgggaagaccttgctggccaaagccattgctaatgaatgccaggctaacttcatctctatcaagggtcctgagctgctcaccatgtggtttggggaatctgaggccaatgtcagggaaatttttgacaaggcacggcaagctgccccctgtgtactattctttgatgagttagattcaattgccaaggctcgtggtggtaatattggagatggtggtggagctgctgaccgagtcatcaatcagatcctgacagaaatggatggcatgtccacaaaaaagaatgtgtttatcattggagctaccaaccggcctgacatcattgatcctgctatcctaagacctggccgtcttgatcagctcatctatatcccacttcctgatgagaagtcccgtgttgccatcctgaaggctaacctgcgcaagtctccagttgccaaggatgtggatttggagttcctggctaagatgacaaatggcttttctggagctgatctgacagagatttgccaacgtgcttgtaaactggccattcgtgaatctattgagagtgagattaggcgagaacgagagaggcagacaaatccatcagctatggaagtagaagaggatgatccagtgcctgagattcgcagagaccactttgaagaagccatgcgctttgctcgtcgttctgtcagtgataatgacattcgaaagtatgaaatgttcgcccagacacttcagcaaagtcgaggttttggcagcttcagattcccttcagggaaccagggtggagctggccccagccagggcagtggcggtggcacaggtggcagtgtgtacacagaagacaatgacgatgacctgtatggctaagtgaaaagccagcatgcagcgagctggcctggctggaccttgttccctgggggtgggggcacttgcccaagagggaccaggggtgtacccatggcctgttccattcctcagtctgaacagttcagctccagtcagactctggacaggggttttctgttgcaaaaaaaaattacaaaagcgataaaataaaagtgattttcatttgggaggtgaagagtgaattaccagcaaggaattgggccttgggcctacaccatttctgttgtagtgtggggtggtgctggcaacctgtggggtgtgaaccaaggcactacccttgtcatcaccacagtaaagcatctgtacttccctcaatactgcccaagccctcccttacccttagccaacctgggtaggtggatgaggggccactgtttgctgggtgtttatatagaaagtaggctgattttattttacatgcttttgagttactgttggaagactaatcataagcagtttctaaaccaaaaacaaaaaataaaaaaaaaatgacatgttgtaaaaggacaataaatgttgggtcaaaatgg

SEQ ID NO: 263 - DNA, 3190 bp, Cricetulus griseus
gaggcgcggacgctcggcttagtcggctgcggcccaggctctcgacgcggcgcggggcggcagaaattctaaaataaatccatcagaatgacaccttctcaggttacctttgaaataagaggaactcttttaccaggagaggtttttgcaatatgtggaaactgtgatgccctgggaaactggaatcctcaaaatgctgtagctcttcttccagagaaagagtcaggagaaagtatgttatggaaagcagtgattactctctgtagaggagtatcaattcagtaccgctacttcagagggtgctttttggaaccaaagactatcggtggtccatgtcaagtcatagttcacaagtgggagactcatctacaaccacgatcaataacccctttagaatgtgaaataattattgatgacggacaatttggaatccacaatggtgtcgaaacactggattctggatggctcacgtgtcagactgaaataagattacgtctgcattattctgagaaagctcctgtctcaattaccaagaaaaaattcaaaaaatctcgatttagggtaaagcttacattagagggtctggaggaagatgatgatgatgataaagtatctcccactgttcttcacaaaatgtccaacagtctagaaatatccttaataagtaacaatgagttcaagtgcaggcactcacagccagaatgtgggtatggcttacagcctgatcgctggactgagtacagcatacagacaatggagccagataacctggagctaatctttgtactttttgaggaagatctcagtgagcacgtagttcgagggtgatagagttgattttatcatcatcaagccattaccaggatacagttgttctatgcagtcttcattttccaagtattggaagccgagaacaccactggatgttgggcatcgtggtgcagggaactcaacaacaactgctcagctggctaaagtacaggaaaatactatcgcttctttaagaaatgctgccagtcatggtgcagcatttgtagaatttgatgtccacctttcaaaggactttgtgcctgtggtatatcatgatctcacctgctgtttgactatgaaaaagaaatttgaagctgatccagttgaattgtttgaaattccagtaaaagaattaacatttgaccagctccagttattgaagctttctcatgtgactgcactaaaagccaaagatcggaaacaatgtctggttgaggaagaaaataccttttctgaaaaccagccatttccttcccttaagatggttttagaatcattgccagaagatgtaggatttaatatagaaataaaatggatttgccaacacagggatggagtatgggatggcaacttatcaacatattttgacatgaatctgtttttggatataattttaaaaaccgttttagaaaattctgggaaaaggagaatagtattttcttcgtttgatgcagatatttgtacaatggttcgacaaaagcaaaacaaatatcctatattatttttgacccaaggagaatctgatatttaccctgaactcatggacctcagatctaggacaacacccattgctatgagctttgcacagtttgaaaacattttggggataaatgcccatactgaagacctgcttagaaacccatcctatatcgaagaggcaaaagctaagggattggtcattttctgctggggtgatgataccaatgatcctgaaaacagaaggaaactgaaggagtttggagtaaatggtctaatatatgataggatatacgattggatgcccgaacagccaaatatattccaagtagaacagttggagcgcctgaaggaagaattgccagagcttaagaactgtttgtgttccagtgttagccactttgtcccttctttgtgtggggagtctgatatccatgtagatgccaatggcattgataacgtggagaactcctagtttgtagtgcacagaggacatctgggggcatgcacactgctctgaggctcagtgtcatcgttgagcactgcttctctgccttttaggtttctcaatccaatgaagcaataatgaagtatgttactatttcattacagttcctgcaagaatatcaagtatgctatttacacttggccaggtataattgtcaatcagtctgtacaatgaaaaaatgtactgtataaatatattcagtgggatatctaagcctataatattgaatcttcattataagcatagttagaaattaattatagatatctgatatttaaagttcaggcttttcatttgattagttcttaaatcttcagtattgagaaaaatgactgcaaaattatacctgaccatggaaaaaataagtacctcaaatgcatgcatttgcactggtggctccagctgtacagatctttgtgtcatctgtgtacataggtctctttatatgagttgatatgaacatgcaatgttttcattcagtataaacctcagactgctgccacttccccactgacccaaaccagcctgcagatgaaccatgaaacttgttccgtaaacctttccaaattaaatttctggaatgctgcagggtaacttaatatataaaatgtttagtgagaagtacatattgcatatatagtagtacagatcacaatatacaaacaaatctgactcaatgcgtgctttaggttttaagcatgagattgtacatgtttactgttaagtccttgcatctggtgctaggtgagtgagaagatgtcaaggactgaaaatattttgtcgcctaaaaaacaaggtctgtttgtagacactttgaatatcctttttagtgtctcactacctagtaagtgtctcactacctagtacaagtaattgctgtgtgttacacagagttaaatccccatgcagaaaataaatgtcctgaattcacaaagtggtattctttattgtttaatatatatatcatgtatgtaatttatttaggaatgtagaagatcttactgtatataaatgcatgtttttaggattatactaagatttcttcactagaagcagattgtattgataaaactgtaacttcagaatgaatgttaaataaaatgacagatttatttttttcttcatcttaaaatggaatttcaagaaggtcctgtgtagccttggctgtccttgaac

SEQ ID NO: 264 - DNA, 3186 bp, Cricetulus griseus
  modified_base (2459)..(2459): a, c, t, g, unknown or other
tgtcattggaggaggagccacaggaagcggctgtgcgctagacgctgtcaccagaggactaaaaacagcccttgtagagagagatgacttctcatcggggaccagcagcagaagtactaaattgatccacggtggtgtgcgatatctccagaaggctatcatgaagttggatgttgagcagtataggatggtgaaagaagccctccacgaacgagccaacttactagaaatcgctccccatttatcagctcccttgcctatcatgcttccaatttacaagtggtggcagttaccttattactgggtgggaatcaagctgtatgatctggttgcaggaagtaattgcctgaagagcagttatgtcctcagcaaatccagagccctcgagcatttccccatgctccagaggacaagctggtaggagccattgtctactatgatggacaacacaacgacgcacggatctgccaggtatggggctgccacagccaattacacggaggtggtaagcttgctcaagaagacagaccctgaaaccgggaaacagctcgtgagtggtgcacggtgcaaggatgtcctcacagggcaggagtttgatgtgagagccaaatgtgttatcaatgccactgggcctttcacagacgctgtgcgcaaaatggatgataacaccgctcctgccatctgccagcccagtgcgggcgtccacattgtgatgcctgggtactacagtcctgagaacatgggacttcttgatcctgcgaccagtgatgggagagttattttcttcttgccttgggagaagatgactattgctggcactactgattcgccaacagacatcacatctcatcctattccttcggaagaagacatcaacttcatcttgaatgaagtgcggaactacctgagttgtgatgttgaagtgagaagaggggatgtcctggcagcatggagtggtattcgtccccttgttaccgatcccaagtctgcagacactcagtctatctcccgaaatcatgttgttgatgtcagtgagagtggcctcatcacaatagcaggtgggaagtggacgacatatcgctccatggcagaagatgctgtggatgcagctgtcaaggtccacaacttgaaagcaggaccgagtaggacagtggggctgttccttcaaggaggcaaagattggagccccacactctacatcaggcttgtccaggactacgggcttgagagtgaggtggcacagcatcttgccaccacctatggtgacaaggctttcgaggtagccaaaatggcaagtgtgactggaaaacggtggcctattgttggagtgcgtcttgtgtcagaatttccatacatcgaagcagaggtgaaatatggaattaaggaatatgcctgcactgcagttgacatgatttcacgtcgcacccgcctggcctttctcaatgtccaggctgcagaggaagccctgcccaggattgttgaattaatgggtagagaattgaactggagtgatattaagaaacaggaagaacttgaaacggccacaaagtttctgtattatgaaatgggctataaatctcgctcagaacaactcacagaccgtactgaaatcagcctaatgccttcagacattgataggtacacgaagagatttcatatgtttgatgaagacgaaaagggctttattaccattgttgatgttcagcgtgtcctagagaatatcagcatgcaaatagatgaaaacacactacatgaaattctcagtgaagttgatttgaacaaaaatggccaagttgaactcaatgaatttctgcagctgatgagtgcaattcagaaaggaagggtgtctggaagccgccttgccatcctgatgaaaactgctgaagagaacttggaccgaagagttccaattcctgtggatcgtagttgtggaggattgtgagtctgaccagtaaatcgacagccaacaagcataggacagccagtaccatgtaccagccagagttgacttaaatcactctaaaatagtgagatagcattattatttttcttcttagaaaagcatttgacctattgacatgatcaggttttgggagacttcccagctctttctttctacctccccttccaaataatactgcacatttttctgtcttgagtaaggctggttaatctggagagggaagacaaagttaagatctggttgagatttggttacatttctaaaagaaaatctctgaaagcttccagaatcacaggagtaagataaagacagcattgacatttgccgggaggtacagtgatagttgcttctcaacagtttctattttttttctatcatgacaataaagttcattttctacctagtgacagttaagtcggcagaagcactgtcctttaagacatcccaaattatatatcacaatattctacatctgtactccctcctctctcttttnttctctttttctttctagttagatcaagataacgatggcttgtatccccccggttctcctagggtagggactgggcttagagtgtgactcgggctcaggccgatctgtgtttggaaagcaggtcttgtttgttcatgctttgctatgaatgaagttcctttaaggacaaagagaagcgcacttttcttcatttgagcatatctgctgtggcttaaaaatctgctcgctctaagacacgctccttcaccaatcccacagactccttttggaaggaactgctttcatgacattcctattgttttcttcccctctttttatgcatttgtaaaaaggtcttttgcatatgaatgtaatcacatattgatgtcactgatgctgtaaactttcactgctttctacgcgagggagaaaaaaaccctactatgtttgaaaagaatatcaagtcttagtccagtactgggtggacatagtcactcactgcatgctttcatgcggccatacttctatgtattgtgcttgggttatcgttctagactgcactgttaaatgctctgaggctgggttgtcattttttataactgtctcggtattttatcaccattatttattacttttgatatacagaatgagctgcatgcatttatagagtaataagaagatgtatttaatgtgccttgtttttaactgagtaagagccaaaagcatgaatcaataaagctgattgaaa

SEQ ID NO: 265 - DNA, 3181 bp, Cricetulus griseus
ggcaggtttcacccaggccctggctatgagcagcgctaccacagtggggatgtacgtctggacacagcgggcagtgatgcctaccgcctctccgtggcccgggcgctctctgcagaccagggttcctacaggtgtgtggtcagcgagtggatcacagagcaaggcaactggcaagaaatccaagaaaaagctgtggaggtggccaccgtggtgattcagccgacagctctgcaattggctgtgcccaggactgtgtctgtgactgaaggaaaggacctggacctttcatgcaacatcacaacagaccgtgtggatgatgttcgacccgaggtgacatggtacttcaaaaagcacctgatgcctcttgcttgcctccacatgctggctcggctggaccgtgactccctggtacacagctcaccacacgttgctctcagtcatgtgccaagtctacctgaatgcgtctaaggtccctgggttttcagatgaccccacagaactgcacgggtgatagacatgaagcgcgtggaggccggtgtccgacttaccgtgtcatggtactacagaatgaaccgtcgcattggtgacgaagtggtggccagtgagcttcttgcagtcatggatggagactggactctaagatacggagaaaggagcaagcagcgggcccagagtggagagtttataatttctaaggagcacacagacacattcagtttccggatccaaaggactacagaggaagacaggggcaattattactgtgttgtgtctgcctggaccaggcagagaaacaacagctgggtcaaaagtaaggacgtcttctccaagcctgtcaacatattctgggcctcagaagattctgtgcttgtggtgagggcacggcagccaaagcccttctttgctgcaggaaatacatttgagatgacttgcaaagtgtcttccaagaatattaagtcaccacgctattctgttctcatcacggccgagaagcctgttggggacctcaccagtcccaatgaaaccaagtacatcatctccctggaccaggattccgtggtaaaattggagaactggacggacgcatcgagggtggatggcgttgtgttagagaaggttcaagaggatgagtttcgataccgaatgtaccagactcaggtgtctgatgcagggttataccgctgcatggtgacagcctggtctcctattggtggtagcttgtggcgagaagcagcgactagtctctccaatcccattgagattgacttccaaacctcaggtcccatatttaatgcctctgtgcattcagacacgccatcagtcacccggggagacctcatcaaattgttctgtattgtcactctggaaggagcagtgctggatccagatgacatggccttcgatgtgtcctggtttgcagtacactcctttggcttggacaaggatccggtcctcctatcctccctggaccggaagggagtcgtgactacgggccagagggactggaagagtactctcagcctggagcgagtgagcgtgctggaattcttgctgcaagtgcatggctctgaggaccaggactttggcaactactactgttctgtgactccatgggtgaggtcaccaacaggttcctggcagagggaagccgagatccactccaggcccatctttataactgtgaagatggatgtgctgaatgccttcaagtacccactactgattggcgtgggcctgtctacagtcatcggactcctgtcctgcctcatcgggtactgcagttcccactggtgctgtaagaaggaggttcgggagacacgccgggagcgccgcaggctcatgtccatggagatggattaagcagaggagatggagggacagaggaacattgtaggaatggtgggggtgagaagaggaccagtgatattttaaaacaaagtgtgttacactaaaaccagtcctctctaatctcaggtgggactcggcgctctctcttttctgcatgtcaagttctgagcgcggacatgtttaccagcacacggctcttcttcccacggcactttctgatatgtaacaatcgagtgtgtgtttccccagctgcagctttttaatggttaacccgtctaattagtttctcctagcggcttatcgaccctctgatttgtgtgtgttgatcacttttgatgtgagggattgtggtgaggaagggtgaaggtgttcagagttggtcctcgtgggtgagagggtacctgccctcctgagaaccagcatccacaaggggctggcatctggagagttgctacctgcggccctccctgctggcccagagctgattaagacctgcgccaaggcaagctgtggcattcactaccctgcccatcccccattttcaggagtttaaatctatgacttcttgatccatatgccctttgtgttttcccttcttctctaccctcttccgtttccgggtttgtttctgtgagagtgaggaaatggcagccctggagtctagaatttggctttccaccaagcaccttatctcgacaccttagccttaagaatgagtatgaagaaaaatccaccgccacctctcgtccgagggcaggtgccgctgagccaggtgccctgtcacttcatgagaggcactgttgctggttgccacaggacctgcatgggagccttgagctccttcacacaaaagcagattgctgcctgcaatactgacttcaaggaatcagaaattgcctagagcaagtgtgtgtgttccatgaccttttcagtccttgaagtctttttaagatccctacagggggtagtgaagaggggtgtattttatggacgttcgccttcctattaggaatatgaagggaacctagcaatttactgtcatgtgaatggcctgtaaaatagggttgagagcagctggctctgcctgactgggcacagcaggaattaggacagtggacagacacaccttccaggttcccagtgcctgctccatcaggacctcaacccacccaaagtctctcacctcagcacagaccttccacaagcctcccctgggtaccaaggctcacgccaactggtaccctcgcttatccctttggctctgaaagatttaacactattgtcttccaaagtgtgttgggggagattcctttgttttgagcaataaagtaat

SEQ ID NO: 266 - DNA, 3179 bp, Cricetulus griseus
gagagaccggtcagagagagcgcgctggcgagcgaaccgagagagggacaggggcaaagtgactgacctgcttttgggggtgaccgtcagagcacggcgtgagccctccccctcgggatcttacatcggaccagtcgcgctgacggacagacagacagacaccgcccccagccccagcgcccacctcctcgccggcgggctgcctgcggtggacgcggcggcgagccgcgagcaggagccgaagcccgcgcccggaggcggggtggagggggtcggggctcgcgggattgcactgaaacttttcgtccaacttctgggctcttctcgctccggagtagccgtggtctgcgccggaggaggcaaagcgatcggagctgggagaagtgctagctcgggcctggagaagccggggcccgagaagagagaggaggaagagaaggaggaggagagggggctgcagtgggcgctcggctcgcgggagccgggctcatggacgggtgaggcggccgtgtgcgcagacagtgttccagccgcgcgcgcgccccaggccccggcccgggcctcggttccagaaggaagaggagcccgccaaggcgcgcaagagagcgggctgcctcgcagtccgagccggagagggagcgcgagccgcgccggccccggacgggcctccgaaaccatgaactttctgctctcttgggtgcactggaccctggctttactgctgtacctccaccacgccaagtggtcccaggctgcacctacgacagaaggagagcagaaagcccatgaagtggtaaagttcatggacgtttaccagcgcagctattgccgtccaatcgagaccctggtggacatcttccaggagtaccctgatgagatagagtatatcttcaagccgtcctgtgtgcccctaatgcggtgtgggggctgttgcaacgacgaggccctggagtgcgtgcccacttcagagagcaacgtcaccatgcagatcatgcggatcaagcctcaccaaagccagcacataggagagatgagcttcctacagcatagcagatgtgaatgcagaccaaagaaagacagaacaaagccagaaaaaaaatcagttcgaggaaagggaaagggtcaaaaacgaaagcgcaagaaatcccggtttaaatcctggagcgttcactgtgagccttgctcagagcggagaaagcatttgtttgtccaagatccgcagacgtgtaaatgttcctgcaaaaacacagactcgcgttgcaaggcgaggcagcttgagttaaacgaacgtacttgcagatgtgacaagccaaggcggtgagccaggctgcaggaaggagcctccctcagggtttcgggaaccagacctgtcaccagaaagaccgactaaccacaccaccacaccatcatcatcaccatcgacagaacagtccttaatccagaaagcctgacatgaaggaagaggagactcttcgaggagcactttgggtccggagggtgagactccggcagaagcattcccgggcaggtgaccaagcatggtccttcgtggaactggatttgtcattttcttttacttgctgctaaatcaccaagcccggaagattagggagttttatttctgggattcctgtagacatacccacccacgtacacacacatatatatatattatatatataaataaatatatatgttttatatatataaaatatatatatattctttttttaaattaactttgctaatgttattggtgtcttcactggatgtgtttgactgctgtggacttgagttgggaggagaatgtccctactcagatcctgataggggagaccataggacgaaaagactctgctgtggtctttcgtcctcctgcctgccaggaaacgtgcaaggccagggcacgggggcacactggctcacttccagaaacacgacaaacccatccctggccccgagtcaagaggacagaaaaatgaggcagataaagagacaaagatgctggttccagcaggagtttggggagcctcaggacatggcctattttgtggattacccactacatgctgcaagagcatcctgcccctctgggcactgcccggaagaatcaggagcctggccagccttcagctctctcctccacttctgacatgcccaggaggcctcccacaggtgtcctggcagagagaaaacacatggtggaagaagaggcctggcgatggctcctcctctcctctccctaccccacttcctgggtacagcccaggggaaccctgtgtgctcagaccattgaaaccactagttctgtccccaggagacgtggcctgtgtgagtggctagcccatccccatcctatcccttccccttcccgaggcacagagcagtggggcaggacccgtaagcccctcacggaggcagagaaaagagaaagtgttttatatacggtacttatttaatagccctttttaattagaaattaaaacagttaatttaattaaagagtagggttttttttcagtattcttggttaatatttaatttcaactatttatgagatgtatctcttgctctctcttatttgtactgtttgtgtgtgtgtgtgtgtgtgtgtgtgtgtgtgtgtgtgtgtgtatgaaatctgtgtttccaatctctttcccggatcggtgacagtcactagcttgtcctgagaagatatttaattttgctaacactcagctctgcccttcccttgtcccctccacacattcctttgaaataaggtttcaatatacatttacatactatatatatatttggctacttgtgtttgtatataaatatatatatatatatatgtttatgtatatatgtgatcctgatgaaatagactgctattctgttttttatatgtaaaaacaaaacaagaaaaaatagagaattctacatactaaatctctctccttttttaattttaatatttgttatcatttatttattggtgctactgtttatccgtaataattgtgggggaaaaagatattaacatcacgtctttgtctctagtgcagttttccgagatattccgtagtacatatttatttttaaacagcaacaaagaaatacagatatatctttaaaaaaagcattttgtattaaagaattgaattctgatctcaaaaaaaaaaaaaaaaaaa

SEQ ID NO: 267 - DNA, 3178 bp, Cricetulus griseus
  modified_base (1126)..(1126): a, c, t, g, unknown or other
agtgaaaacttagattgcaacagtgatttacaggcatttccctcattaaataataaagaactaacaggcagcagaaatgtttcaagccaagaaggatcaatggatgttgtagccaagacccagaaagatggcttccacatcttcatcatttctattaaaaccagaaaaaacagatgcagtctggaattttgaatgtttctctttctatggttggacctcatggatacatctctgcgtcagactggcctctaatgattttttacatggtgatgtgtattgtttacatactttatggtgtcctctggctgatgtggtctgcctgttactggaaagatatattaagaatccagttctggattgcagctgtgattttcctaggaatgcttgaaaaagcagttttttatagtgaataccaaaacatcaacagcactggactgtcaacccaaggtttactgatatttgcagagttgatatctgcagtgaagaggacattggctcgcctgcttgtgatcattgtgagcttgggttatggcattgtgaagcctcggttaggaacagttatgcatcgggtgattggactgggactgctttacttgatctttgcagccattgaaggcgtcatgagagtcattgggggttctaaacatttagctgttgttttgagtgacattactttagcagttattgactccatttttgtgctggttcatttttataagtttggcacagactatgaagactctaaggctaagaaagaacactgtgaaattttcattgtataggcattttacaaatacactcatctttgctgtgctggcttctatagtgtttatggtgtggacaacaaagaccttcaggattgcaaaatgccaatcagactggatggagctctgggttgatgatgcattttggagctttctcttttcactcatccttattgtgataatgttcttatggaggccatcagcgaataatcagaggtatgccttcatgcccttgatagatgattctgatgatgaagttgaggaattcatggtaacatctgaagaaaattattccctcttcattcacagacgtagctcctccccgtcttagtggactcagatgaggaaattatgaccagatnctgaaatagctgaaaagatgttctcttcagaaaagataatgtgatgtttcattgtgttgtcttggagatttgtgtacgaaaatgaaggattcaggagtgggagggtctgccgccctcataaagccatctttaaaactgactcataaagtcagtttaattgccattaagttgcctgaatttggaaataatctgatagtcttagcaatgtctacacagatgtgagttaggtgacagctactggcattcaaatttgtggtctcagttttctccagaacaaagaatctgtagctgggaattcaaggccagcctggtctacgaagttccaggacaaccagagagagctacgtagtgagaccctgtactacaaaaaaatcacacacaacaacaaaacaaaagtaaaaaaagaaaagggaaagaatctatgaacacaccttccttctcctcttaagataacatgatgctcctgaatgctccacagcagtgttcatctttgtagtggtaattttattggagtttttatactgaagtgacttaatattggaacatgagcatgttcatatgtttagtcctgtcccctctgttggtgtacacaaagctcttatttgtaaataccaccatgcactgcacatcatggaatctgagctcaggggaatacaagtgcacaacgagaaacgtatgtccaaagacatgcaggccacatgtacacatgctgctgctaattctgctgtgacactggccctgtggctcccctaaagcactttcttcccagccccttaccatgcatcaacatgtaatttaccaaccctcaaccatatttctcaccttgctttgttaaattatgtttataatgtatgattgagagtttgtattctaatattttaaatatagaatgttgtagacttgaaaggcacttgaatatagtgtgatgaaaatgtgaatgctttactacttttgtgaccaaagataccaggctgacaacatttagtaatgaaaggcagggtcttagggctttcctctgtaggactcttggccttgtgaattgcagtaacttggaataattgagaaaatagtgaaaatctgaccaggaaccgtgtagcccctcaatctccttccccatctgccccaaatctccagacaacactgggacattccaggtgcccacctctgtttgttcaggatgctgttggcaggacctcccagttagttgagaggtctgaggataaggttccagtttagtgctcagacttcttgttatttagttcatgctaaattttgatgatttatgaagtttgcttgagacattttttcataatttgaattaggttaatatttaaatgtgtgccttctggggtagttattatatttcagtaagaaacaagagttggaaattgtcaacttgggagttggtaggatgcccccatgcttttcctagattttttgtttgttttttgtatttttttttaactgttttcctatcctgtggaaagtgcgaactttctgtctggattatggtacatcatgcttagactactataatgtcaagattaggcttaacgtgtgcacatagagttgatctgcatacccttttgaaggaggtttggggctattgacctggctgtctataactgaagctgagagagaccatgctaggttttgtctcctgttgtgatactcatgtctgtgattgacagcatgcagtaagcaatacaaaacaccaagccttacatctatcagaggaagtttaatattcaaattgtgaacactcagatatatataagtgacaagactagatttctaaggaagtgtacactataggacaggaactatactgtatggaagcttctttagaactaggaaacattcattctttggggagaaagtttagaggttaaaatatattctctatttaaaaagattaaattattatttgggagaaatttctttgagtatagaacacagcaatttaaaggactttttgtttgaaaaaattgtatttttgtgccttaatattttttttaaataaatttctttctgacatttggaaaaaaaaaa

SEQ ID NO: 268 - DNA, 3172 bp, Cricetulus griseus
tggtctgcatgctgaggttactggagttggctattaatcagtttggtgaagtcattgttgatggtgatgtagttcatggattctataacccagctgttagcagaattgttgaggcaggctgtgtgtgcaacgatgctgtgattaggaacaacactctgatgggaaagccaacagaaggagccttgattgctcttgcgatgaagatgggtcttgatggactgcaacaagactatatcagaaaagctgaatacccttttagttctgagcagaagtggatggctgttaagtgtgtacaccgaacacagcaggacagaccagagatttgttttatgaagggtgcttatgagcaggtgattaagtattgtactacatataacaacaaaaaaatgattactggagattcacaggagactgcaattgcaatagccagtcgtctgggattgtattctaaaacttcccagtcagtgtctggagaagaagtagatactatggaagtccaacagctttcacaaatagtaccaaaggttgcagtattttacagagcaagcccccagacacaagatgaaaattattaagtctctccagaagaatgggtcagttgtagctatgacaggagatggagtaaatgatgcagttgctctgaaggctgcagacattggagttgcaatgggccagactggcacagatgtttgcaaagaggctgcagacatgatcttggtggatgatgatttccaaaccataatgtctgcaattgaggagggtaaaggcatttataataacattaaaaactttgttagatttcagctgagcacgagtatagcagcattaactttaatctcattggctacgttaatgaactttcctaaccctctcaatgcaatgcagattttgtggatcaatattattatggatggacccccagctcagagccttggagtagagccagtggataaagatgtcattcgcaaacctcctcgaaactggaaggacagcattttgacaaaaaatttgatacttaaaatacttgtttcatcaataatcattgtttgtggaactttgtttgtcttctggagagagcttcgagacaatgtgataacaccacgagacacaacaatgactttcacttgctttgtgttttttgacatgttcaatgcactgagttccagatctcagaccaagtctgtgtttgagattggactctgcagtaacaagatgttttgctatgcagttctcggatccatcatgggacagttacttgttatttacttccctccacttcagaaggtttttcagaccgagagcctaagtatactggatctgttgtttcttttgggtcttacctcatcagtgtgcattgtgtctgaaattataaagaaggttgaaagaagcagggaaaagatccagaagaatgctagttcaacatcatcgtcttttcttgaagtatgatgcatattgcatttttgtttttatttgcaaactacgagttgcagtctgagaatcatttagaagggcaagttcaagaggataatgaagatttaaggactttttaacttaccattgactaaaaatgaacattaatgttaaagacttgatttgaatctttaacctgttggtagtcccaaatgaaattatgcagctttgataccatattctttgatttgaattggcttttgcaattgagtggaactttataaacatatgggcaagtactgaattaagaaatacaaacagcaaaacctgaaccaccttctgcacttaaaagagttctaatgtacaaatacactgtctgtcttagatgaatataaatatttttttatttttaaatattgtactatttatggtggtggggctttcttactaatacacaaataaatttaatcatttcaaaggcattctgtttggtttagaaattgccaggagtgccatatttcagctcccatggttcctttttcctgcagtgtaagcagactgataccttgtgctaccatttttgtatttcaagtttttttttttttttttgtgcacaggatgtgaccactgtctgatcactatctttctttttttgtgactgaaaagcatatactgcaattgaagtaaatgtttgctcttctttgtaagtgtaaatggttgttttttgtagttgttttgtttttcatagaggtctgagtctttgatctagcagaattagtttcaagactattattggtattgcacttagagtaactgtagttaacatacagtcatggagtaaaaaaaaaggccgggctagaatttatacagattatattaacatgtctttgtctccttttttgtttaatacgaatatactttgtcaatatcattttgtcattccttgcttatagatcaaacacttcagctgaataattgatctttattactgtttcatatgtatatttttaagcctatttcttagagaatatagactactatactcaaagaataaaaagtcccaaactcagatagatagcatatgaaccagggtgcacttgggagatcctgtgctggccttgctcctctgaatcttctaggcagctgccttggcctaggttgtagcacaaccctgagtctgttccttctaccatttgtttgtgctctgtcttctatttcattgggcatgcttgggaaattgatggaatttgctttgtgtaataccatcagtttttataaaaagcttgacaaaataaaggtaagtgttatgtttcgtatttcataaactgtcagaaataaactgttcttaagcttgttcaatattaatgatgaatgttaacactgatgtggtgtcattgataatgagagttctgttgtttaagtctttactactgaagcatgaacataaggagccagaatgtttgcactttgttgttactctttccggctgacctgtcaagtgtacattgttccgtctgattagatggaacatgaaatcattgtctaatcaactcttagaggtttgatgtctcatagctaaattttataatggtttttacattctgttacagacttgaaaaatacatactaagtgcatatccagtcttcttcgttttacattataggttgagaatataactcatgaaatgaatgtgcctatcttctcacttggtttttgaactataaaaataaaatttttttcataagctcaaaaaaaaaaaaa

SEQ ID NO: 269 - DNA, 3164 bp, Cricetulus griseus
  modified_base (216)..(216): a, c, t, g, unknown or other
gtctcagactcggggcaaaagctgaagttctatccagaacaacaaagatggcacctacgcagtgacctacgtgccactgacagctggcatgtacacactgaccatgaagtatggtggtgagcttgtaccacactttcccacccgggtcaaggtggagcccgccatagacactagtgggatcaaagcctttgggccaggaatagaaggaaaagatgngtttcgggaggccacaacagacttcacggttgactccagatccctaacccaggttggaggtgaccacatcaaagctcacattgccaacccctcaggggcctccactgagtgctttgtcaaggacaatgctgatgggacctaccaggtagaatatacaccatttgagaaaggtttccatttggtggaggtgacatacgatgatgtgccaatcccaaacagtcccttcaaagtgccctatattgtctccgttaaatatgctgatgaagagatccctcgaagtcccttaaggtcaaggtccttcccacatatgatgcagcaaagtgactgcctcagggcctggcctcagttcctatggagtacctgccagcctacctgtggagtttgcaattgatgccagagatgctggtgaaggcctacttgctgtccagatcacggaccaagagggaaagcctcaaagagccactgtccacgacagtaaagatggcacatacgccgtaacctatatccctgataagactggacgctatatgattggggtcacttatggtggagacaacattccactttctccttaccgtatccgggccacgcaaacaggcgatgccagcaagtgtctggccacaggtcctggtattgcccccattgtgaaaactggtgaggaggtaggcttcgtagtggatgccaagactgctgggaaggggactgatgagcatgtgcctggaagtccattcactgtgaagatcactggtgagggaagagccaaagaaagcatcaccaggaccagcagggctccatctgtggccacagttggcagtatctgtgacctgaacctgaagatcccagaaatcaacagcagtgacatgtctgcccatgtcaccagcccctctggccatgtcaccgaggcagagattgtgcctgttgggaagaactctcactgtgtccggtttgtgccccaggagatgggtgttcacacagtcagtgtaaaataccatggacagcatgtaacaggaagccccttccagttttactgtggggccccttggcgaaggggtgcccacaaggtccgagcaggaggccctggcctgggagaggggagaagctggcatcccagccgagatcgcgccctcagacgacgctcgctgcctcactgttatgagccttcaggaagattaaaagttaaccagccagcatcctttgctataaggttgaatggtgcaaaaggaaagattgatgcaaaggtgcatagcccctcaggagcagtggaggaatgccacgtgtctgaactggagccagataagtacgctgttcgcttcattccccatgagaacggcatccacacaatcgatgtcaagttcaatgggagccatgtggttgggagccctttcaaagtgcgtgtgggagagcctggccaagcagggaatcctgctctagtgtcagcctatggtgctgggcttgaagggggcaccacaggtatccagtcagaattcttcatcaacaccactcaggcaggcccagggacattatccgtcaccattgaaggaccatccaaggtcaaaatggattgccaggaaaccccagaagggtacaaagtcatgtacactcccatggcccctggaaactacctgattggtgtcaaatatggtgggcccaaccacatcatgcgcagtccattcaaggccaaggtgacaggccagcgtcttgtcagcccaggctcagccaacgagacctcatccatcttggtggagtcagtgaccaggtcttcaacggaaacctgctatagcgccatccccaagtcgtcctcagatgccagcaaggtgacctccaagggggcagggctctcaaaggccttcgtgggccagaagagttctttcctggtggactgcagcaaagccgggtccaacatgctgctgatcggggtccatgggcccaccaccccatgtgaagaggtctccatgaagcatgtgggcaatcaacaatacaatgtcacatacgttgtcaaggagaggggagattacgttctggctgtgaaatggggggaagaacacattcctggtagcccctttcacgtcaccgtgccttaaaacagcttacatccaatcctggaggagtccttccagttgcttttgttgctagtttgcagttcatttttacaatgtcctcagcctgctggagggcccaaaaccccatcccaaaatcttcccattcattccaagtgccttgagtgccctagacttgattcttaaggacatgtgggacatcgtaagaaagtaaactggggccaagaaagtatatagtactctgtccaaatcaagactcttgaattcagaggtcactgcagacagactaagaacagggtaagactgactggctcccctaagctcctggtctacttaagtgtttaccaaacaagaatgtcattgcagaagggggccctgcaccccaattgccaaagacccttgcaacccacttccctcaaaagtagataacagataagaacggctaacccagatcacattccatcagagtccatggcttctgctaaatggcagagaccactaataagctactgcaggacccccttctatgaaagctagaaggagtgggtgccactgttttgacctatgagaggccttaaggaccaagacactaacatgtggttccacctgaggtctgtttaaaggctttggaaagcatcaccaggctgtcaaatggctggagtgaatgttacacacacacacacacacacacacacacacacacacacacacacacacaatggggtggtaaaagccacctgtcaaggaactggagcagctgaagccggatgtgaaaggtctacaggcataatagacacgggacgaaccaaactggaatctaaatgccaactggaaactgtatcttaataacttattaaataaatgtttgctccataaaaaaaaaaaaaaaaa

SEQ ID NO: 270 - DNA, 3158 bp, Cricetulus griseus
gtgcccgtgcgtgctcggggccgcgcctgcacctcctggcacctctggctgcgctccccgcgcccccccgcgcctccggcccggcgcggcaggtcaatcagccttatttcctgagtcgaaatttagtcactacgatgtggtagttggtgtgttatcagctcgaaataaccatgaacttcgaaatgtgataagaaacacctggttgaagcatttgttgcaacatcctactttaagtcaacgtgtgcttgtgaagttcataataggtgctcgtggctgtgaagtgcctgtggaagacagggaggatccttactcctgccgactgctcaacatcaccaatccagtttttgaatcaggaaattgcaggaggaggcccttttcatcgctcgatttagtcctccaagctgtggcatacaggtgaacaagctatggtacaagcctgtggaacagttcatcttaccagagagctttgaaggtacaatcgtgtgggaaagccaagatctccatggcctcgtgtccagaaacctacacagagtgacagtgaatgatggagggggtgttctcagagtcattacagctggggaaggacactgcctcatgaattcatggaaggcgtggagggagttgcaggtggctttatctaggagagcagcatctatgacgacattgtcttcgtagatgttgtggatacttacaggaatgttcctgcaaaattactgaacttttatagatggactgtggaaaccaccggcttcagtttgctgctgaagacagatgatgactgttacatagacttagaagctgtgttcaatagtggggaaatttcaggttgaattgggcagtggacagaactggaaagtggcaggagctggaataccccagcccagcctaccctgcttttgcatgtgggtcagggtacgtgatctccaaggatattgttgactggctggcaggcaactccggaaggttgaagacctatcagggtgaagatgtcagcatgggcatttggatggcagccataggacctaaaagacaccaggacaccctgtggctgtgtgagaaaacctgtgagacaggcatgctgtcttctccgcaatactcaccacaagagctgagcagactgtgggaactgaaggaattgtgtggggatccttgtcagtgtgaagcaaaagtgctgtaatccccaaagaccagggactgtaaagtctgaggagaccctgtggctggtattgagctataagcagtatattaccagtgtttgcacagatcttaatcaatcagctgatactgtagcataagtttttatttatagattggaagattatttaataccaaattattttataaaaatattcctaactaactcctgatgactgtaactaattagtaattcatcattatcatttttggttaaacatggccaaatttaaaaagttgtaataactccatttgaatctcaatcagaattataaaatagctctgtatagcttaattaggccagaaagaacctacaaagatgctgtgtggcgctggggccacacataccaaagtgtaggttgctggaaataccagtttgtggatctctgacatgggcaaactggccttgaaaaggaaatgctgtaaccttaagtttgggatcttgcatttaaagatgtttatttacataagtaccatgtttcttttaccatttaatgtaaatcatgaatgtctcagcacgctcactaaactgtttttgtgagtatgagtaaaaatataaacacctcagggttcagtgtcacagggaagtagggaaggtactctgccttgcctgctgttaacctaagcttaaagaggaggtaagatatagaagatagaagacaggttcaatgtaggaataatataggggaaagtatattgtacagagtagaaaagatgtgtttccccagtttaagggacatttctcagaatgaccaaccaaatcactacagtaaactttttcaaatagttaagcagtccacagcagatgttaactctactcatatctagactattgtttctacttcatatttacattttcacataatggaatgcagtaagcagtaagctgtgaaaacacaagcagaaaagtcactagtaatcaaagcctttattattctattaatatacaaccaaatggtcctttcccaacaaaacatacatcctttgtgaaggtgaagtttttgtttctggtgtgtacagttggattgttaccatcgcactagtagacaatctccattctccacagaataaaactgtaatgactgtaggtcattttctagctcaatttctctgcctggcatctaaaattagaacaaagtgtcgagtgagtaagacagatctaatgatgcatgttatacatgctgccctccaatgtcaggtagcttgagaagtcaaaatgctgcctccatttagaatctggtacgtatggctcatggtactgtggagaactaagcttagcttagttttgtgtttttgcctagcaacttaccttgggactttcataggacaacagaagttctgacacaggaactttgagaagacgtgacagcagtccctttaccttttgaactgtcatggaatctatcaaagaaaaggaaatgatgaaggcttaaatcattcaaccagttgattcttttggcaaactgggaaatggagccaatgtttgacccaagtggtcttgacagagatgtgtcataccatttcagtagcacttactatttcttcctcagtctgagtaaccagaaataatcatctcactgaggaggaaaaatataagcctttgtgataacttcctaatgggttgctgaagatcccatgagtggggccttgccctcccagcacgagcatccagtcaccatcaggatgtgcacacatatgaccaggtatgggaaggtaactcagaaaaacaaatgctctgatttattcagaacacactaggaacttctttccaaagacaggttgtggtacatagcggatattttgattaagaatattagtttctctgaagctttagctgaaagtacagcaatagtgtggtggtcccacaaatatcacaatgtagtcaattacttttctataagaattgttttttataaaagctgtgtttttatgcaacttgtgataataaatcttctctattttag

SEQ ID NO: 271 - DNA, 3153 bp, Cricetulus griseus
gatgtctttgggcccaagcatccagctctgaagattactcgtcgctatgcctttgctcatatcctcactgtcctacagtgtgctaccgtcattggcttttcctactgggcttctgagctcatcctggcccagcagcaacagcataagaagtaccatggctcccaagtctatgtcacctttgctgttagcttctacctggtggcaggagctggtggagcttcaatcctggctactgcagccaacctcctgcgccactatccaacggaagaagaagagcaagcgctggagttactatccgaaatggaagaaatgacccctaccagcagagtatgaagtcatcaaccagttccagccacccctgcctacacgccctaacgccagctgggctctcttcctcaattttatataatgcactctttaccctcctagaatcctctagactcctttcctattcactagctccttccaaccatggatggtcagataagtttcctccctctgtgggccatgtctttggaactgggactttccttgggttgctgctggtagtggacagtccctgagagaggtgccaacagggcacaaaagggaaggggactgtgccacgtagattcactttgccaggcccagcatttgtaccacttctctatctgggctgactctctcattccttctagagtgccccaggcccagctgtccactttgtggattctctgcactttagtctctgggccactcctcaagtgtgttctggttttctggagagaaggcattgctgttggggagcagaacagctgctctcctgccctgttctggcttcttgtggttggagccaggcaaggaaacagaaccaggcaagagactgatcctatcgaggaccccagtgaaggggactgagtgttccagtcccttcaccttttaatgtgagtggttttaaaagaaaaaaaacaaaaccaagcaatagcagccatgctctctttctaaaaacagggatatggttgttgttgttcagaaatggagcccatcccttatggctctgcaatattttggaccatagctccctccaagcctatagtcactccttccagtctctccaacagaatgcaggctttctgtcctggctccttcttccaggcagctgttgctccctggggcctttctgtggaacagggccacatggcccccgcggggctgagaactatggcctggctggctggccagcgtggtgctcctcagaactgtggcactgagatgtaacctggcctcagttcaggcacaggggccaagcagggcaggaccctccactctccacaaagtattccacccagaggcccatcaggttggtgtcaggactcttgtgagatgtgcaggcctggctgtagccttcagagtcaatgtgtgccctagcctgtgacttggggctacagcttgttgcatgctcctcttcccttctggaatgtatgctggtcttgcggtgtgctactaggctgttactctaattattctgtttgccttgggtccagttttattgtttttttacctggagacctggggcataaggtggatgggatttgaaaggcctgcagcttggatccagataggcaagctgttcttgttcatttgtgagcttctttggagtgagggtctaatgcttgatgaaagggagatggatttcaatctcctctcacccttaagatgacagacattttgagcaagaatgcagactgaatacagtcactgaactgtgactacaagaagactgtcacctccccattctttggccagaaagagtggggaatatgtggataaatgcctgtgcagatgaagaccaagtgtgcccataagaaagcatctgcttggagttccctgctgtgatgccaaagtgtgccccagtatgactctcccattcttccagaccctactctgaggcaagaaaagctgccaggtgatgcctgagcacaaagtcaaggagctaattaagactacctttctgtgaagtcctgagcttatcattggcaggtttttgaagtgtgtggccagctctctctaacattgcatctgagggagcaggccagaagaccaggcaccaaacatgcatgccaaagtgaatgaggacttgaccctgtggatagttccttgtgatttggaacccactttttattagatttccattcctctggcctttctttctctatccctgtcattctgacactgatagtttgtcatataaattcctctggttctgttttcttttctaggaaaaaaattaaaagacaaaacaaaaaccagaaactacaaatgagaacacaaatgccagtggctgcctgtaatttttgtcataattttccagatgtttgttttcttcctcccagagaagcaggagacattcagcgatgaagcttgcgatggcaaagttaggagggacttggcatgcccctgaatcacacatgaccttttgatacttgggagcctctcactcctgacatctttcacagaggatgttcccaaagcccacagctagaaacagtaggtggctctgcccaaaatactgactacaaaccttgacctgcccctctctgcatgtcctgatgagctgcagaagagctgttttcagatctctagtggtacttactgggaaaagcctgagaatacaaatgagcaaggcctgcagagttgctcttctaggcagttgatgggtgaaaccttgatggctgcccacattcttagttcattcattctcaacccaactctgggccccaagtatatatttggtgaaagcatttaaggctctctttgggaagtagtccatttctagcaggatgcatgtctttcctgaaaagtgataatcttctcattctgtgtctgttaagacatttctatgaagggtcaattagattatgcacaaaacacttgagccccatgaaagaaacaggatgtctggcaggaccttgtctccaaggattgtatttccttagctcaaaacacaaagtggctgtttgtatacacgggaagggcagttctctccagataacctcagaatccacagctggttttcttagaggtgcccatgccctgggccatgacagtatggaatacaagtttctgtggggagacagaaaagaactaataaactttatagcctttgttttcaaa

SEQ ID NO: 272 - DNA, 3152 bp, Cricetulus griseus
  modified_base (246)..(246): a, c, t, g, unknown or other
  modified_base (260)..(260): a, c, t, g, unknown or other
  modified_base (280)..(280): a, c, t, g, unknown or other
cgggcgcacctggtgagccccaggttccggctcgtctgccgggcggctgcgtacccaccgccgaggaagtcggtggaacttgctttccgctgcggggttacgaagatattgtcacaattagcagcatcatgtcgactggggacagtttttgagactcggtttgaaaaaatcgacaacctgctgccgggatcccaagtcggaagtaaattcagattgcttgctggatggattagatgctttggttangatttggatttccngccttaaagaaaaacaaatnttgaactaacttttctaagcagataaaataaacggctattgttacagaatgaattgaagacctcaagcatttgaaacagacaatttaaaaaggttcagaaaaaacagatgaaacaggaaataaatactttattggaagcaaaaagattgttagaatttgagttttgctcagcttacaaagcaatacagaggaaatgaggggcaaatgcgagagttacaagaccaacttgaagctgagcagtatttttctacactttataaaacccaggtaaaggaactcaaagaagaaattgaagaaaaaacagagaaaatttaaggaaaatacaggagctgcaaagtgaaaaagaaactctttctactcagttggatctagcagaaacaaaagctgagtctgagcaattggctcgaggaattctggaagaacagtattttgagttgactcaagaaagcaagaaagctgcttcaagaaatagacaagagattacagataaagatcacactgttagccggcttgaagaaacaaacaccatgctaaccaaagatattgaaatactaagaaaagaaaacgaagagctaaaatgaaaggatgaggacagcagaagaagaatataagttgaagaaagaggaagaaataaataatcttaaggttgcctttgaaaagaatatcagtactgaacggaccctgaaaacacaggctgttaacaaattggcagaaataatgaatcgcaaagattttaaaattgataggaagaaagctaatacgcaagatttgagaaaaaaagaaaaggaaaataggaagctacaactggaacttaaccaagaaagagagaaatttaaccaaatggttgtgaaacaccagaaggagctgaacgacatgcaagcgcaattggtagaagaatgtacacacagaaaatgaacttcaaaatgcaattggctagcaaagagagtgatattgagcagttgcgtgcaaaacttttggacctttcggattcaaccagcattgctagttttcctagtgctgatgagactgatggaaaccttccagagtcaagaattgaaggttggctttctgtaccaaatagaggaaatatcaaaagatatggctggaaaaaacagtatgttgtggtaagcagcaaaaaaatcttgttctataatgatgaacaagataaggaacaatccagtccatcgatggtgttggacatagataaattgtttcatgtccgaccggtaacccaaggagatgtgtacagagctgaaactgaagaaattcctaaaatattccagatcctgtatgcaaatgaaggtgaatgtagaaaagatatagaaatggaaccagttcaacaaggtgaaaaaaccaaccttccagaaccacaagggccatgaattcattcctacactctaccacttccctgccaactgtgaggcctgtgccaaacctctgtggcatgtatttaagccaccccctgccctagagtgtcgaagatgccatgttaagtgccacagggatcacctagacaagaaagaggacttgatttccccgtgcaaagtaagttacgatgtaacatcagcaagagatatgctgctgttagcatgttctcaggatgaacaaaaaaaatgggtaactcatctggtaaagaagattcctaagaacccaccatctggctttgtccgcgcctctcctcgaacaatgtcgacaagatccactgcaaatcagtcgttccggaaagtggtcaaaaatacatctggaaaaactagttaaccatgtgacctactgctgtgttggattcatgtgggatgctaccttctaaaccaggctgtttaaccactctgagcagacaggctgtttctttgataccgcaggcttttcagggttaagattgctgttattctgtctctgttttggcacaaaaagcacactgaggattgtttttgttttgtgttgttttttgttttgttttttcttgcgggtttgcctacaggtagattagattaattattactatgtaatgcaagtacagttggggaaagcttagctagttatatttttaaggtgctgcctttttgaatttataagaaaacgcctgtcgtcatgatagaacagttttccctgtgtgagcaggagggaagaactttcactttcagtggaatggccgtcactgtcaagaccagtttgtggaaggagtaaagaaaatatctcaaaatgagacaagttttctgttttgttttttaaattgactttaagtttttgttgctcttgcaagactatacagaactattttaagaacatagtgatgtcacttgaagctcagtgccctcactgtagaattaaaagccttactgttgattacccacagtgggttttagggagaaatattatgctttacaaaatactgtatatgtttcagcaactttgtagattggggactgggagaagacaaaagaattacatttaatctatgcatttttgccaagccatattgagttattttactactagagactaactgtacaagagaaccaagtttagaagcatttgtgtggggtacatcatttctgtaattatatattgtatttctttgtggttttaactgaaaagacattaagttaacaaacataaaaatgtatgcactgtttgaaatgtaaattattcttagaaaactttcagtgggagttcgattaccctatgagtgccttaatttgagaattttttactgccataagtacagacttttcagaaaacagattttacaaaaaataatgtgtgtcagtgggctttttcattggtaattggtttaatttaaatatataggtttgttgaacttttataaattgagtacaatctttgcaccaaactacctgctacaataatgaaa

SEQ ID NO: 273 - DNA, 3151 bp, Cricetulus griseus
tcaaaggccacacacttaccttcagaatccatgcggatagtgctggaacgctgctacaatgacctgcgtcttctcagcgtgcccagcaagaccctgaaggctgagggcttctttagaagtaacaaggtatttgttgaaagctctgagaccctggatcaccaggcagccttcacagactcccacttatggaaacttctggatcgacatgcaaatacaatccgattatttgttttgctgcctgaacaatcaccgggatcatattccaaaaggacagcctaccagaaagctggaggtgattctagtaatgtggatgatgattgtgaaagagtcaaaggaccttcaggcaacttaaagtctgtggatgctattctagaagaaagcactgaaaaactcaaaagcttatcactgcagcagcagcaggatggagacaatggagacagcagcaaaagcactgagacaagtgacttcgagaatattgagtcccctctcaatgagaggggctcttccacctctgtggataatcgagaacttgaacagcacattcagacttctgacccagaaaactttcagtctgaagaacgctcagactcagatgtgaataatgaccggagtaccagttcagtcgacagtgatattcttagctccagtcacagcagcgacactttgtgcaacgcagacagcgctcagattcctctggccaatggacttgattcgcacagtatcacaagtagtagaagaactaaggcaaatgaagggaaaaaggagacatgggacacagctgaagaagactctgggactgacagtgaatatgacgagagtggcaagagcaggggggaaatgcagtacatgtacttcaaagctgacccctacgccgcagatgaaggctctggggaaggacacaaatggttgatggtgcatgttgataagagaatcaccctggcagctttcaaacagcatttagagccatttgttggagtcctctcttctaacttcaaggtttttcgagtgtacaccagcaaccaagagtttgagagcgtccgactgaatgagaccctttcatcattttcagatgacactaagatcacaatccgactggggagagcactgaagaagggagagtacagagttaaagtgtgccagctcttagtcaacgagcaagagccatgcaagtttctgttagacgctgtgtttgctaaaggcatgactgtgcggcaatcaaaagaggaactgattcctcaactcagggagcagtgtggcttagacctcagcattgacaggtttcgtctaaggaagaaaacgtggaagaaccctggcactgtctttttggattatcatatttatgaagaagatattaatatttccagcaactgggaagttttcttggaagttcttgatggtgttgagaagatgaagtccatgtcacagcttgccattttatcaaaacggtggaggccttcagagatgaagttggatcccttccaggaacttgtgttagagagcaatagtgttgatgaactgcgagagaagctgagtgaaatcagtgggattcctttggaggatattgaatttgccaagggtaggggaaccttcccctgtgatatttctgtccttgatatccatcaagatttggactggaatcctaaggtctctaccctgaatgtttggcctctttatatctgtgatgatggtgccgtcatattttatagggatagaacagaagaagtaatggagttgacagaggaacaaagaaatgaactgatgaaaaaggaaagcagccgactgcagaagactggacatcgtgtaacatactcccctcgcaaagaaaaagcactcaagatctacctggatggggcgccaaataaagatgtggctcaagactgactgccagtgtagccttttccctgagggttggtttaagtagatggttcactacttctgggtagtgccattttagccggacatggttggggtaatcccatgacaccagcactgattggaccgcccttcaccaatcagaagctcagtgcccagtgggccactgtcttgacttggaatcatgttgtgcactatggtcatatgtactgtaaagccaaggatgtgcaaagagaaacgagcaaagcctgctactatgaaaggggagggggacgagtagattcattgatttcggacaaatgtgcacatagccgctagtaaaactagcctaaaacaggatgctcatagcttattaataaaagctgtgcaaaggccatgaatgaatgaatcttctgtttatttcattgatacacacattacctcattgacagttctgaagcaaatgcaactgtgttgactcttgaaagcagcaaagaggagttgaaggagttcttagaacctgcatagcctacagaggaattaggaaggtgtgttttttatttgatttgttataaagtattaagaactttagtgatacagcccaatcaatatctgtttcccttaggccactcccagtaggtgcactatggctgctgcaggtttgtgattagaaccaactgtacttaagctatggatgtagaaagtgtctcactccttcactccagcatgtaaataaaggggtcctgttgagttctcttggctgcagctctgctgtttgccatggttctttgcctctcattagtcatgtacatttgtgtacactgaagctcagcagtctacccatgtactcctcagtgagactccataggatgtatttgctcgttaataagggttctctgttcagtagcttcagtcttttctttgtacatttattttcaatgaattgcttcaagtttgagtcttctagaatgcttgtaaagtcccattttaatttttaagagtcaatttgtagttctgtagtgtaactttggggaaccatctgcccataatatggaataaagtttctcgggggccttggtgtagacttggtgccacatgattcattgcagagcgtgctagagtcagcaggcgtctgctctgctaaatacaacttcagagaacacaattctacataaactttgaaatactatctaatttataaaagtcaataaaaaggttttggtaaaactttttcatgcaagatgctgtttacaacaatgaacatgccaataaaacatttgttcatgaaaaaaaaaaaaaa

SEQ ID NO: 274 - DNA, 3150 bp, Cricetulus griseus
gcgcggaggcggccatggcgggcaacttcgactcggaggagcggagtagctggtactggggccgcttgagccggcaggaggcggtggcgctattgcagggccagcggcacggggtgttcctggtgcgggactcgagcaccagccccggggactatgtgctcagcgtttcggaaaactcgcgtgtctcccactacatcatcaacagcagcggcccgcgccctccagtgcctccgtcgcccgctcagcctccgcccgggagtgagtccctcccggctccgaataggagatcaagaatttgattcattgcctgctttactggaattctacaaaatacactatttggacactacaacattgatagaaccagtttccagatccaggcagggtagtggagtgattctcaggcaggaggaggcagagtatgtgcgagccctttttgactttaatgggaatgatgaagaagatcttggagtgtaatggcaaacgaggtcacttcccattcacacatgtccgtctgctggatcaacagaaccctgatgaggacttcagctgaggatagatcaacagtttgctgacagatggaacaatctgttttcccccagttgccatctatacaattctcttacaggtgtcaaagcagtctagtttatataagtgttctgttacctgtgatctttttaaagactgaattactccattcttactcgtatttaccatattcagggtacgaaactggagggcttgtgtggttaacttctgaatttggcagttaaggtgatagtggccatgcctgtatgagaggaggtaaataccttgcctcccttctcttggacagggtagatcaacctgtggaaaactgacggtcaggaaaagaatgttacacactgcttaccctgatttcttcagtggttttgttttcattctgacaccatactaccagttggcagcagactgttcctcccactcgcatgaagtaatcatgcactgtgtgaatattacctagtgggattgcatttgcatttatggaccatgaccattttatgactcattctgacatttcaaatcctgaggattctgagaacactactagaggcatttgtcttccttttttcttggattctttccttgttactctcttcccctgtacctataagtggcctgattcttaggatagtgactatcttcattccagatgagaagcaggatgtgcagagcactttattcagtgcatagctttaagccagtattgggttcactcagtggataaactcccagctctctgccttcccccaagggggcatcataggttcacaatgctaccacagctaagagactccttgctgatggaacggatccggcagggccatttctcctgattgctagtatcctaatgggatacttagagttctcagattctacttggagtggaaggaccaacacttactgtattctgtagagggtatcaggggccaaactctgccctctgcatcaagtgcaagttgtataaaaggcagattagaattctatgcatttggggtaggattagtactttgaaaactgttccagtcctaaattacttacgtattactttacatggccaaaatagttcttgaagtacattactttataagtacattacatcatttgggttttcctttgtccagatttagtttataagccctttaaagtatagattgatttatgtggggtcagatgctccaaagaataggcctgtgaggccacaaatgatttagggtttctttagactgtaatatgaggcttttgggtgataaaaggcacttgctggtctctggtgtggtatgaccaatagaaacaccttatactttgctttgaacctcattttcgaaaaataatgtacctttttagttctgtatagattgatttgatgaatttgcattctttgaacatatatcaaatcatggtattgcagtggttaacacattgcttagcacatgtgtgtagaaattttgtatgaaagaatgagcagagtgctgaaacttgttaaatggcccagggacaccaattggcatacattaccacaggcaaactaatgagttgacgctaatttaatacatttgtacctcactctaaggtaaatgcttgatgaagatgttaatactcaactttggagatgttggcacagtgctaaacacatagtaggtgctcagtgatgttgagtggacagatttgcagcatgtgacatatttcacctgactacttggttcagttttcagttagtatagatactgtaaatccaaatgcacatcaaatcttgttttcccatgccaggtgtggtggcacacacctttagtcccagcacttgggaggcagaggccggtggatctctgagtttgaggccagcctggtctacagagttactttcaggacagtcagagttccaaagtaagaccttgtctcaaaaaacaaatatattagttaaaaaaaaaaaaaatctgtctctgaaattatggcatctaaaatatttatagaaaattcttgtcacaactgatttgaacatttgtgtttccttttgcctttgatgctggcttgtactgtctcttcattatgtgtggtgttgttgggatatgcagctctacaggaatcagaagagctcctcagtgattagttgttcagagccattacaggaactgtttggttggagttggctgtgtgtagcagttactggacctcacgagatcaaaggacttcttacaaatatcttccaaaaatagcaagcgctagaatcctagtcaagtgcatctgtacattgtcccagagcaaagtaaacaaaatcggctgctatgttttatataatcacttctgcaagagcccatttttggatactaatatgacgtggttaattcttattaatttgttggaattgtttattaataatgcaaatagattttaattttccacaagtaacatttcactattaatggtttgaaatgggtgataagcgaaccgatttgaaataaaatatgaacatgtgccattgtattataacactatacactttcttgacagttaaattttaaaaaaaaattttttttgtagcatgtattgtatatgtttatagtatatgtagtaaataaaagtatggccaaatgtttggcttggtgatctttt

SEQ ID NO: 275 - DNA, 3148 bp, Cricetulus griseus
  modified_base (1961)..(1961): a, c, t, g, unknown or other
gtttgaatgaaagttcattttcatcaaaacgtcctttctctgacataagcagtgttaactcaaaaaaacctaaacccagtgacaatatttctggagcagatgcctcttctgtactgtcttcagaaaagcctccatcagtgttgtctctgcaggtggcgccattgcaaggtgcaaattgctcatcaaatcaatctaaaaatggaacaacttttccaagagcatgtcctaagtgtaatattcacttcaatcttttggatcctctgaaaaagcacatgacgtattgttgtccagacatgataaataactttttggggttgaataaaatagaaatttcaaatacagcaaatgaagctaagactcttgattcagagaaaggaaaattgaatcatgttagttaatgaccagaagactcacacaacctttaaatgcttcagttgtttgaaagttctcaaaaataatattaggtttatgaaccacatgaagcaccatttggagcttgagaagcagagcagtgagagctgggagaagcacaccacttgccagcactgttaccgccagttccccactcccttccagctgcagtgccacattgagagcacacacacgcttcatgacttctctaccatttgtaaaatctgtgagctgtcatttgaaaactgaacagaatcttttacaacatatgaaggataatcataaacctggtgaaatgccatacatctgccaggtttgcaattacagatcatcatattttctgatgtagaatctcattttaaaacagcacatgaaaacactaagaatttgctatgtccattctgcctcaaagttattaaaattgccacaccctatatgcatcattacatgaagcatcagaaaaagggaatacatcgttgtaccaaatgcagattgcagtttttgacatgcaaggagaaaatggatcacaagactcaacatcaccgaacatttgtaaaacccaagcaagctagaaggactgccccctggaacaaaagaggaacttaaggttacgtcgaggtgttcacgagtgtattgaatgttgttctgaataaaaagaatttttgtcaaaccattttcctacatatgtccactgtagtttttgtcagatacaacactagctgtagcaaagcctatgtaaatcacatgatgagctttcatagtaaccgtccaagtaaaaggttttgtatatttaagaagcattcagaaaatctcaggggcatttctctagtgtgccttaattgtgatttcctaactgatgtttctggcttagataatatggctacacacttaagtcaacatgaaactcatacttgccaagttttaatagagaaagtttctgtgtgtatcccaacttctgaacgtctttctgaattaaaaactgaagctcccactaagggacaagaatctgtgtctaaggaaacagcaagacataatacagctgaaggagaaacaggagcatcaccttctgaaggtaagcagaataaagctccttcatcagaaggcagcattgggcgtgatgcaagtgtatgtgaagctgcagcagcagcagcagactgtgaaggaaacgtagcagtttcagataacggaaaatcccctgcagctgactttccttcagagactgggcaggattcgcagttaacgtcaggggttgctggcattgaccagtttctgaggcagagagaaaaacctgaatctgtgagttctgatgctagtgagcaaggcagtgttggtttggaacctttgacaccatcagaggtactcgagtatgaagccacagagatgcttcataaggatgataattcttcagccaattccaatgacacagtgtctgatgaaacaggtggcagtcctggagggagtagtagagcagagacagcagtagacctggcagaaggaaaggaaagaaagctgaagtgatgtagtcattccaagtgtagttcccatcagangaagcacttagcgcattgctgtccagtgagctccgtagtgccgtggccagcagtttgagagctgagggaggtctttcatacacttcacctgtatgttcagtcttattaagtcagtttgccagtaatagcatggttagtatgaatttcagagcttttaaaaaactgaacaactttagtgaaaactaagtttgtcatccaaaggtctcttttagcactttttgaagaaatcttgttcaccaatattaaattattgtaagaatattacctatattaatcagacttttcaaacctccattagtcctgaatttaaaatccttatcacctgtgtattccttttagtaaattttaaaggaagagatttgaaaccatgcattattttgaagatacctttaaactgcccatcaattgtaactgttaatgaaggctttatttttaatatgatcctggtaatgaagcatgcttagagtgctaaattgacctgttgagaatttggatgaatataaacttaagtttggatttaatataacattccagtctgtcagaagcatgcaaacagaattttagaatctgtgcacctccatacaagtgttagcctgccaggctgtcagcttacctttataaaactttcagtgaaagtgaaattatgaaaatataagtttatatttgtgcttttagtcagtgtataagctgtgcagaatcccaccccgcccctatgggctagttgtataaagtagaaatctgttattgaaactcttgtagctactatgcttttaatattatttcagtgatttttagcaatagacccataaaaatggtctggaagccaaaccaaagtatgggagagtgtaggtgaaaagcattggactgaaaacatgctttggcatatactctaccatgtttaagggactttacttaattataaaagtagacgcttcaaatgggaccctaaagcagatttttaaaaacaaaaaaaaaaaagttagcctaatttatccataagtcagctactaaattgatttttcagatacagaaataaacaataatttacttgcaagtgaactaataataagttttaatttaaaatgctgcatttttacttctttaaaatgttgctttttaattcttaaaactgtttcactgaatgttaaatgttttcaacgcctgttaaaattctgttgtatatagta

SEQ ID NO: 276 - DNA, 3145 bp, Cricetulus griseus
caagctggaactcatagaagatgatgacaacggattggaaagtgattttgcaggcccaggggatacaatgcaggttgaacctcctcctttggaaataaactccagagtttctttgaaggttggagaaagcatagaatctggaacagtaatattctgtgatgttttgccaggaaaagagagtctaggatattttgttggtgtggacatggataacccaattggcaactgggatggaaggtttgatggagtacagctttgtagctttgcaagtgttgaaagtacaattcttctgcacattaatgacatcatcccagcagatagcatgacacaggaaaggaggcctcccaaactagcctttatgtcaagaggtgttggtgacaaaggttcatctagtcataataaaccaaaggttacaggatctacctcagaccctggaagtagaagcagatctgaattattttataccttaaatgggtcatctgttgactcacaacaatccaaaatccaaaaatccatggtacattgatgaagttgcagaagaccctgcaaagtcacttacagagctgtctccagactttggacattcatcatcaccaccacaacctccttccatgaactccttatccagcgagaacagatttcaccctttacccttcagcctgacaaagatgcccaataccaatggcagcattgctcatagtccactgtcattgtcagtgcagtctgtgatgggggagctgaacagcacacctgtccaggagagtccacccttgcccatctcttctggtaatgcacacggtctagaggtgggctcactggctgaagtgaaagagaaccccccattctatggggttatccgttggattggccagccaccagggctcagtgacgtgctagctggactggaactggaagatgaatgtgcaggctgtacggacggaactttcaggggcactcgctacttcacctgcgccctgaagaaggcgctgttcgtaaaactgaagagctgcagacccgactctaggtttgcgtccttgcagcctgtttctaatcagattgaaaggtgtaattctttagcatttggaggctacttaagtgaagtagtagaagaaaatactccaccaaaaatggaaaaggaaggtttagagattatgattggaaagaagaaaggtatccagggccattacaattcttgttatttagactcaactttattctgcttatttgcttttagttctgccctggacactgtgttacttagacccaaagaaaagaatgatgtagagtactatagtgagactcaagagctactaaggacagagatagttaaccctctgagaatatatggatatgtgtgtgccacaaaaattatgaaactgaggaaaatacttgaaaaagttgaggctgcatcaggatttacctctgaagaaaaagatcctgaagaatttctaaatatcctgtttcacgatattttaagggttgaaccattgctaaaaataagatcagcaggccaaaaagttcaagactgtaacttctatcagatttttatggaaaaaaatgagaaagttggagttcctacaattcagcagttactagaatggtcttttatcaacagcaacctgaaatttgcagaggcaccatcatgcttgattatccagatgcctcggtttggaaaagactttaagctatttaaaaaaatttttccttccctggaattaaatataacagatttgcttgaagacactcccaggcaatgccgcatctgtggaggacttgcaatgtatgagtgtagagagtgctatgatgaccccgacatctcagcagggaagataaagcagttctgtaagacctgcagcactcaggttcacctccatcccaggaggttgaatcatacatatcatccagtatcacttcccaaagacttgcctgactgggactggagacatggctgcatcccctgtcagaagatggagttatttgctgttctctgcatagaaacgagccactatgttgcttttgtgaagtatgggaaggatgactctgcctggctcttctttgacagcatggctgatcgagatggtggtcagaatggtttcaacattccacaagtgacaccctgcccggaagtgggagagtacttgaagatgtctctggaggacctgcactctttggattccagacggattcaaggctgtgcacgtagacttctttgcgatgcatacatgtgcatgtaccagagtccaaccatgagcttgtacaagtaaccaggtcatctgaaatgggcagagaccgagcacaaagcttagcgctgtgttttcctccagctggtggttctgtctggcgcccattgccggcaatgggtgtcttttgtggtgatggcccttcagcaaaggattcctgtgtttccaaacaaattgcttttgtgttcttgaagtatttaataagaagcattttgcactctaggaagtatgtttgtgttggttttttaagaatctaaatgaagttattaatacctgaaacttttaagttaactgcattgatgatatgatatttttggaagcatataattttaattgtgacgtctaaaacctcttttagtccattgaggatgtaaataaatatctcttcttatggaccaaggatatgaaataaattttcttttgtagctattgattgccttgaggaagaaataatacggttttattaagagtctacctttacttcagttattggaggtgtgctgagtttaattgttaatttttactatatagtgctgatttcctgcatgtctgtattttgccgagtgtctatgtttctgaagcagtggtcagaacatgctgaaattccttttgtggtgttattttctatttgttctggttttgagataagtgagtgactttgttataaaatgtcaatttttgatgtcatcttcttggaggattagggtacatagcaattggagcatttcagtcatagtaacaactggtacctaacaggttttctataggagctcttaaagtatcacaccagaagagggtaccagatcttataacagatggttgtgagccaccatgtggttgctgggaattgaactctggagacacaactgttctttggtttcatattatagaaatagccttgtact

SEQ ID NO: 277 - DNA, 3142 bp, Cricetulus griseus
ctcatgacatcctccaccaacaattgggtcctcatcaagatcattaagctgttcggcgctctgactcccctggagcccaggctgggcaagaaattgatcgatccgcctgcgcgctcttgacctgctctatggaatggtgtccaagaagaatctgatggagatcgtgaagaagctgatgacccatgtggataaggctgagggcaccacctatcgtgatgagctgcttaccaagatcattgacatctgcagccagtccaactaccagcacatcaccaactttgagtggtatatcagcatccttgtggagctgacacgcctggagggtacccgccacggccatctcatcgctgcacagatgctggatgtggccatccgcgtcaaggccattcgcaaatttgctgtgtctcagatgtctgcactgcttgacagtgcccacctggtggccagcagcacccagccgcaatggctatttgtgaggtgctctacgctgctgcctggacaggctgccgacactgaggctgcacaggaggttacccagctactggtggagcggttgccgcagtttgtacagagtgccgacctggaggtgcaggagcgggcgtcctgcatcctgcagctggtcaagcatgtgcagaagctgcaggcaaaaggtgtcccggtagctgaggaagtaagcgccttgtttgctggtgaactgaaccctgtggctcccaaggcccagaagaaagtcccagttcctgaaggcctagacctggatgcctggatcaatgagccaccttcagacagtgagtctgaggatgagaaacccaaggccatcttccatgaagaagagccaaggcacgcacggcgccggcagcctgaggaggatgaggaggagctggcccggcggcgagaggcccggaagcaggagcaagccaacaaccctttctatatcaagagctccccatccccacagaagcgataccaagatgccccaggtgtggaacacatccctgtggtgcagatcgacctctcggtgcccctgaaggtcccaggcctgcccatgtcagaccagtacgtaaagctggaggagcagcggcggcaccggcagcggctggagaaggacaaaaaaaggaagaagaaggagaagggcaagcgccgccacagctccctgcccacagaaagtgatgaggacattgcccctgcccagcgtgtggacatcgtcaccgaggagatgcccgagaatgctctgcctagtgatgaggatgacaaagaccccaatgacccctacagggcactggacattgacctggataagcccttggctgacagtgagaagctgcctatccagaaacacaggaatgctgaaactgtgaagtccccagagaaggagggcacccctggtgtagagaagaagagcaagaagcctaaaaagaaggagaagaagcccaaagagagagagagagagaagaaggacaagaagggcgaggacttagacttctggctgtccaccaccccgccacctgctgctgtccccgtccttgccccatccacagaagaacttgctgtgagcactgttgctccagctaaggacgaggttgaagaactcaaaagagaggagccagaggatgaggaggacaacatggatcgtgatcaggaaaagaaatcgtcccggcacaagaagaagaaacacaggaaagagaaggaggagaggccacgagacaaaaagaaagccaaaaagaagcaggctgcaccactggagaatggtgcgacagaggaggaggaacccatcccgcccatgtccagttactgccttctggctgagaattcctacgttaaagtgacatacgacatccaagccagcctacagaaggacagccaagtgactgtgtcagtcatcctggagaacaagagcaacagcttcctgaaaaacatggagctgaacgtgctggactcgctcaacaccaagatggccaggccagagggctcatcagtgcatgacggtgtgcctgtgcctttccagctaccccctggtgtctccaatgaggcccagtttgtgttcaccattcagagcattgtcatggcccagaagctcaaaggcacactgtccttcattgccaaggacgacgatggggccacccacgagaagttggacttccggctgcactttagctgtagttcctacctgatcaccactccctgctacagtgatgcctttgccaagttgctggagtcaggagacctgagcatgaactctatcaaagtcgacggcattagtatttctttccagaacctcctggcaaagatctgtttccaccaccatttttccgtggtggagagagtagactcctgtgcctccatgtacagccgctcgatccagggccaccatgtctgtctgctggtgaagaagggtgagaactccgtatcagtagatgggaaatgcagtgatgccaccctgctcagcagcctgctggaagagatgaagaccacgctggcccagtgctgaatgacggagtccaggatgcccaacagactgtggacagatgtgatgggtcttgcctctcctttgtcacatgtagtgttcccacacccagcattaatttaacgccactggcctccactgtgtgactctgaggtcctgcccccatgctgtttctggaggaacccttccagctgctgctgtccccaaatatcctgtctggtgggatctgtggagaggtgaccaggccagctatgaccatgcttctcccccagagtctgcatggccagatgaatgaggtgtgcttgtgggtgttgtgcagctcagctgctgacaatagtgagccctttgattttcttctgttgaacagaattctgttctgttgggggtgtggtggtcagcagaggagtgcaatctgcccctcaagtttgtcactacacatcttgggttcgtccctgcactgggtagctgggcacaagctgagccttcctcagaggtgacagtaggtagtctgcagacattctggctgaccctctgaggactactgtcactttagcatgtagagtactctgttactgaccccacgtgaccctccagctctatgatgttccgtgattgatttgctgtcgacattcccatgtgaagagagatatatcacgctgctgctgatcgatgtcataatga

SEQ ID NO: 278 - DNA, 3141 bp, Cricetulus griseus
  modified_base (27)..(27): a, c, t, g, unknown or other
cgctgatagagagttaccagaaccgtnacccgggtggcggactactgtgaaaacaactacatacaggctacagacaagagaaaagctctagaagagaccaaagcatatactacccaatctctagctagtgttgcttatcaaataaatgcattggccaacaatgtgctccagttgctggatatccaagcatctcagcttcggaggatggagtcttccatcaatcatatctcacagactgtggatattcataaaagaaaaagtggctcgaagagagattggtattttgacaaacaaaataaagaatacatcaagaactcacaaaataatagcacctgcaaatatggagcgccctgtcaggtatattcggaaacctatcgactacacagttctggatgatgtgggccatggagttaagaagcacggaaataaccagcctgcaagaactggcacattgtcgagaacaaatcctcccacgcagaatcctgtgtcaggccgagggacttgggacggaatacccttacaaaacgctagagcctgttaagcctcaacagttcctaatgactacatgactagtcctgcaaggcttggaagtcagcatagtccaggcaggacggcttctttaaaatcagagaccaaggacacatagtggaagtagtggaggaagtggaagccgagaaaacagtgggagcagtagtattggcattccccattgctgtgcctacgccttcacctcccactgccggcccagcagcccctggctcagctcctggttcccagtatggcacaatgaccaggcagatttctcgacacaactctaccacttcttcgacatcttctggtggatatagacgaactccctctgtgactgcccaattctctgctcagcctcatgttaatggaggtccactttattctcaaaattcaatttctattgcccccctcctcccccatgcctcagttgactccacagatacctctcacaggcttcgtggccagggtgcaggaaaacattgctgatagcccaactccaccaccacctcctccaccggatgacattcccatgtttgatgactctccacctccaccaccacctcctccggtggactatgaagatgaggaagctgcagtagttcagtatagtgacccgtatgcagatggcgatcctgcatgggctcccaaaaactatattgaaaaagttgttgcaatatatgattatacaaaagacaaggatgatgagctgtcctttaaagagggtgcaatcatctatgtcataaagaagaatgatgatggctggtttgaaggagtttgcaatcgagtgactggacttttccctgggaactatgtggaatcaatcatgcactatactgattaggtttttattttttcttttcatgtaggttattactccgtcatactgtgggactatatggttaacagaattgtcttaatgtttaaaatgtgcccatattttcaggacatgttttattggtatatttggatgtctacctgtaagcatacattttggaggcagttcacatattgctgaacagcagtttataccagagactgcctgtaattgattatgcatatgtactcacaccttgataactttatgaccagcctaaatattctggggatgtggtttattacgtttaacaaatcatggttcagaatgcaccattacatgtttcagtgcagcatggtcactaacattatgtcagactaataggaaaaacagaaaacttaatgctggtgctggtcatacttttggtttaaattctcattttttaagaatactgtgtttaaagcatgcataaaattttatgtattgaaagatacttaacaattcaagatgcttccaatttgtgtaacatctggagtacttatacttgagtctctaggttcttcatgtgaaacgaaagattatctgtaatgttgtaatttgtacctaagttttttaatgagtgaaatttacattataaattttccattcataaatacataagtgaaccaagggaatttgtccactcctttactggtttgctttaaatgtgtgtgctcatgcatatgcatggacacaatcccaacacaaaagatttattgcagaattatggttctattttctcactgtatttgctgggaaatatttttagctttatcttaatgtgtccgaatagcaaagtcacagaattttgcagatttccggagctaagacattgtgtcaaagtaagcacataggggtgccacgctagtcttcggttttaatgaaaatgaatttacactggttcaatggaaggaaaacgttttacatattgtaaagtgattgcaattaatttgcagatagcatatttaatccattacctggcactagcaacataagattttacaattgggaaagaaagtgggtcatgtatttctttgtaaacaggtaataagcaggtttgtattgtggctgaaatgcaacacatgcactttgtgtgtctccttgatttaagggagggttagagggatatttctcttgtatataattctgttctgcttaggatattacagtagatcacacaagtgtgggtttctgtgtattgaggattacagatgtatgacagcatagtaaatgcgagagcagtgcaaaatatttctgaaaattaaagaccattgttcctaccaaatcaacaactatttcatttatattttacctttgttatttttgaagtattatgtcattagtgatcagatagctatattatgcccttttctttttgtaagcagaatgtcttaatttgtaaataatctgttgtctaaattttatctacagtcttttataataaactatgctcctaaatagaaaaaaatttggatattgttaaaatataactgatgtggatttaaatttaagtacagacttcaaaattctctgacctttaatcctatgatgaaacaaagacaaaccacttgaattttaacattgattatttatttgtgtaatggctttccatgtgggcattaacaatgtaaacaggaccacacataaccatcaggatacctcgattagaatttataggactataatgacactggtttaattacaattttaaaaagttttctagaaaaaactttgaccaaaataaaaaaattgcccat

SEQ ID NO: 279 - DNA, 3139 bp, Cricetulus griseus
  modified_base (1314)..(1314): a, c, t, g, unknown or other
  modified_base (1746)..(1746): a, c, t, g, unknown or other
gtgaccggggccccatgtatgatgaccccaccttgcctgaaggttggacacgaaagcttaagcaaaggaagtctggccgctctgctggaaagtaatagaatgtatatttgatcaatccccagggaaaagcctttcggtctaaagtggaattgattgcatactttgaaaaggtaggcgacacctctttggaccctaatgattttgacttcacggtaactgggagagggagcccctcccggagagagcagaaaccacctaagaagcccaaatcacccaaagctccaggaactggcaggggtcggggacgccccaaagggagtggcactggaagacccaaggcagcatcatcagaaggtgttcaggtgaaaagggtcctggagaagagccctgggaaacttctcgtcaagatgcctttccaagcatcgcctgggggcaagaatgagggaggtggggctaccacttctgcccaggtcatggtgatcaaacgccctggcagaaagagaaaagctgaagctgacccccaggccattcctaagaaacggggcagaaagcctgggagtgtggtggcagctgctgctgcagaagccaaaaagaaagccgtgaaggagtcttccatacggtctgtgcatgagaccgtactccccatcaagaagcgcaagacccgggagacagttagcattgaggttaaggaagtggtgaagcccctgctggtgtccacccttggtgagaagagtgggaagggactgaagacctgcaagagccctggacgaaaaagcaaggagagcagccccaaagggcgcagcagcagcagtagtgcctcctcaccccctaagaaggagcaccatcatcaccaccaccattcagagtccccaaaggcccccatgccactgctcccacccccacccccaccggagcctgagagctctgaggaccccatcagccctcctgagccccaggacttgagtagcagcatctgcaaagaggagaagatgcccagaggaggctcgctggagagtgatggctgccccaaggagccagctaagactcagcccatggtcgcagcaaccaccgccactgttgcagaaaagtacaaacaccgaggggagggagagcgcaaagacattgtttcatcttccatgccaaggccaaacagagaggaacctgtggacagccggacgcccgtgaccgagagagttagctgactttacacagagtggattgcaaagcaaaccaacaagaataaaggcagctgttgtctcttcctccttatgggtagggctctgacaagcttccgattaactgaaataaaaattnttttttgatagctgtatgtcctccattgcaaatgaccttggctccttgctctcccctctcaacttttatcaggtcatgcttagcactgagagaaaatgcagtgaaaatgcaaagaggtttggctcctgcccccctatagtccctctctctgcagtgtttgtgtgtcgagtggctaaagccattcttcctggtgaccctgattatatccagtaacttatagactatatgcataggtctgctttgtctcctctattctgggcttttgatttgctcttcagtttttcttttagtttttcctatttctttttattttatgcaccaactagacacacaaagcagttgaatttatatatatatatatgtatgtatgtatattgcacaaattaataaactcattttgcttgtggcaacacacacacacaaaaatttaanaagaaaagaaaaaaaaagcctagaccccacccctacgggacatgaggttctctctattggtcctctttaactgtggtgttgaggcttctatttgtgtaatttttggtgggtgaaaggaacattgctaagtaaaatctcttctgtgtttgaactgaagtctgtattgtaactatgtttaaagtaattgttccagagacaaaatgcttctggacaccttttcgttacaaagcatttgaggggaggggattgggtgataagacaagaggggcaatctgaagagacaacccctgcccagatcagctagatgccaccaagaagttaagcactggacttcccattccaagtcaagagactagaagactaatgtgttgcctattttacaaagtcaaggggtgccaggagaggaggagatgtaagagcagagctgagctcactgagtagggaaaggctgggcctgatcttgcaggaggatgccccactgaggacacagattagagaggaggcataaaatgaattagacactccctgcctgagatagctcttcctgaataagccaaggcagtgggcattattgtctccaaggcatgtttcagggacatgaccagataggacacttctgtcacataccatgctatcccatagtacatagtactaatctgctattttggctccctaccatgcctggggaataaaatgatggtagggggttctctcttttgatgtcatctgattcccaacaaaatctgggtgtgaaaaaccaccttctctttccatggcaaacatcttcagtaaagctgttactctcattacagattgttccaggctcatataaggggaacagaagtgctacctgttgtgaccagttcaccatggcatttagtagctgaaaaaccaaacagggtacatgccccctcctaaatccatgttgtgcttccctctgccagcctgaagggcaagatctataggagagtgcagccagtaacaggctacctgtattggaaaatattggcaccagcaaaaaagcccatctgaggttgggaagcaggcacagagagagagatccaggacagacatagctggaggggttggtcttgaaaagccctctgttgaattcaccttcggtttctgtgttttgggacaattactttagaaaataagtaggtcgttttaaaacaaaatattgattgcttttttgtagtgttcaaaaaaaggttctttgtgtatagccaaatgactgaaagcactgatatatttaaaaacaaaaggcaatttattaaggaaatttgtaccatttcagtaaacctgtctgaatgtacctgtatacgtttcaaaacacccccactgatccccctgtaacctatttattatataaagagtttgccttataaattta

SEQ ID NO: 280 - DNA, 3139 bp, Cricetulus griseus
ggtccgtctccatcctctggagccctggacctgcttgataccccttctggcctggaaaaagaccctggagtagtcctggatggagccactgagctactggggttgggggggctactttataaagcccctcccccccacgaggtggaccatggtcctgaggggacccttgcatgggattcgggggagcagaccctagagcctggaccagggtgccagacccccgaggtgatgccacctgatccagggtctggggctagtcccacttcacctgaggggctactagaacctttggctccggattctccaataatcctggagtctccccatattgaagaggagggaaaaatacccccaatagctacaaggagaaggggctcccctaggcaggaggaggagcatacccaagggcggccacagagcccaaatgcaccccctagcccttcagtgggagagactctgggggatggaatcaacaattctcagaccaaacctggggtctctatccctgctgcgcatccttctttgccaggagatggactcacagtgaaggagagtgagaagccgcctgagagggtacagaagagaagcgaacgcgttagaagagcagaacctccaaagcctgaggttgtggattccactgagagcattccagtgtcagatgaggattctgatgccatggtagatgaccccaatgatgaggactttgtgccattccggccccggcgctctcctcgcatgtcactgcgctcaagtatggcacaaagggctgggcgctcttcaatgggcaccaagatgtcttgtgcacattgccggacaccactgcagaaggggcagacggcctatcagcgcaaggggctgcctcagctcttcttgttcttcatcttgtctcactactttctccaagaagcccttggggcagaaagacctgtaccttctgcaagaaggagatctggaacaccaaggactcagtggtgatacagactggttcaggaggctccttccaagagttctgcacatccgtctgtctgtctctgtatgaggcccagcagcagcgtccaatcccccagtctggggatcctgccgatgccactcgctgcagcatgtgccagaagactggagaggttctacatgaggtcagcaatggcagcgtggtgcatcgactctgcagtgattcttgcttctccaaattccgagccaacaagggactgaaaaccaactgtatgaacctgacagtatctactatctatgtcttggaatccagcagtatttgctggaaaataaccgaatggtgaacattttcacggacctttactacttgactttcgttcaagaactcaacaagtctctgagtacctggcagcccacactcctccccaacaatactgtattctcccgtgtggaggaagaacacctctgggagtgcaagcagctgggggtctattctccctttgtccttctcaacaccctcatgttcttcaacactaagttttttggactgcagacagctgaggaacacatgcagctctctttcactaatgtggtacggcagtctcgcaagtgtaccactcctcggggcaccacaaaggtggtgagcatccgctactatgccccagtccgacagaggaaagggcgagacacaggtcctgggaaacggaagagagaagatgaaactatcttagagcagcgtgagaatcgcatgaatcccctccgctgccccgtcaagttctatgagttctatctctcaaaatgtcctgaaagcctcaggactcgaaatgatgtgttctacttgcaacctgagcgctcctgcattgcggagtcacccctctggtattctgtgattcccatggaccgaagcatgttggagagcatgcttaatcgtattctggctgtgcgtgagatttatgaggaacttggtcgtcctggggaagaagacctagactgatcccatgtggtaccttgtattcatctttcacattggtgtctgtcctgctctttctattctctcattccctgccttttcccaggaacccctgactttaaccttccatccacttgtaagcatggggtcccaatcttctgtactcatgggctagtcccccagtgatgggcatgaagcaggtagcccattttctttacgtgtcacagtgaaccctttgtgctggggcctgactctgatggagtgataatagctctggtgatcctgttggctttgggtttcgtgacctatacctatgtaggtgaagccctgtgttcctaggtctgacctagggaagaacccagctgccttctctgccctgtgtcctctctctcctcttccccagtaccatgtgaaagggtcttgtctgagagatgtgaaataaataaatttccctaaagcacagagctcagacacgtttatccctcctgaaataagtgattgttggcacccttcaccaccatgtcccttacctaccctttgagcaccactctttggtgctacgtttctcaagggttccaaatgctttcttttcctcaaaggcagagaatgactcagtgtggggagcagactcctattgtgcatattcctgtccccttggtttatgtgtttgtctctctctgccatcttaggatggcatgagccatggtgtcaacatgattagtccctctgtaactgcctcctccctttagtttcatgaacagagctctcaaggcaaagatgaacttgtgacttgcattggggctgggttccccaatgttgttctacccctatcatcagagccaggcccaccccatgggggacttggctatacaggatggggtttgtggttcaaaagacaggttaggagctatgggtaaggatcctgctcctactgcctacatcttctcgttccccattttacctttgtgggcccagaaaatttcgtgtctggcagagggagtgcccagttctttccctgttggctttgctgtttcccagccttctctttgtgtttttataactgtcaccagtttagccactgtttaaattgtatatattgtactgaggtgcctggcctgttccttcagtgagccatgcctacccttgtgttgtagtgagcaactgttgtcacaactaaccttctgtctctggaatttgtttcaaaataaagagttaaaattg

SEQ ID NO: 281 - DNA, 3138 bp, Cricetulus griseus
gccgcccgcccgcccgcagaaaaccatggcgtctggcagtactaccaccagtgaggaggagcggagtctccgggaatgtgagatctatgtccagaagcacaacatccaggccctgctgaaggattctattgtgcagctgtgcactgctcgacccgagaggcccatggcattccttcgggaatacttcgagaggctggagaaggaggaggcaaaacagattcagtgtctacagaagagcggcactcgtaccgactccagggaggacgaaatctctcctcctcctcccaacccagtggtgaagggccgccgacgccgtggtgctatcagcgctgaagtttacacggaggaagatgctgcatcctatgttagaaaggtcatacccaaagattataagacaatggctgctttagccaaagccatcgaaaagaacgtgctgttttcacatcttgatgataatgagagaagtgacatttttgatgccatgttcccagtctcctttattgctggagagacagttattcagcaaggtgatgaaggggataacttctacgtgattgatcaaggagaaatggatgtttatgtcaataatgaatgggcaaccagtgttggggaaggagggagctttggagaactggctttgatttatggaacacctagagcagccactgttaaagcgaagacaaatgtgaagctgtggggcatcgaccgggacagctaccgaagaatcctcatgggaagcactctgaggaagaggaagatgtatgaagaattccttagtaaagtgtctattttagagtctctggacaagtgggagcgtctcacagtggctgatgcattggagcctgtccagtttgaggatggacagaagatcgtggtgcaaggagaaccaggggacgagttcttcattattttagagggcacagctgctgtgctgcagcgtcggtcagaaaacgaagagtttgttgaagtgggacggctggggccttctgattatttcggtgaaattgccctgctgatgaatcgtcctcgggccgccacagtggttgcgcgtggccctttgaagtgtgttaagctggaccgaccccggtttgaacgtgtccttggcccatgctcagatatcctcaagcgaaacatccagcagtacaacagcttcgtgtcactgtccgtctgagatctgcctcctgtgcctctcttctccccagtccacgcttcactcatgcagactgctctttccctatccgcagcgccaagtagccactggcttcacagcttcttgtctctttatactaaaagttgcttttttttttcatttggagcattgactgaatgctcgtccacaaataaatagagagttctatggacttggctgttaacgcttctctctgtgcagtgctagtgttcaacctgggcagtgagtgccatgctttttggtgagggtggtcctgcaccagtgaattaccgtaatgatgtaataaaagtgcaggggtttctaagtgacacagatttccatttccatatgacgcaagtgacatatttagactgtggccatgtttgctgtatttctttatagaataaatgactttaacttttaaggattagaagaatggatatagaaaaatcctagtacagtagaaagacatctgcttgcaattcaactagtttaagtgtgggaactgcccatgttttgctaattgccagacagatacaactagttcagccttctcagcctggttttgtttgtatattgctagtgtttcttctccaaccctgaactgtttcggtgtggctgtctatacctgccttttaagtttgaaatcaaatagatggccaatactgggtggtgacttaattacatctatctcagctcacaggttttaatgataactacttatccagctggtgccaaatactgatcatgagatgcagaactgtgagggagaatttgaggtctgcactctttgttaactgtcattaactagtgtgatctgccctcggttattgattctaggagattggatttgcggagaatagacagagacaggacaagccccaaagaaagaaatggaggcagtgttgctgaaagtggatgggatccggtgtccagagacaggaagctttgtggtctgaaaggccatcctgctgaaagtcctaccttttcctgtctaaccttgaatttctctggtaaactttattgatttctgtttgtgtgtgtgtgtgtgtttcttaactgtatttcagtattttccagccttatgtgttattattccaatgataaccaacagtttatttttattactgttattttttaaacaaagtttctcagttcctaactaggcatgctgtggtttatgtacaatgtcaggttctatttgggagtgactgcaagcattttccatgtctgtgcagatggttctgattaataatcccctcctaccgtttcccctaacttaaattggttatgacagatttttttcttgatgggttgaaatgcttttaggttgttactaacttgggaaagaagtttcatttaggttttagtgtggggtagaaagctaccttgttgctatttctaactatcttcaatgagggtttttctgtactttgtgtttggctatcttttttatatttaaaaactaaaaatgatgttattagattaaagcttaatttgatatttgtttaaatgccaaaaatgtacttacatgaatgatgtagaatgccacaagatgcatttttgtgtgtatatatccctttgttgttgtatacagatacacaccctgctttccagagagctccacataatgctagcttgctggttactcccttttgtagtttttactcttagacttctcaagataagtctaaatttaaaaattaccacatttaaagctttatcgttgtgcaatttaaatattagtcagaagttatggttggcatactgtgtctttgtggactctaggtaccatcatctctgaatgggtggatgaatcagatctactaagaaagcggagatggccaaagggacagttgctgtttcctggatactagtttgatatactgtgtgctaatctaatatacgctgttcttttgttacagactgtctcaatggtaggtcacagaataaaaaagattaaataattt

SEQ ID NO: 282 - DNA, 3138 bp, Cricetulus griseus
tttctgggaagagtaaggaagaaaccgggagaaaagcgagggggaaataaagagaaaatagaagggctcagcccttttcctctgaactgaagataggaagcagtttcgactggcgtgtgaggtcccgagggcccagagatgttctccctgtcgagcactgtgcagccccaggttacagttcctctcagtcatctcatcaatgccttccattcaccaaaaaacatagctgtttctgtcaatacatctgcttctcaaaagcagcatcgagagcatgttcctgagcatgacactcccagtagtgagcctgtacttaatttaagggaccttggattatctgaattaaaaattggacagattgatcgactggtagaaaatttacttcctggatttcataaagacaaaagagttacttcccattggcatacgtctcatgtctcggcacaatccttttttgaaaataaatatggtcacttagatatgttcagtacactacgttcctctagcttgtacagacaacacccaaaaactcttcgaagcatttgttcagatcttcagtgttttccagttttcatacagtctcggggttttaaaactttgaaatcaagaacacggcggttacagtctacttctgaaagattagcagaagcacagaatataacaccatcatttgtgaaggggtttcttttgagggacagaggaacagatcttgagagtttggacaaacttatgaaaactaaaaacatacctgaagctcaccaagatgcatttaaaactggttttgcagagggttttctcaaagctcaagctctcacacagaagaccaatgattccttaaggcgaactcgtctgattgtgtttattctgctcctgcttggcatttatggactcttaaaaaacccatttttatctgttcgcttccggacaactacaggacttagattctgctgtagatcctgtccagatgaaaaatgtcacttttgaacatgttaagggggtggaggaagccaaacaagaattacaggaagtggttgaattcttgaaaaatccacaaaaatttactgtgcttggaggtaaacttcccaaaggaattctgttagttgggccaccaggaacagggaagacacttcttgcccgagctgtggcaggagaagctgatgttcccttttattatgcatctggatcagagttcgatgagatgtttgtgggcgtgggagccagcaggatcaggaatctttttagagaagcaaaagcaaatgctccttgtgttatattcattgatgagttagattctgttggtgggaagagaattgaatctccaatgcatccttattcaaggcagactattaatcaacttcttgctgaaatggatggtttcaaacccaacgagggagtaatcattataggtgccacaaatttcccagaggcattagataatgccttaatacgtcctggtcgttttgacatgcaagttacagttccaaggccagatgtgaggggtcggactgaaattttgaaatggtatcttaataaaataaagtttgacaaatctgttgatccagaaatcatagctcgaggcactgttgggttttctggagcagagctggagaatcttgtgaaccaagctgcattaaaggcggctgttgatggaaaagaaatggttaccatgaaggaactagagttttctaaagataaaattctaatgggaccagaaagaagaagtgtagaaattgataacaaaaacaaaaccataacagcctatcatgaatctggtcatgctattattgcatattacacaaaggatgcaatgccaattaataaagctacaatcatgccacgggggccaacacttggacatgtctcactattgcctgagaatgacagatggaatgaaaccagagcccagctgcttgcacaaatggatgttagtatgggaggaagagtggcagaggagctcatatttggaaccgatcatattacaacaggtgcttctagtgattttgataatgcaacacaaattgcaaagaggatggttaccagatttggaatgagtgaaaagcttggagttatgacctacagtgattcaggaacactaagtcctgaaactcaatctgccattgaacaagaaataagaatccttctacgggagtcatatgaacgagcaaaacatatcttgaaaactcatgcaaaagagcataagaatctagcagaagcgttgttgacctatgagactttggatgccaaagagattcaaattgttcttgaggggaagaaattggaagtgagatgataactctcttcatattgctggttttattaaatataagtagccctgcagtctctttttgcaacactcttcaacccccattcttgacctggtatatatataattcaaggatgtgaaacactttgtcaatcttctgtcacattatctgattttgggtatttccatgatggcacccattggagattagtaacccatagcaagtacatgaaaaataataaataaaaagctgtcaggattaatgacagattgtttgaaaaatgtacaatcaatgttgaaagtaagcaaatcattttgtggttgattacttgaagtgagtaaaaattgtgcctttatctactggttaagttttttttttgggtaaatcaatttcttcatatatcagtggaaatcattaagatgtatttaattatgttcttgattgaccatgtaaaatggcctttaaatgaagctatttgaattgtaaacataaagatataatcagagtttaaatgattgtaatattttaaaaacacagcatgcatgcccattttctttcagattctaccatctcactgacaaaattggtttcagaaaaacagtattttatgatggaaataagtaacaaagtatattctgaataattgtataattatatttaatctcaaaatcaaaatgaaaaccaaaaacttaattcctttcaaaaggtggtctttcaacttatgccttgtcagaattggaaggcttgtgcatctgcacatattataagatttattggtaatttcatatttaaatcattagaacatagagtgcattgtattggtgttataaccaaattacattcttgaaggaactattaaaattacgttcagttttct

SEQ ID NO: 283 - DNA, 3136 bp, Cricetulus griseus
ctgaggggggaagatggccgcgccgagctggcaggacgagctggcccggcgcgccgacgagggactcggctcgcctgcgggagtggctgtcgtccggcctgggcttcctgcgcaccgagctgggcctcgacctggggctggagccgaagcgctacccgggctgggtgatcgcggccggcaccggcgcgctcgggctgctgctgctgctgctgctcggctacggctgggccgcggcctgcgccggcgcccgcgggaagcggaggagcccggcccgcaagcgggaggtggaggcgcgacgagcagaagaagaggaaccggaggaagccttcggaaaaggccagaccaaatggtcggactattgaagtacctgaggatgaaattgttagaactccccgaagcataacagcaaagcagccaccagaaacagacaagaaaaatgaaaagtcaaagaaaaataagaagaaatcaaagtcagatgctaaagcagtgcaaaacagttcacgccatgatggaaaggaagttgatgaaggagcctgggaaactaaaattagtcacagagagaaacgacaacaacgtaaacgtgataaagtgctgactgattctgggtcattggattcaactatccctgggatagaaaataccatcacagttaccaccgagcaacttacaactgcatcatttcctgttggttccaagaagaataaaggtgattctcatctaaatgttcaagttagcaactttaagtctggaaaaggagactctgcacttcaggtttcttcaggattgaatgaaaatcttgctatcaatggaggaggctggaatgaaaagtctgtaaagctctcctcgcagatgagtacaggtgaggagaagtggaactctgctccacctgcttctgcaggcaagaggaaggcagagccacctgcttggactccagactccgctgatgctaacgccaatgggaaagactggggaaggaactggagtgaccgctcaatattctctggcattgggtctactgctgagcccgtttctcagtctaccacttctgattatcagtgggatgttagccgtaatcagccctatatcgatgatgaatggtctgggttaaatggtttgtcttctgctgaccccagctcagactggaacgcaccagcagaggagtgggggaactgggtagatgaagaaagagcttcacttctgaagtcccaggaacccatccctaatgaccaaagggtttcagatgatgataaagaaaagggagagggagctcttgcaactggaaaatccaagaagaagaagaagaaaaagaagaagcaaggtgaagacaactctctcacacaggacacagaagagctagaaaaggacattagagaagaacttcccatgaatacctccaaagcccgtccaaaacaggagagaggcttttccctgaagaccatgagcactagtgacccagatgaagcactggtcaaaaatagccagcctatcaagactcttccacctgctatctctaccgagccatctgtcaccttatcacatggtgactctgacaagagctcttcccaagtgccaccgatgttacaagacacagacaaaaccaagtcgaacgctaagcaaaacagtgtgcctccctcgcagaccaagtctgaacctaactgggaatctccaaaacaaataaaaaagaagaaaaaagccagacgggaaacgtgaatttttttttcctgaattggacatgtgtttacaaacactgtcttgaagattatgctgtttatgcaataatttgtgaacatgtacagagttttatataaatttaaaccaatttttaaaacaaaactgaacacaaccaccataaaatggaatcaaaggaaagttaatttatgagatgaagaggtcaacagaatacatcctacagtgctggagacacttgggagagtcttttcaattgatgaagagtgatcttaactgaagaatattatcctggttttacagcagttccctgtttacaacagaacagtgtgctgtgtcctgtgcagctgcagaagaagagtggattctgattagaaagaaggccgcctagaaaccagtgggcagctctttggatcttatgcacgaacttagaccgtttgaatctgtttttcgcttaaatcaaagtgctttgatcaaatgtgtaatctgccatatctttacatatttgttgtagcaatttgtattaaaagaatcacaagtgcaaataaaaagtcatttatcatttgtttaactaaactgtcttggtttagtttacagttcttaaaaagttcttaattaaaatattgaaaaatgcaattgacaaacgtatggcttacaaagttatttttgatagtcttacattacttgaattattcaaaataacagtatattttaaattaagaaaggtaaactatattatttgtttggtatgtttaaggctgagtaacaaataatgctcttgttgatgatttgaaaactttcaggcaaaattcaacttaatattttcctttccctagcaatttttccagtgtcaactcttagttgctagtaattttttcattttaaaatgaagtaactcaccacttttgagcatatgatggagaatggaaaagtagtcagacagctttaactgatgttgtcgagacctccagttatcaggaatacatttttttactgccttaacctgtagtgcgtagaatatgcatcaatttcttgaaggggattcatgtttttataagaattttcatgtaactattgcaattgtggtcaaaaaggaacattttctgcttgaaactgtgttgatttaaatgacgtgtgatctgtcaccgttttcaggcactgtgtgatctcgaggaaactggcaggccgctctgtaactgttaatagtgcatgcttggccatgtacactgtaaatagcctttaccaaacatgtttgacaaaggaccataattaacatcacttagtgaattgtgataaagaaaaagccatgatattgatgtgagtggcttgttttcgtgtggcgccgggaatgaacctgtttaaacgctataaccaatggtactgatccatccatcaaatactgtctttatatttaactgtagtttaatagtattttcagctaggaaagcta

SEQ ID NO: 284 - DNA, 3135 bp, Cricetulus griseus
gaggcttcagcttcccttagagcagagacgcgggcgccgccggcctcgcctgttgccgcgggagccgggcgggaggagcacggaaggagccatggctctggacgggataaggatgccagatggctgctacgcggacgggacgtgggaactgagcgtccatgtcacggacctgaaccgtgatgtcaccctgagagtgaccggggaggtgcacatcggaggggtgatgttgaagttggtggagaaactcgatgtaaaaaaggattggtctgaccatgctctctggtgggaaaagaagagaacgtggctgcttaagacgcactggaccttggataagtatggcatccaggcagatgccaagcttcagttcacccccagcacaaactgctccggctgcagcttcccaacatgaagtatgtgaaggtgaaagtgaatttctctgaccgagtcttcaaagctgtgtctgacatttgcaagactttcaatataagacaccctgaagaactttctctcttaaaaaaacccagagatcccacaaaagaaaaaaaagaaaaagctagatgaccagtctgaagatgaagcacttgaattggaaggaccgcttatcactcccggatcaggaagcatatactcaagccccggactttacagtaaaaccatgacccccacttacgatgctcatgatggaagccccttgtcaccaacttccgcttggtttggtgacagtgccctgtcagaaggcaatcccgggatacttgctgtcagtcagccggtaacatcaccagaaatattggcaaaagatgttcaagcctcaagctcttcttgataaagacaaaaaccaaccaggaaaatgaggccttgctgctccggttcaagtactacagcttttttgatttgaatccaaagtatgatgctatcagaatcaatcagctttacgagcaggccaagtgggctcttctcctggaagtagattgaatgcactgaagaagaaatgatgatgtttgcagccttgcagtatcatatcaataaactatcaatcatgacctcagaaaatcatctgaacaacagtgacaaagacgttgatgaagttgatgctgccctttctgatctggagatcactttggaaggcgggaaaacatcaacaattctgggtgatattacatcaattccagaacttgctgactatattaaagttttcaagcctaaaaagctgactttaaaagggtacaagcagtactggtgcaccttcaaagacacgtccatttcctgctataagagccgagaggagtccagcggtacacctgctcaccagatgaacctgagaggatgtgaagttaccccagatgtgaacatttcgggccaaaaatttaacattaaactcctaattccggttgcagagggcatgaatgaaatttggcttcgttgtgataatgagaagcagtatgcacactggatggcagcctgcagattagcttccaaaggcaagaccatggcagacagttcttacaacttagaggttcagaacattctctccttcctgaagatgcagcatctgaacccagatccccagctaatcccagaacagatcacaaccgacatcaatcctgagtgtctggtatcccctcgatacctaaagaagtataagaacaaacagataacagcaagaatattggaggcccatcagaatgtagcccaaatgagtctgattgaagccaagatgagattcattcaagcttggcagtctctgcctgaattcggcatcacacacttcattgcgagattccaaggcggcaagagagaagaacttattggaattgcatacaacagattgattcggatggacgccagcacgggagacgccatcaaaacatggcggttcagcaacatgaagcagtggaatgtcaactgggagatcaagatggtcactgtggagtttgcagacgaggtccggttgtccttcatctgtactgaagtagactgtaaggtggtccatgagttcattggtggttacatatttctctcgactcgtgcaaaagaccagaatgagagtttagatgaggagatgttttacaaactcaccagtggttgggtgtgaataggaaaactgtgtaatgaaactccacagccataacaatatttaactttaaagctattgtttcctatatgctgcttaataaagtaagcttgaaatttatcattttatcatgaaaactctttgccttatcagaccggttaatatgtgcactaacaagcacggttattaatctgctaccgtgatgcagtatgtggactgtggaataccgaacattcctcaggagctgtcgctgattgacactagccaaactaagaaacaagccatctactaccaagttatccagggtgtaacctatatgaagtctatttatcatgtataatgcatgtgtttaatgtatgtttcatttgatgccctctcttaaaataccctacttctggtagccaatcagtcccctctcctaatataaaatcgggtctgcagtagatgcttggtattcgatgatgtcattgaccttgaaggaagtgctgttgatctgttgttgtgcttgactgggtttgtccttgaataagcatgttgtacattgttttgtgtttatttttacaccatactgtattacaacactcttagtattcaccagcatattcactatctgcctaaaatatgcaacctttgtgttacaatatgaagtaaagttctatgaagtatgcattttgtgtaactaatgtacaaacacaaattttataaaattgtacagttttttaaaaactattcacaactaggaaatggcttaaatgtagcatcgttgcattaattaaatgcttttaaagtgtataattaatatgcagtttcagtatctgctaaattaagaatgccttcatgatggtcatgacttgccgtgatgcccttagctctgcccctggactggctgtgctctggtctgttgcgctgttacagtctgcattggtgctagttagaaaactcctagctcacaagcccagagggcgccagaaggggtagacttaccagtattgtccaataatccatgacttaaagactgtataaatgcattttattttaaataaaagcaaaaccttttaatttaa

SEQ ID NO: 285 - DNA, 3134 bp, Cricetulus griseus
  modified_base (1726)..(1726): a, c, t, g, unknown or other
gcagcgatggcagaggaacaacaacagccgccaccacagcagcccgatgcccatcagcagcttcccctcagcgcccccaaccccggggtggctctgccagcccttgtgcccgggctgccagggacagaggccaacgctctgcaacacaagatcaagaactccatctgactcccgtcctctcctgtgcagcatcaaggtgccactgtaaacaccaacaagcaagaagggtttgcagtccctcgctcctcttgataataaaggaactaattcatctgccagcaacaccttcaggtgccggagtgtgagccctgctgtccatcgccaacggaatcttagtggaagcaccctcctatcctgtgtctaatatcccacggtctaatgtaaccccctttcggaagtccagtaaccccagaagttcatgttttcacaaatgttcacacagatgcatgtgccaacaacatagctcaaaggagtcagtcagttcccttgacagtcatgatgcagacagctttcccaaacgctctgcagaagcaaaacaaacagtaaaaaaatcaacaaatgttttgttgagtaaacttgattctgacaatgatgatgcagtgagaggtttgggaatgaacaacatgccctccaattacacagcccggatgaatctcactcagattttggaaacttcccctgtttttcctagtgccaattcacaaaatatgatcgattccagcacttcagtttatgaatttcaaacaccatcttacctcaccaaaagtaatagcaccgatcagatcagtttttctcctggagataatcaagcacaatctgaaattggagaacagcaattagatttcaatagcactgttaaagacctgttaagtggagacaacctgcaaaccagccagcagctgggaggtcaggtagcatctgatctcaccaacactgcatctgatttccctagcgacatcaggttgtctactgacctctcaggcagcatcaatgatttgaacaccttagacccaaatctactgtttgatccaggtcgtcagcagggacaagatgatgaagccacactggaagaattaaagaatgacccactgtttcaacagatttgcagtgagtcaatgaactctatgacttcatcaggttttgaatggatagaaagcaaggaccaagcctactgttgaatgttggataattgtgttttataattatgtagcacactgtatctaaagacatatgtattgttatttgtcttaattggaagtgcctcccgcagcagaaacactattaattgtgacattttaaaagcgtttgctgcagaagtggtttcttcttcagtaggaaatggttagacttgcctcagttctggacaagtttctgaagacagtaggctgtagagcaagtattaggttttaaattttataatgttccccatttaatcacatttgctagtaaagaatccagactttttacaagagcagtctgggtctttattttgtataagtttattttagttcatcagttgatctacatggaatttgaaagaaaccatccatttttagtcataggctgttttgttgttggcattatcttttaggtatgaaatcatagctaaggtaaactgtaggcaagagagtcttccttaaaacagggataatattcaggttattataaatatttaagcttgaaacatgaagctactgtagaatgagaaatctctgtaggactttcngggggctttcctttagtaatcagctttcctccacctcagtttgctcactccttcgcttctctgaatgtagtaatacagtttgatcatggatcctttgcaaaacaccaagcagaaaagagataatgttaagagcccagcaaaaaagcatttcctcacatgaggtgtgaacctcagatctttgtatcgctggtaaaacaaagggggtgataatagtacttgaagaaaagaagcattttattacttgcttaacttatttattgtgatggacacagttgcaaaagaagacaaagcactcaggatttgttttaaagtgtttatggctccattttggtttatgaatagtatttatgtaatttcatgttaaacacaaaactagtgggcagcttcatataagtgagtttcaaggttaaattttaaagagtaattaaaagttaaccttaaattcttaaaagctaccatgacatcattcactgtactctcctgaacctagccaagcttttctttaccttaattcaaaaataaatcaaaagactgcaatccgaatatttaacaaatatgatggaagggttaatttaataagggtccattgttcaacagatttaaaaaagtagggtattaacatattctaataaatcaatggtgctagagttggctcagaggtttatctatggatatgtcctagttactggcatatttgtgtgtttgctgttaatttgatttaatgatttgttagattttttttttgatactagttatttcttcactgtacattgagacacagcactactgcacaccaaagtatgtaatacccaaaggaaactgtgtgattttcttactaacaaatgatgggagcctttctcagtgagagactctgaaaaggagactttgaggccattctaatccctgtttacattgttagcttcctactaatataaatttggctgaattcgtccagcaaactttttggggttcgtatattgcactaaatttgttgaacctgtggtaggcacatctcttaggataaatgcaaccagtacagtccacagattaaaatttttaaatgtgtttcattatgaaaagacaaaataatcatcaaagtgacagatgaaattgtcttatgtagcaatgtgcactgatctcaatgagatatttctatttcttattctcttacacgagaatattacagcaggaagaattaagtttagtttgcttcaccatgttaatacatgatcacaaaatgtgcatgagtgttcttgacttatcctgtacagtactaggtaatcctgtaacctactttttttcccctcttggctgtattgaaactggctctgtgttaaccaggtgagcatagttattcactaggttattttgtcttttttaatgtttactaattctgcttagttgattg

SEQ ID NO: 286 - DNA, 3133 bp, Cricetulus griseus
gactcggccgcagctgcggtgtgaggcgcgtgttcgggccttcgccgtccccgcacccgcaccgcagccgtgccccgcggcccgccgcacctcagctagcctccgggaccccacccgccacggccatgccgcgcgtctacataggacgcctgagctacaacgtccgcgagaaggacatccagcgctttttcagcggctacggccgcctcctcgagatcgacctcaaaaatgggtacggtttcgtggagttcgaggactcccgcgacgccgacgacgccgtttacgagctaaacagcaaggagctgtgtggcgagcgcgtgatcgtagagcacgcccggggcccgcgccgcgaccgcgatggctacagctacggaagccgcagtggtggaggtggatacagcagtcggagaacttctggcagagacaaatatggaccacctgttcgtacagaatacaggcttattgtagaaaatctgtctagtcggtgcagttggcaagacttaaaggatttcatgcggcaagcaggagaagtgacttatgcagatgctcataaagaacgaacaaatgagggtgtaattgaatttagatcctactctgacatgaagcgtgctttggataaactggatggcacagaaataaatggcagaaatattaggcttattgaagataaaccacgaacaagccataggcgctcttactctggaagtagatccagatcacggtctagaagaaggtcacggagtaggagtcgcaggagcagccgcagtagatctcgaagtatctcaaaaagtcgctcccgatctaggtcgcggagcaaaggtcgatcccgatcccgctcaaaaggcaggaaatccagatcaaagagcaaatctaagcccaagtctgatcggggttcccattcacactcaagaagcagatctaaggatgagtatgggaagtcccgaagtaggtcacgttctcggtcccccaaagaaaatggaaaaggagatataaagtccaaatccagatcccggagccagtctcggtcccattcacccctgcctgctccaccttcaaaggctcgttctgtgtcccctccgccaaaaagagcttccaggtcccgttctagatctcgttcaaggtccagatcaagttccagagattaaccctgaactctgcgttctttgcacactataatgggacactgtcctacttgcttaggcagttactcttccaagtttgtacttggcctcttcttcaagaggatttcctggaaagggaacacaggagtttaatttgtggccaaatttaatgagaaaaagatgaggttctaaaatggtggtatgaacccctctcccttctttgtagaattaagataattttgattttgtagcctttgagcctaaaataacttttgtaaagattaagctcatttagatttttttttaaatattgcagcagaatctgctgcagggttctgttttgtttgcttatttttaaattaactgtttcaaagctttggatactgcaggctttagagggagaacccaaattttcaattatgttagctttttataaagctcgagttatgtaagatttaaataaaagtttgctaccaagatgattgccttattgaataggtcactactagggccccgtaagtgttgatacctgccatttatggagacagtgtaaattccactgaagtgtaaaacaaggcaagcctcagaccagcagcaataaattaatcagtttggataactttattttgtgctgttaatccaatcagtccccattgtgttagtggggcattgtggttggtttggaaaaacagtgacatggctaaacttaaactgctttgtactttaaagcattataaatactgtggaaacaaagttaaaatagtgcaaacttgtaggaataactggattcgcagtttccatgcatccaaaagcccagttcgttgagactgcaatcaataagtgaattaccttacaacctttccattgttcagacatgttaaagtcatttcatcctaaatacttaacctcagtgtttagtcaaggtatagttgaattggctcaggtttaatacgtagggttggtgtgtgggattaaataatcagaagacatgcaataaaatgaggctgagtggaaaaatggatattcaagggcctagataggtgtcagtagctggaaatacttgggaacagggaaaagagaatgttttcaagaaatttatttctgttacaaaatcttaaagactaacttcaggatatagtgtcaaagctgctgctttagtcatttttttctttgatgctttgtttagatgtttataaaaataggtttattttccagtgtaaatttcaaaagttaaaagaaaattgtttctggttggagtttactgttttgcctgttcaaaaacagaagtgttggctctttaagaattgggtttgaccaaagttctttgttttcagggaaaaatctataaaaagctttctgagccacagccttttaaagaggaaaggctatcggtgaaatttgactttctgactgcacgcatcttctgctgggtttgcctttgttaatgtagtacatgacggaggcatttgaccgttttagccgccccaataagtatatatataatgtataggtaaatgccaacacccatatagtttttctagtgggggcaaaaaaaggccattttattaaaatctaggcctggttcatacctgtagaccctagttactaaatgcactaaacagaccactgcatttaaagcgttggccttagcagaattgactgacttaaatgtttagttctttactgactagtgaattcagttccctgccaactaatgcgcagaatcttaggaatcccatcttgcacacactggttgataccctgggtggagtatcaacagcaccaactgataaaagagcacaagagaagtggggaacatcttgagtcctgttggacatgaaagcgtgtcttgatatgccacagtgcctttatggccagtttgagtcctgcctacttcagcctttatgttcccactcctcctgtgttaacattgctttcatcttggataatttttttctactttgttaacctattttatgctttatctcaataaaatgcttaccaaagggaaa

SEQ ID NO: 287 - DNA, 3132 bp, Cricetulus griseus
gaagcggcttaatactcgagagttccgtacacgcaaaaagcttgaagaggagcgacacaccctcatcacagagatggtcgccctcaacccagactttaaaccacctgcagattacaagcctccagcaacacgtgtgagcgataaagtaatgattccccaagatgagtatccagaaatcaattttgtgggtctcttaattgggcccagagggaacaccctgaagaacattgagaaggaatgcaatgccaagatcatgatacgggggaaaggatctgtgaaagaagggaaagttgggcgcaaagatggtcagatgttgcccggagaggatgaacctcttcatgctctggtcactgccaatacaatggagaatgtcaaaaaggcagtagaacagatcagaaacatcctgaagcagggtattgagaccccagaagaccagaatgatctacggaagatgcagcttcgagagttggctcgcttgaatggcactctacgggaagatgataacaggatcttaagaccttggcagagctcagaaacacgcagcattaccaatactactgtgtgtaccaagtgtggaggggccggccatattgcttccgattgcaaatttcagaggcctggcgaccctcagtcagcccaggataaagcacgaatggataaagaatatttgtctcttatggctgagctaggggaagctcctgtccctgcatctgtgggctccacctctggacctgccaccacacccctggccagtgcaccaagacctgctgctcctgccagcaacccaccaccaccgtctcttatgtctacaacgcagagtcgcccaccctggatgaattctggtccttcagagaatcggccctaccatggcatgcatggaggtggtcctggtgggcctggaggtgggccccacagcttcccacacccattacccagcctgacaggtgggcatggtggacatcccatgcagcacaacccaaatggaccaccaccaccttggatgcagccaccaccaccaccgatgaaccagggcccccacccacccggacaccatggccctcctccaatggatcagtacctgggaagtacgcctgtgggctctggggtctatcgcctgcatcaaggaaaaggtatgatgccgccaccgcctatgggcatgatgccgccgcctccgccacctcccagtgggcagcccccgcctcctccctctggtcctcttcctccatggcagcagcagcagcagcagcctccaccaccccctccgcccagcagcagtatggcttccagcacccccttgccatggcagcaaaatacgacgactaccaccacgagcgctggcacagggtccatcccgccatggcaacagcagcaggcggctgccgcagcttctccaggagcccctcagatgcaaggcaaccccactatggtgcccctgccccccggggtccagccgcctctgccgcccggggcccctccccctccgccgcctccgccacctggttccgccggcatgatgtatgccccaccccctcctcctccgcctcccatggacccttctaactttgtcaccatgatgggcagtgggggtggcgggcatgccgcccttcgggatgcctccagctcccccaccgcctccaccacagaactagacttgttttttttttttaagaaaatatatattatatacatagagagttggtctcgtttaaacacacgccgaacctcaccatatggagccagacattgggatgcacgcatgtgattgtgtgtgcacgcatgtgtgtgtgtgcacgcactgggctgggccaagtgactgtggactcgcttggaaatgggcaggtggtagtgagggcgccagcttgggctctcctggcgccctgtagcatcgagtgtcttctttgtcttctctcctcacccaactccctttgcctctccccaaaccgggccaccaggatccctccccgcgtcagcgatggcccgagccatgagagtgaggactttccgcgcccattggtgacccttccaggcagacagcctcagcagcgcccctggtggacaggatggttcggcaaagcagcctgagttatttttgtggacggaatcggaacacgctggctccatatcgtgaaatttttattaatttttatctttttcctttgttatttccttatcttttcctttcttcagactccgtccaaggagatgctctccccggtcttctgctgcagatagaatcctttaccttgtctccattcctctcttcccaaggaaagaggagcaaatggtttaggcacagactttggcaattaatgtcaggcttgggtttgtgggggtgggtgggtcctgtggtttatctttgccaccttttaaagtgtcttgagaattctgacattgctagaaagggttaatccagccctgggattcacatcttcctgcactcctgccagcagtaaggagacgcccaagccaccataggtctgcctgccagcctggagtctctgatcacctaagctgctgcagataccatttgcttctctccttcctggaaagcttccctttatgttttattttgaccccagatgttcagatgttttgcagtgtctgggacttgtgccccgtgttctttgttctgcttctttgcccccttccctcttcatggagtgattatgttgacaataatgtgtaatgcgcgttcttttcactggtttatctacagaaatttctctgggcctttttttcggtgtttgattcaacactgcgcttaagtggggggatgttccattgaataaaagagcagtgtaggttttccgggtctgtttcttttctttctaaatctccttctcccaccagcagtaccaaagttttgatgagctccagttaagattagtgtctactggctgccacctgacttaaagacctggggcctgggggaggcatcaacactaaaggtcaggccaactaatcctgcttgtcaggcatagagctgctaaaattaaaaccgccaagtggctttttctttctctgctggtggctctcagcctgccagcactgcaggctttagggaggagtgctgggggcgaaacatggtgccttgtgctttaaatgggcacctctgcatagggtcttctgcag

SEQ ID NO: 288 - DNA, 3130 bp, Cricetulus griseus
cctcctccccctcggcacatggtcgcccgccccttcctgcgccgcgctcggctcccgcgctcgcccggccccgccgcgcccgcgatggaataatgcccagcggcccgcccggtcccggtcgttttcggatgtgacggctgagacatgagatcttcagcctcccggctctccagttttttcctcaagagattcactatggaatcggatgccggaccagatctccgtgtccgagttcatcgccgagacccaccgaggactacaactcgcccaccacgtccagtttcaccacgcggctgcacaactgcaggaacaccgtcacgctgctggaggaggctctagaccaagatagaacagccctacagaaagtgaagaaatctgtaaaagcaatatataattctggtcaagatcatgtacaaaatgaagaaaactacatggccttccgcggtgagcagagcacaggggagaacagcctggaggatctgaccaaagccatcattgaggacgtgcaacggctccctgggaatgacgtctgctgtgactgtggctcatcagaacccacgtggctttcaaccaacttgggtatcttgacctgtatagaatgttccggaatccacagggaaatgggtgttcatatttctcgaattcagtctttggaactagacaaattaggaacttccgaactcttgctggccaagaatgtaggaaacaatagttttaatgatattatggaagcaaatttacccagcccttcaccaaagcccacccttcaagtgatatgaccgcacggaaagagtatatcactgcaactgtgggaacctggataagcaaacaatccgtggggaataccgttctgcactactgcagcatgtacggcaagccggagtgcctgaagctgctgcttaggagcaagcctactgtggacattgttaaccagaatggagaaactgccttggatatagcaaagaggctcaaagctacccagtgtgaagacctgctctcccaggccaagtccggaaagttcaacccacacgtccatgtagagtatgaatggaacctgcgtcaagacgagatggacgagagtgatgacgacctggacgacaaaccaagccccatcaaaaaggggcggtcacccagaccccagagcttctgccactcccgggacaagcagcggctctcctatggagccttcaccaaccagatcttcgtctctacgagcacacgactcacccaccgtcacccaccaccgacggcccccccttcgccacccaaggaacgccgggaaaacggtccaacccggcccaccttctacactccctctcagcacgcagaccactagtggcagctccaccctgtccaagaagaggcctcctccccctccacccggacacaagagaaccctgtccgaccctcccagcccactacctcatgggcccccaaacaaaggcgcaattccttggggtaatgacgtgggcctgtcgtcatcgtcaagtaagacggcaaacaagtttgaggggctgtctcagcaatcaagcaccggttctgcaaagacggccctcggcccgagagtgcttcctaaactacctcagaaagtggcactaaggaagacagaaaccagccatcatctctccctcgacaaagccaacaacccacctgaagtttttcagagatcatcacagttggcagagttaccccaaaagccgccgcccggagacctgcccccaaagcccacggaactggcccctaagccccaaataggagacttgccgcctaagcctggagaactgccccccaagccccagctaggtgaccttcctcctaagccccagctttcagacttacctcccaaaccacaggtgaaggacctgccccccaagccacagctgggagacctgctggcaaagtcccaggccagtgaagtctcatccaaggtgcagccaccctcagaggtcacacagaagtcacacgctggggatctctccctcaatgtgcaggccagagatgccatccagaagcaagcatctgaggactccaatgacctcactcccacgctgccggagacgcccgtaccactgccgaggaaaatcaacacggggaagaataaagtgaggcgtgtgaagaccatttatgactgccaggcggacaatgacgatgagctcacgttcgtcgaaggagaggtgatcatcgtgacgggggaagaggaccaggagtggtggatcgggcacatcgaaggacagcccgaaaggaagggtgtgttccccgtgtcctttgttcacatcctgtctgactagcagaaagcagaaccttctgtccgtccacacccttcataccagaccgctgcctccatgtaatcctgtatacaacatgtatatagctgccattacagaccaagaactcattcatggaagggccactcaggaggggaatatagtatgtattgtaaatatcctgtggtcttctgccttcgccagtattagggtagcctcgggacctggtgcgccttaccggtttgccaaagccatccttggcgtccagcacttcatctccctctgtgccgttctgtgagcaaacaaaaaccaggagtgtaggagctgctggtttttccgggtgaagagtctccagcagctgtggaagggtgctggcctgccaagcctgtagttatctgtgtgcacagtttacagctacacaaacctactttggtatttattacaggaaagtgctcagttacatgtgtgttgctcctcctccagcaaacactcactgacacagagtcctcggcagagttttccagtgtgcgcagcctcctgcaagtctagaggagtggatgtgtgcgtctgatggcaagggcccacccctgagatattacctcattatgcaaaaattacatatccttcctgactattttgactaaagcttaaaaaccacgtctgataaagttcagctctgaggaacccaggactgcgagaaaacgtccacctctatgttatgcatgcatctaaacgcttatccgaattctgccttttataaaggagcaaaccgtatgaagaagcgaactgtacatttttaaactcgattgccattaaagcagaagttacaagattgcaaaaaaaaaaaaaaaaaaaaaaaaaaaaaa

SEQ ID NO: 289 - DNA, 3129 bp, Cricetulus griseus
  modified_base (1162)..(1162): a, c, t, g, unknown or other
cggaggcacattgggaatcctgagtatctgaccagacggataccacagaacccaaggtatcaacatatcaagtcacgactggatactggtaacagtatgaccaaatacattgagaagctagaagagattaaaaaattatagatacaaaaagatgaacttttcaagagactaaaagttaccacttttgctcagctggtcattcaagttgcttccctgtcagatcaaaccctggaagtgacagctgaggagatccaaaggctggaagacaatgattctgcaacttcagaagctgatgctgaaattgctgccaagaccaatgggaaagagagccctggggaggcagtcacccagtcctgtccagttcatcaacagcacaggaacaggggactccagccgctccactctccagagcgtcatcagtggcgttggggaactggatgtagacaaagagctagtaaaaaaagaggagcccagtggtaaagacaagccttatccggactgccccttcctgctgctagatgtgcgtgacagagactcttatcagcagtgccacgttgttggggcttacagttacccaattgcaactttgtcgaggacaatgaatccctattcaaacgatattcttgagtataaaaatgctcacggcaagatcatcatcctgtatgatgaggacgagaggctggcaagccaggcagcgactaccatgtgtgaacgcgggttcgaaaacctcttcatgctttctgggggtctgaaagtcttagctcagaaattcccagaaggattggtcactggttccctgccagcctcttgccagcaggccctccctcttggttctgcccggaaacgatccagccccaaaatgccatccctgccagctgagaacaagtggaggtttacaccagaagacttaaaaaagatagaatgttatctggaagcggaccagggcctgacagacaatcacagccgaatgaaccagaataactcctccggaagagacttgaaggtgaaagctggccacaatgggcagaacctgccaacggggggtcctgctggttcactgcaatccccgcacacccaacagtggtcacctgcaaggcaaaccctggaagtgaagaccttgtgtcgttcagtcaaataaatgtcccctccttttggaaccccncactccaacttggtcatttcagaactgttacggagaaaagccagaccaggcccactcctccctgtctgcagttccctcccttcgctcaggaaggattttgacagatgaccacaaaaaccagaggcttgacaggctctagtgccctccctattgtttacaggatattcatgtcttttgaaattgaataggaaaaaagaaaaatacttttcttttaaataaggtccagcctgtttggtctgcaaccagtgttgttttgtaaataattcagtcacatctgctggtgtgttcttcccagacagcctttttcattcactgttgatttcatgaaagatttctccaggtgggcctagcattagctgctgtccccaggggtgcagatgagttttggttcctgcagctcacaggccccacactggctgcaggctctgctgggagtttgaggctgaggggtctatgagcatagttccatcttactggtttagcagagaggctctctgcaaaaatggtcccttgttaaatggtccctgaaaccagaaaggtgtggttagctatactcacactggaaggagggcctagtgcaggaaggtcccagtatactacaggtctgtgctgagagccatggaaggccaccgcagctgtcccctccattgtgagccttatatcaattaaaatttcccgttgtctaatttgagtccagctgtgttagatggctagcaatcccagtcacttgagagcatcagcttcactcaggcagggggaacgcacaggtgaggaggactcccactcctttgtcagggctgacaacccttaagcccttgcttaaaaatacagtattagtctaattgagtaattagtgcaatttcctgcttgcttttcattctcacgactgagctgtgattaggaggctgtgattatagattctggttttggccggaattttgaattggcattaattgaattgctagatgactgacatccattctctttaattgggggaacaaaggacctcaggtaaggatgaggcgaatgaagtctccgggaaggaagagccctgttaattttatggtctgtgatcggagctgtgataagggactaaggaataaattgtgctctttgtcatggcaaccagcttctgaaaagccaactgaaaattgcctatccttaggtgattactgctgccggtaagattcgccttaacagtactattttctcaccaactaaaaaaaaaaaaaaagaaaaaggacccacagtattctagcatgaggactgtgtttgtaaaagaaataaacgtaataaatatctcatggagacatatggaaaaataactcagtcaaaccagctctgtttcaaaatgtgtttattcttctctactgatttccaaagtgcaacattttccgacgttttagaaatcaaacaaaccagggacattgttcagatgtcaagccgtgcccaattttccacaggattcgagaatcttgtataaaattcagccaacgtacacatagctttaatgagaagcctgtcatgtttccccataaatttattgcctgagaacttagttcagccttttgcaaatgccaaaatgcactggtctttttattttctttacagcatagataaaaaaatgcaggatttttccacattcgactttcccctagcacagacaaggttttccaaagctgttagaattgctgtgtgcttgctggcgtgctctagcaggctgaatgtatttccatgtgcttcttcacagcagtttgccctgtctgtcggcaaagatttcagacttccgagagaccaatctgattctgcacccattgttagtctccgacgccgttgcttcttaacgtcccactttaccagtttcctcattagattatttgacatgtattatttaaatgatcagtgatactttgtgcaattatgaatgttgaagattaaagaacgtagttaactaaaaaaaaaaaaaa

SEQ ID NO: 290 - DNA, 3129 bp, Cricetulus griseus
  modified_base (767)..(767): a, c, t, g, unknown or other
ctgtgctgctgtactcttggtactcctacaaagacatggtgggctgggggggcgtggttcatgactatgaactatggcgtgcatgccgtcatgtactcttactatgccttgcgggctgcgggtttccgagtctcccggaagtttgccatgttcatcaccttatcccagatcactcagatgatgatgggctgtgtcattaactacctggtcttcaactggatgcagcatgacaatgaccagtgttactcccactttctgaacatcttctggtcctcactcatgtacctcagctaccttgtgctcttctgccatttcttctttgaggcctacatcggcaaaatgaagaagacaacgaaggctgaatagtgtcagaactgaggaggaagacatagctcagggtcatcacgaaaaatactagacaaatgaaaatggcacaaggaatcacatatggtgcagctaaaacaaaacaaaacatatgtatgtgagcagacacaaaacccgaggcagcttgggaataatgattagtttggcacacacacacacacacacacacacacacacacacacacacacgcatcttttcaacatgaaaccagagctggtagaaaagataaacatggaagagacacagggtttctatctagaacagcaatgctttcgcaaaaatcaagaccttttaaagagaggttagcttgtagccccttgacaaaagatgtcttaattatttttactgcagctgaaattaaaagatagatatttttcccctnactgcacagcctcaggctactgagtttgctacaaccaaacagaggacagtactttgtagttgtaagcgtcacattgacaactggttatttcttgctctttggtgagatatgaagcatttgttcggttgccccaggctttaggacagaagagtaaatgcagaattgaaaggatacaagctcaaccagttgacttgaaaatggaatcttgtactatctgtaatgaaactcagccaatcagcactgagctggaaaaggggaaggaccatggaaagagacgagctgaagattgatccaggagacagacaacacattctcctcccctccttgtttgacttcacgcatacttctggctttccaaatgaggcccatgacacagtcccatgctttctatatttctgtgactttcagaaacagatctgtggggctctgcctgatttggggtaaacactgtgtttctgcatccttctgcatttgttccctaagcagtgcagaggtgtgtgaagtgccctctgctggccgagtgaagaacttcaacaaacacttcataataggttgaatataatagttgagcacaaagggcctgtgtaggttaatccctaagttttaagtgctgtcaaacacctgacatacatttgaccaaatcagaaaagaacctatctacttcaagtaaacttcatcaatttttaaagtgactttcacttgggaactcggaaagtcaatgtattaagagccatatttaaaaagaaagagaaaagaaagaaagaaagaaagagaaaagaaagagaaagctagacaatgttatctgtaatatttcagtcctctacaagccaaataaatgtgtcgatgttcctaatatttcaaagatgcaattatgtaaagttgttcaatgtgatataatagtattctaattggttaagtagcttaatgattaggcaaactagatgaaacattagaggctactacactgcgtagattttacactcataaccacgtgaggtacacagagctgcaaagcccaaatgaatagtaacacaatttttggctagcagaaactttcacttagcttcctttacttgagactgtacagtaaaagggatttttttcaaattatttttatattattttagctttaattgtgctgtcattcatgaaacagctgcgtagcctttctctgtgagatggcatgggtgttttcatcagcttgttgatgtgtggaattagaaaagaataaaatttcattccattctgtgtgaatgggttaaacagtgaacaaagaatccgcgtaggtcaagtcgtgactggaaggtatagagccacctcgtcaagtggagtcttgggatgtaattgtttgtgctttgtcagtgcacagtagtgtacagtaataagcctttcccttgccttatagaacaaagtgagcaaaatagtgaaaatgaagaagaggccacctgtcggctgacttgaatctaatcagggccagcctgaggctcatctggttgattcagtttaattcagatatttatcatagaatacaggttacaatatggaaacaagacataaactttaaaaagaactaagactatgcttccaaagacactttaaaaaacaacagatttatgatataggctcagcacactgtttttaacaaaccagcttagctgctttaagtcttatcaagatacgaggctggaccactggcctatgacacatctgaaacctgccagagaatcgactgccacgtagataatattgctgtcagttaacattccgggcaagccagttttttagctgccccactatgctgcaatagattatctttctattgaagatttctcactgcgttccagtcccagtgtggttaaaaacattattcctggtttaaatgcaaacaaatcttggtttcatataaatgtggtttccttcactaggtctgagcatcaactcaaatgtgtgagtttgcaatgaaattctagtgagaaacatttcattcacagtaggagatttaatctggaccttgtagcgtcgcctatgatgagaaagaacaactataactattatttattgatcgtatttatatctgatgctgggcccaaagtattgaattaagcacccatttcctggtgcctgaggtccctgccatcagaaagtgatttgggtgagaattcacaatatatgctctgtcacttgtgcgcattaaagtgacacctaataaaacaaggatgtcctgcttttgttcagacactcgatatgaatgaatgaagctgtgcatcctagttggtcattgagccaacatcctcggtacctgatagtgacacaaaatagatgttggtgcctaaaacggaattctcagtgcctgttgagacag

SEQ ID NO: 291 - DNA, 3128 bp, Cricetulus griseus
gtggccgccccactgcaccccagatttctgtgtacagtggtattcctgaccggcagactgtgcaggtgatccagcaggccctgcacaggcagcccagcacagccgcacaatacctgcagcagatgcacgccgcacagcaacagcacctcatgttgcagacggcggccttgcagcagcaacaccacctcagcagtgcgcagctccagagcctggcagcagtgcagcaggcaagcctggtggccaacagacaaggaagtacttccggcagcagtgtgtcctcacaggctcccacccaatctccttcactcaatctggcagcagcccctgcaacagcccagctcatcaaccgagcgcagagtgtcaattcagccacagcctcgggcctcacccagcaggctgtgctcttgggcaacacgacagcagcctcagccaccacggcctgcaccccaagtccagtcccaaccccagcttgccccagtctccccaagcctggccctacagtccagcccagaagataatgccatgcctctaggtccagttacacctgccctgccactccagtgccctactgcccatctgcataagccaggaagtagtcagcaatgccaccttcctacaccagacactgggtctcaaaatggacatcctgagggtatgtctcataacccctcagcgaaggttccagcacacctcagctgtgatcttacagttgcagcctgcttctccagtgtcccagcagtgtgctcctgatgactggaaggaagtggtgccgaggggagaagggtgtgcctgtgactcggccaggcccaccctacaccagcaagccatcatcactgccatgcctggtggcctgcctgtacccaagacgtcccaacgagacagggcagggcattgttcatgcactgaccgacctcagcacccccggcatgacctcagggaacggaaactctgcctccagcatcgccggcactgccccccagaatggtgagaataaaccaccacaggccattgtgaaaccccaaatcctgacgcatgttatcgaagggtttgtgatccaggagggggcggagcctttcccggtgggacgctcgtccctgctggtggggaatctcaagaagaagtatgcacaggggttcttgcctgagaagcttccccagcaggatcataccaccaccactgactcagagatggaggagccctatctgcaagaatccaaagaggagggcacccccctcaaactcaagtgtgagctctgtggacgggtggattttgcctacaagttcaagcgttctaagcgcttctgttccatggcttgtgcaaaaaggtataatgtgggatgcaccaaacgagtgggactctttcactctgaccggagcaagctgcagaaggcagggaccacaacccacaaccgccgccgggccagcaaggctagtctgcccacacttaccaaggacaccaagaagcagccctcaggcactgtacccctttcagttactgctgccttgcagctgacacacagccaggaagactccagccggtgctcagataactcaagctatgaggaacccttgtcacctatctcagccagctcatccacctcccgacggcgacaaggccagagggacctggagctccctgacatgcacatgcgggacttggtgggcatgggacaccacttcctaccaagtgagcccacaaagtggaatgtagaagatgtctatgaattcatccgctctctgccaggttgccaggagattgcagaggagttccgtgcccaggagattgatggacaagccctgctgctgctcaaggaggaccacctgatgagtgccatgaacatcaagctggggcctgccctgaagatctacgcacgcatcagcatgctcaaagactcctagagtctctgctgcccactgccccatcggcagccagggttccagccccaggtgggcgccgcctcctgatggagcagagccacacagacattcctgaggagcccgggacagggccagttggagggaaggggctctccctaggggtgcagctgtgaggaggtctccgtgcctcttcagtggctctcaggggccatttctgtgggagggaagagaggtaggtggcacagaagatggggctttgcgcttgtaaatactgacagcactggcttcctccaaagtcccaatgttctagcctccccctctaatcctttctctgtcccccattttccagggggtttatggtcagggctccccaacttgagttgggttacttccaagggcagccagcaggcctggacagaggtcttgaaagcccttgccttctcccccatacccccttctttctccaggcctggctaaccttccgttgtcagcttctcccccttcagcctgtttccacagcatccagggttctacccctgtaccttttgcaggtggagagagagaagctgggcccagtttggccgtgcctgcaggcacagacgccttaacgctgtgtgtatgactgtgtgactgggagcctggactgacaggccgtgagttgccctctggcatctccaggtgttttgtagcaaacagccacttagtgctttgtcctggactccactcagcctgaggctggggaatagaaagaaagggcagaccccgagagttggagattagaggttccctccagatggcaggaggtttctgggaaggtctcctcacaccaaactggcagtgtgtcctgctggctggcagacaacacaaggaagctccaggggctagactatgtgacccaaagcccaagcctcccatgacttacctgcccgcccatccttacacacacacaccctcatgggaggaagtgtgcgactgcagactggctggaggcactgtggaagcagcctttggccttccactcccacacttgcctgtaaaacttgtatagcaattacagctacctaaggaagggcaggccgcctctgacttgtcctgtccttaccaactctgggaagtcagactcttcccgggaggggtaagcaccttttcagcttactctgcccccttccccacccccacccccaggcagggttggaaatgaaggacttttttaaccttttgttttgtttttaaaaaataaatctgtaaaat

SEQ ID NO: 292 - DNA, 3128 bp, Cricetulus griseus
  modified_base (223)..(223): a, c, t, g, unknown or other
acaaaatccagcaggactcaggctgcaaagttcagatctcaccagatagtggaggcctccctgagcgcagtgtgtccctgaccggagcccccgagtctgtccaaaaggcgaagatgatgctggatgacattgtgtcacggggccgtgggggacccccaggacagttccatgataatgccaatggtggtcagaatggcacggtgcaggagatcatgatccccgntggcaaggcgacatccttcgagaacgtgaccagggtggctttggggaccgcaatgagtatggatctcgagttggtggaggcattgatgtgcctgtaccccggcattcagtaggtgtggtcattggccgtagtggagagatgatcaagaagatccagaatgacgctggtgtgcgcatccagttcaaacaagatgacgggacaggccctgagaagattgctcacatcatggggcccccagatcggtgtgagcacgcagcccggatcatcaatgacctcctccagagccttcggagtggacccccgggtcctcccaggagcccctggcatgcctcctgggggcagggggccgggccgaggccaagggaactggggccctcctggaggggagatgaccttctccattcctacccacaagtgtggattggtcattggcagaggtggtgagaacgtgaaggctattaatcagcagacgggcgcctttgtggagatatctcggcagagggtcctctctgcccagttggaccaggccctggaggaccaggccctgctggacccatggggcccttcaaccctggacccttcaaccaggggcctccaggagcaccccacatgccggtggtccccctcctcaccagtacccgcctcagggctggggcaatacctacccccagtggcaacctcctgcccctcacgacccaaacaaagctgccgcagcagctgcagaccccaatgctgcctgggccgcctactactcccattactaccagcaacccccaggtcctgtgccaggccctgccccagctcccgcagctccacctgcgcagggggagcccccccaacctccacccactggccagtcagactacaccaaggcctgggaagagtattacaagaaaataggccagcagccccagcagcctggagcacccccacagcaggactacaccaaggcctgggaggaatactacaagaagcaagcgcaagtggccactggtggcggtcctggagcaccacctggctcccagccagactacagtgctgcctgggctgagtattacagacagcaggccgcttactacggacagaccccaggccctggtggcccccagccacctcccacccagcagggacagcagcaggcaagtgggaactgccaccctcctcctcctcctttctccttccaacccccggccaccgtccatcctgccttagtgggtagcgccggaaaccctttcccctgcggggtgtgcccttgatgcaagccagcctcgggcgcgtggccagagtctcccggagcccgcagccccaccgctgggaagcgcccgctgggtgcagaggctcacggaagaggctcctccggcagccgctgttggtgcaacgttgtcgggtgctgggggcaccggccgaaaaggtggaactctgaactgctggggtgtcccgggtgggggcaggaagtggggactgcgctgggcgccatgccagttgctgaacccgctcgctcaaaatctggccacttgggaagaaaatgtgtatttttttcccccttctcagcatcactatttgggttttattctttttattgttttatttttcatgtccaagtaactgcgtgttgcaggcggccctggctctgctgggatggaggggagcccactgaggggactgggccctccctgcctggcgaggccaccttttgtgtgcacttgcctctgtgtcccggtcttgtctgtgaagtgggcatgacgatcgttgccaccttccaacctacctcacaggggtgttgtggggacaccatgatctgaatgttgtgacgccgagccgccgcctccctcctctgtccccttccccaccctggcacttctcccttgtgcgccccttccatgcctctggcttcttctgctgcagacccctcctcctcttccttctgcttctcctccaccaaggagcagtctgacttctgtggagtccccaagacagacagtcacagccccctgcctggcttgtacaggcttgggccccggcctcctggcctgctgcctggagtcgcagcctcttgcagcccagccgccctcctgccatgaccattcctgtctctccctctccgcaggcaattgaagcaaatggatatgaacttcatctgtgaaaatatttttttccctccatttttgttccatttgggggcttttattggtttctatatttgattggtttggtgagagagcaacggccgcccggggtgcagggtccccctcatgctgaggcgttccctctctcattctgtgtgtctcacatctttttccttccaaaatcgggatccttcatgttgagccagccttagaaaatagcgagaatttaacctctgcccaaaaaagtttaaaaattaaatcacaaagagcagaacaaaacctattaaatgatatatatatagaaatatataaatctctatcccccagcctccgagcctacccctctgagggaagcggttcactttctccctactgcccggggccctattcttgtttttaaataaactttttaaaaggaaagaaagtcactcttgctatcttctttttttcgtttttttttcctttttccttttttctttttcttttttttttttttttttagttagagttggaacattccttggaccaggtgtgggtgtcgcaggcccctcctgccctgcccatctatctgtctctccccctctccccactctcccctgctctttcctggctccaccctatacccaccccaacccccaggactggcctggtacgttgtcatctgttgaagatgagataaactgagaaaaaatgagaacaaaacaaaaaaattgtatggcagtttttactttttatcgctcgtttttaacttcacaaataaatggtaacaaaaacctcaa

SEQ ID NO: 293 - DNA, 3127 bp, Cricetulus griseus
attccccggggatgcttttctgcagaagaaaacaagaaaactcatgaattaatagagacagaagcaatagaagatagagaaaaagaggacatcgaaagtcaggaaattgaagctcaagaaggtgaagatgacacctttctaacagcccaagatggtgaggaagaagaaaatgagaaagatatagcaggttctggtgatggcacacaagaagtatctaaacctcttccttcagaagggagcctagctgaggctgatcacacagctcatgaagagatggaagctaatgcgacgtgaaaattacagattctgaagcaagtaagccaaaagatgggcaggacgccattgcacagagcccggagaaggaaaccaaggattatgagatgaatccgaaccataaagatggtaagaaggaagactccgtgaagggtgatcctgtcgagaaggaagccagagaaagttctaagaaagcagaatctggagacaaagaaaaggatactttgaagaaagggccctcgtctacaggggcctctggtcaagcaaagagctcttcaaaagaatctaaagacagcaagacatcatctaaagatgacaaaggctgcacaggcagtgctggtggtagcagtggaagctcaaccaagaatatctgggtcagtggactgtcttctaataccaaagctgctgatttgaagaacctgtttggcaaatatggaaaggttttaagtgcaaaggtagttacaaatgctcgaagtcctggggcaaaatgctatggcattgtaactatgtcttcaagcacagaagtgtccagatgtattgcacatctccatcgcacagagctgcatggacaactgatttctgtggagaaagtcaaaggcgacccttctaagaaagaaatgaagaaagaaaatgatgaaaagagtagttcaagaagtgctggtgataaaaagaatacaagtgataggagtgccaagacacaagcatctatcaaaaaagaagagaaaaggtcatctgagaaactggaaaaaaaaaaaagcaaagatactaagaaactagagaaagatgagaagaacgataatggttcaagtggccagacgtcagaatcgatgaaaaagagtgaagacaagaaacggataagttcaaagagtccaggacatatggtaatactaaaccaaaccaagggagatcattgtaggccatcaagaaggggcagatatgagaaagttcatggaagaagcaaagaaaaggagagggctagcatagataaaaaaagagacaaagactacagaaggaaagagatcttgcctttcgaaaagatgaaggaacaaagattgagagaacatttagttcgttttgaaagactgagacgagcagtggaactcagaagacgaagagagattgcagaaagagagcgtcgagagcgtgaacgcattagaataattcgtgaacgggaagaacgggaacgcttacagagagagagagagcgcctagaaattgaaaggcaaaaactagagagagagagaatggaacgcgaacgcttggaaagggaacgcattcgtattgaacaggaacggtgtaaggaagctgaacggattgctcgagagagagaggaactcagaaggcaacagcagcagcttcgttatgaacaagaaaaaaggaattctttgaaacgcccgcgtgatgtagatcataggcgagatgatccttactggagtgagaataaaaagctgtctctagatgcagatgcacgatttggccatggatctgactatcgccaacagagcaggttccttgacttcagtcatcgagaacggggcaggtttcctgacactgcttctgtgcagtcctcgtcctttgaaagacgggagcggtttgttggtcaaagtgaagggaaaaaaccgaggccagcagcccgaagagaggagccaagctttgaaaggtaccccaaaaacttcagtgattccagaagaaatgagcctccgcctccaagaaatgaacttagagaaacagacagacgagaggtacgaggggagagagacgagagaagaacagtaatacttcatgacagagctgaggtcgctcaccctcgacaccctcgagaagctggccctaatccctctagaccaacctcgtggaaaagtgaagggagcatgtccacagacaaacgggagtctagagttgaaaggccagagcgatctgggagagaagtctcgggacacagtgtgaggggagcaccccctgggaatcgaagtagtgcctcaggctatggaagccgagagggagacagaggagtcatttctgacagaggaagcggagcacagcactaccccgaagaacgacatgtagtggaacgtcatggacgggatacaagtggaccaaggaaagagtggcatggcccaccctctcaggggcctggctaccatgacacgaggcgaattggtgatggccggtcaggagcaggcatgataacccaacattcaagcactgcatctccagttaataggattgtacagatgagtggcaactccatgccaagaggaagcagctctgggtttaagccgtttaagagtggacctccacggcggttttgaacacaagcgtcctgccgtgacttcaagataatttattgagatctcctgtaaactttacttgactactcatgaggaggacctctgactgcttgagagctctatctgactgttggttttcttttttaaaaatttaacatgattgcttttctcaattttagagaagatgtttaaatagttctgttgaaacttttcatagttttgtgtgtcattcaacttttttcttgcagcaccgagacccatttgaaaggattggcaccgaggcggttttgtttggctctgtgtgaacaggaatggtttgcagctgagtggtagtggtttcatttgcagcatagctctgtggtgtcaccagtgtttgctgcctccattttgaaggctatttgagcttcagactcctgctgtctaatttttagataataagattgttccttgcttttcggagtattatgtaacctatttttgcagaaggtactgttacattaagtgcatctgtgtatcctggttaaaaatgtaatctttttggaaataaaccttcatattctgta

SEQ ID NO: 294 - DNA, 3124 bp, Cricetulus griseus
  modified_base (299)..(299): a, c, t, g, unknown or other
agatcccaaggaagagaaagaagatgattctgtcctccctcaggaagtttccatttctgcaactagacctagccgcggctggcgcagtagtagcaggacatctatctctcgccttcgagacactgagaatactcggagctctaggtccaagactggttcgttgcaactcgtctgcaagtcagaaccaattacagatcagcttgattatgacgttccagaagaacatcagtctccggtggcattagtagtgatgaggaagaggaggaggaagaagagatagttaatcagtgaagaggaanacatacaagatagacccaagagatgagcagaaacaacttctgcgacatgccaaacatcatacagatcagagggattatatctgtgaatattgtgctcgggccctcaagagttcccacaatctggcagtacacaggatgattcacacgggcgagaagccattacaatgtgagatctgcggatttacttgtcgacaaaaggcatcccttaattggcacatgaagaaacatgatgcagactccttctaccaattttcttgcaatatctgtggcaaaaaatttgagaagaaggacagtgtagtagcacacaaagcaaagagccaccctgaggtgctgattgcagaagctctggcagccaatgcaggcgccctcatcaccagcacagatatcttgggcactaacccagagcccctgacacaacctgcagatgctcaggggcttcctcttcttcctgagcccttgggaaattcaacatctggagagtgtctactgctagaagctgaagggatgtcgaagtcatactgcagtgggacagaacgggtgagccttatggctgacgggaagaatctttgtgggaagcggcagcagtgggggcacgtgaagggctggtcatgaactcggatatactcggtgctaccacagaggttctgattgaagattcagactctactggaccttagtgcaaaggaagactttgggcactgggacagtgcagactttgatttaaaagataaaaaggaacaaaaaaaacagcacctcagtccccctcccaaacctccatatggctcttaatggtgctcacttgcttggaagcaggctcccaagagaggggactgccctatgaacagtctttttggctgtaaaatggggctctatgtcagtgagaaaagtcccaggctaatggcagaaatttgcactttgaacatgtgtgtttttgtgttttggaacctgagattccttatttattaatggaaagtctgattttttgggggaggtctttgttgctatgttttgtggggctgggagagtagattattctgacatgggatccttcctacaagaggtactttgaaggcaaggcttagagttaaagaagcacagccagcctctaaaatcatagttttccagtggcctttaaagaaagctggtcctcagcactaacagaatagacaaaagcaaaggtgaaaatctgtgtgataatgtctttggctttccccaaattatctaatttccttgggagtagggattttaatgcattgtgaattgtttatttctgtcattgggagacacagatcgtgtttttatatgcttttacctctcagaagactaaaaccctaattcagctcattttttttgagaattagaagtgcagctcctccctatgtgcttcagaatctgccattgaagacctggccagttgttgtcagaaatacatgatgactgttgggaaaaataagagtctgactgagaacaaaataaggaacagcttgtttttcacaaacactaaaactatggagtttatcaaattttctctgcttaattttttctacccccaaaaaaaaatgtcatctctgaaagacgcttactgtacacccaccagtgtcactggttgggatgccaggaggagggaggaagacacctacaggaacaatcttaaacacattattgtttcctctagtgttgcagactttgccatccctcccatggtgaggggagagaaggcataaagacaggctttcctgccccactgtttgcagtttactttggtacattggtacacagatttgaaaatactgtaagagtaattataaatgggactgcaacaaagttgctctatgtgatactgtttctgtaactaatgtttgtgtcctacacttaccctttgtttttcacatttagactgtctccataaattatacagccacccacagaaaagcaaactgcattgtaaacatctcttctttctggaatggggaaaaatatgttcttttctgtacctcactcccctccccatgaaagcaactagatataataattagaaacttcctggcctctcatttgggggagcatgtgtaagggagctgggtcatcttcatagctaccattgatgacaataaattattgtagcagtttgcaataaatttttcatgaactttacattttttcttgggagaacaagtgctagcatagtaaaagtatatgagtaaactaagcaccattcccatttctttcctttcttcccatgccactcatttaattgtcctttaaggagtccttttaatcttaaaagttggtagatatttcatgctcttactatcttttaaataactagtcatccctccaatatcaattggcaatcctaaattttatggatatagttgtgataattattcggtatttctgggagttatgcatactccttgcttgggttgctggtgtattttgcataaccgtaacacatttcacagggtttagtcagacactggctgggagtcctggggatgagcacggaatacattgtcatagagcacttggacctccctcacacctgtttggaggaagaatgtgaactctgccaccaacctaagtgaggtcttatagcctcgcagcagaccagttttgctcctgtctttcttccaattttccatatacacaagaaaatcagaatattgtaatggggcagttatatttcctgaaatctcttttgcctgttgaaatgtgcaggacccttttcctgtgatgagagataggtggttacttgatctaggtttaaaagttatgtaaaaaaaaaaaagttataataaaagggatactttgaacttttaaaa

SEQ ID NO: 295 - DNA, 3123 bp, Cricetulus griseus
tgcagttcttcatcaaaatcaggcactagtaagattgctcctgaatttatttgtatatgtttgatctcattttttcctatgtattcaaaatgattttaccttacaaacagtccctttaaaattcaaggtattaagtagaatattgcctgtagaggaagagaaaggaagataaaaggtgagattcctctgtggctaaaaactcaggtttccaaccttgaaactattctctaaaactactatcttcccaacagcatatcttcaaaactaacaggatgacatttggatatttcgttatggtccttagacattttctctatttctacttggttagttgaaggtactatgaccagagaatcagctgctcttgcatgaatagcatgattccagtaagttagagaaagcctgttagaaaatcatggtagtttatagagatgtatcattaggatatagtagcatttagttacaggattaagtgttaacctctacttcttttcccttctgtacatgtccatcttgcttgtgcccaggaatagtaactcctctccaaaactagctgcttgtttcatggtattttaacacctattgaaaaatttcctttaacttcctatcttctttaggtaaaggcaattgacttagtttatatttcagaaccatgaagctttcttctggaaggtgaattttcactgtctgctttttgcctaagtatttgtagtccctcaagggaaagaggtaccaagacctttgagtcttgagcatcatctttgagcatcagtagctgaagaacagttaacatgtttgaatgtgtttgttcatagtgtatgtctgtatgtgtatagaatgtttgtgcgtacttactagaatatctaatatacattgaatggtaccttgctgaagagtttctggcatggagaataatctgggaatacccttaacatcagcactgccactgttcctattacaggactcatagtgttgcctctagaacttatggtcatacttatagataatcagatgacaaaggcacgtttgaagctgtagactatggtgtcagcgtcatttgtcttgaaaattaactgtaacattcttctgtgagttagaatcccagcctgccctaatgtaatgctgtccaccttccagggataggcttaaaatgtaccttcctgaggcctgggactcttagagtctggtccatggccaacccaatttccccactgtattgagtcataagaaatggaaggtggttctttggacagctacttaagcctgttgcccagtgcacggtacagggagctctcctccccctcctctccatggtacttcgttctaccccacctatgcctactttcacccctacctcagtaccctggagccttggagttcctctccatatgataaaatattatctaccttacattaatacccttaatattaaagtgatttttaagtgtagaaaatcttgtcatcaaacgactttgatgatagtcttgttgcaaactgaccagcagaaatctccccactcacttttgacatctgctatcatcatgccatccagaggactttctcaatccacataaaaaaaatctggaggcattgcagaggtactttgtcattgcgtatcctttcagactccctttccatccttcacacttaaccggactgacatcaatgtcattctcactctgcatctgtggagtgggcatcttcaaacatctcattgcatgtggaaagaatgtcaataaatacttgaatctgcatggcagtttgctggttgtatgcaagagcaaggagaaagcactggtggatgaagagaactttggagtttcacttagtgttttccccagcagtctacataagcctttggacacacctacaagtcccaggcacaaggctccatgaaggatcacacagcaggtctgaggcactgctctgagcccttacctcgggcagtggagagcagggtgatcttcctactctggagtttctccttggccttctactccaccagggcttctgctcagcagcaaagaccctcagtttgaagctaagattgcattttgtcttttcaagaaacaaatgggcatgttgagttctgtcagtgtcagatggtatctttgcctttgctcccagatttccagaaatggatactgtttcatttctgtgggaagggtcaaggaacataaaattgctcaacagtgctctgttcacatgagggctgttgagcaaaggccaatatgcctccctgcgttctcttctacctcaaggttttggaattcacttctggaacagaaatttatacaattgaagagccatgttgtcagccttgtttactgtgggatacacacaggatggcagtttgtatctttgaagatacaaaagaagctgggattttgcagcctattaactggtttctatttactgtggctccaactgattggcaatgcataacattcctttaccttcaaagttttctccaccagtcatttctgtcaccacagtcccggtgtcatatgcccctgcaaattgcaaaagtaagtagtgacaaaatagtagcctccccttttcagtggccaaactgtcagctttagtagacctggaaaagctagtggtaccacaccatgtactgaaaacctgttccttatcacacaccagattcaagaaatgccacttccaaattgtggcattcatggtggtagtcttttgaatggaacagtaattaatgtggatattgttagtgtttaaagaatattttgaaaattaagtttacattttacaattgctttatttttattgaaataattgtatataaatattaccctatttcactgttattaaagtaaagctaaaccttgtagacagtgggtcaactgtatggaagctgtgacgtatacagtacatttctctattgtgtaaatggccatgaataggactgtccctgtgtttttataagttgagggtattttgttgttttataacaacaaaatttattgcatttgaaatggtttttatgtaatagaaatcatgcaaacaatgaaggattataatatggtatatgtaaatgtacaaacttttaagaaagaaataaataacaacaaatttacaaaaataaaaaaaaaaaaaaaaaaa

SEQ ID NO: 296 - DNA, 3122 bp, Cricetulus griseus
gagctgcggccacggtgtcctgcggcgtggagctccggagaaaggtgggctatcatggacctgcggcagtttcttctgtgcctgtctctgtgtacagcctttgctttgagcaagcctactgaaaaaaggaccgagtacaccatgagcctcagctcagcgacaaagttcacaatgatgctcagaattttgactatgaccatgatgccttcttgggtgcagaagaagcaaagacttttgatcagctaacaccagaagagagcaaggaaaggcttggaatgattgtagataaaatagacgccgataaagatgggtttgtcacggaggaggaactcaaagcctggattaagtttgcacaaaagcgctggattcacgaggacgtagaacgtcagtggaaggggcacgacctcaatgaggatggcctcgtttcctgggaggaatataaaaatgccacctacggctacgctttagatgatccagaccctgatgatggattcaattataaacagatgatggttagagatgagcggaggtttaaaatggcagacaaggatggagacctaattgccacaaaggaggaatttaccgctttcctgcaccctgaggagtatgactacatgaaagacatagtcgtgcaggaaacaatggaggatatagacaaaaatgctgatggtttcattgatctagaagagtatattggtgacatgtacagccatgatggaaatgctgatgagccagaatgggtgaagacagagcgagaacagtttgttgagtttcgagataagaaccgggatgggaaaatggacaaggaggagaccaaagactggatcctcccttcagactatgaccatgcagaggcagaagccaggcatctagtctatgagtcagaccaaaacaaggatggcaagcttaccaaggaggagattgtcgacaagtatgatttatttgtgggcagccaggccacagattttggggaggccttagtgcgacatgatgagttctaagctgcagacagaggaacctacatttcttcaaaagtaatttatttttacagctctggtttcacatgaaattgtttgcgctactgagactgttattacaaactttctaagacatgaaaaggcatattgagataatgaaaaccatcctgtccccattcctcctcccctctgagggactggaagggacccgtgcttatgaggaacaactctgatcagtacactgtgtttgtaggtttacactttgtatgatgtatagcatggtgtgtttatttttgtattgttctctagttgggagtataacgtgaaggatcaagaccctcagcccacacttgtaggcaaacattagccctttactctttctcaaccctttactatattttttaatagttctcacttaactaattttttttaaagcctgagatcaatagaaatgttcaggagagaaaaaagaaaggaaaaacatgtactccataatttatgtttagagagagaatgctttatctttcctgttgaaaagctctattttacaagtggcctttcagttgtcacagacccagccactgagcctgccattttctgggcaaggctagatcccggtgctgtaagacagctcgacacaacttgacttccttctttttcctcctttaggactagctgtttgctaactttgtcaagcccagctgtggtgggaagaattaggaatcaagtagtatgtatgatctcgtcacagtgctatttctagctctttatagacctgtttccaactagaaacagctggaaaacgaaaggaaaaaagtgtgtggggcatgcttctattctgattgtatacctattgaaattactgtgaggcccctccagccccttcctaggaattaattttggttttacagcaaaaattgacttttttccaatcatgtcattgaaagtgcctttaacaggaaaaataattactgaatgggaatttgcttaagaagccacaggatgaatgctttgggccccttacatgatgcagtggggagtttttcccttctttttctcttgtggacaatagctaaatagcagtattagttacaagcttggttgcagtgttcctatcttgggggctggtttataaagacctcatgctgctgattggaccagggatcctcatacctcagaatgcaaaccactctctgtcaggcctcttgcttaccagagcttgagctctgacttaaggatggatgggcacacagagggggctctttggtttgaggacctcatctgcctttctctctgacactaaaaggtggggttggtaggaaggtcatgaatcaccaggttgccgtccttagcaaaaaccccatctgttgccaactatttacccatattttgtgcaacctagtatgggtctcttactatgggcctcttaagaattattgtattccaaatctttaaccctcaggttactaagataaatatatgtatgtataatctttattatttcctatatctgaataacacattcaggtggtgctgggggatggtcatatctgaacctggacctaccctttggtcttccacaaccctgttgaggtgggctgcttggtgtggttgtggtgtaacttcacccaagccattgcatcaagctcttgatatcaaacacactcgaagttttaaccccaggataggagtaatgaacattctctgccttccagaccctcaactctttcttgttaaggagaccagagataattaatgccaccagccctggcttagaagggtgtgccatcctgtgtgacaagagagccttagagcagagcctaacactgacgtgaatgtcacacacttaaccagcaagcttagctgctaccatggcatattctggacatggggtgctcagcagcaagaattgttctcatctccatgccccccacatagtgttggggtttgggtttgggtttctggtttaaatcaagtctgaggcagtgggcagtggctgcatgtccatagggtgtgctctgtgaatgctaagctctcttgaatttgagtattggttctttttatagagtgtaaaccaagttttatattctgtaatgcaaacaggtacccatctgtttctgaataaaactgtttacattcatacaa

SEQ ID NO: 297 - DNA, 3118 bp, Cricetulus griseus
gcctgggagccacgtgatctaaagggatgatggcgggcgcagcagaagacgtgcgaacgctcttcggagctgctatccgcgcggctctggaggcttggcctgcattacagatcgctgtggagaatggcttcgggggcgtacacacccaggagaaggccgaatggctggggggtgcagtggaggattacttcatcgccaatgttgacttggcgctggaagagatagaagatttccttggagagctgatgaccactgagtttgatacagttgtggaagatgggagcctgccccaggtgagtcaggagctgcagaccatgttccaacacttccagaagggtgatggggctgctctgcaggagatgacttctaacatcaaccaaaaaaagtgcaaggtcacggctaccccacttaagacagccaaagaaactggggtggatgaagaagatgtggacagcgtggaagaaatggaggtgacagctacaaacgatgggaccacaacagatgtggtctgcccccagcctcaaccttctgatccagacccccagactattaaggaagaggatatagtagaagatggttggaccattgtccggagaaagaaatgaatagggcagtaaatggtttgggcacttgtctgttaagtgttatgaaagagttataggggctgttttggaaggctatacacctgtcctgataaccatattcctaccttgttctgataaccatattcttactagggaagaaaagccctaggatccttggttgtgttgatgggacctatttcagccccttgaaccctaaggtaccatatgagagagaagaccaggtttcccagcacagtgcctcctagctgcagtgaatgtgaagtgggtgatgactgtggctgcggttggagtagaatccagacttgtggacagcaggcaggcacatttgtggaaaggatgggaattccacagtgggaggctggctgcattgggaatagtaagataaacatgcagttggatgacagagtagatgtaagtgtggtacctccccagtgtccccaaccccagactcccacggagcaactcttattgcccagaacttgtatccttctgtgaatgctcccaccctgatacttttgagtgtttgaaggactcgactaagtggtgaacttgagaaagtagggctgttttaagtccagggatgaggcttaagaccttaataacataacaccttcttgtttaatccatgacttaaccttggaatcagccttctgagagctgagcttcagatttcagtgaaagagtagtttctgcacccatagctccccccccccaagtagcctgggactttggacaaacggacggaccatagcagtgctctgaaagttactgtaagcctgaaataaactgtatttttctttaaaaaacagtatccattgtcctcccccctcccattcccgtcctgcccagtggccctgccatgggtgtggacgataaaatactggattgctttggggctgggtagaagctataagccatgggaaaggcaagaagggtctagtcaccaccccatgtaaagtcatacatgtgaagacactggctgaggaggcaaggatgggttggggtttcagggtcagtaacagagctggcacttggtctcctgcctctggtgtttttgtggggaactgggtggaagtaggatctgtggggtattgggaggaaatagcctaattcaagtgagtctagcaattagctcctgccctccctggggacaaggatttaaaaaattaacatcaatgtaggaatagtgtagtttttaaaaagcccacattttgtgaaaagatgaattaaaaaacccaagacccagcattcgggattgaaagtgcccgtggtgggaattcaagtattgactgcattgggagtgggctagggcccccaattgaacatgggcagatggagtgtggggcaggagtttccagttccccccaaaccctctaggtcttgtctcgggtctgggaggcttcaggaggttcggcagtggctcctgcggctgccactggtgtctcctccatctccctgtcctcagacagtgtgggccctgggcagaacgtgtccccacggcccgccctgccaagcacagccatccagcgccgctggagttcttctgtctctgggctgaagtaccagcttaggtggctctgggtgatcttgaagacatgcctcctgtcaggccgctcccctgcctcaggaggccccacctcaaagccgatgaggggcaggctgcgctgggctttcacatcctggggaggagtgacagagctagtgtcaattagggggctggactgtgccctctgcccagtctaataactttgttcattgtttcctctgctgaagacccttgccttcactgtaatgaacaggaaaagtctaaactaggactagaaggcaggctggcttacctgtcacataaggatgggggttttgatttttccctttgctaggctcaccctgcccccaaaggacacggcatacaggggaggggcagcctggtttcgtcagctggttgaaaaaacatgaaggagtgggatgcacacctgaggggctccatagatgtacagcaccaagggttcattctcaggaacccacaaaccatgccttgtgccatcctttcccacccttctccatgtagtgcaggaagctgcagatgacgctgttctcagcagccactgaggcctgtttctgtgatcagagacacagggtacatcaatgttgacagaagactttgctcctggtttaaacagccccatagtgtatggactatctctcagacagaggtagcaaagccactctaacagtctaagtgacattcacagctaacctttttcatctttcattatatacgcattgcctgctctgagaaagtccttctaacactgatgaaagggatgagtgggtggttaacaccatctgtcccagaatcctaacaatagaggaaaatgcaggacttgtgagaagagcacagactgtttctgatatttcaattagcagaagcaaggcaatttaaagtcctggtgtagagtaagctcccttacatttgggatacttcgattcatttaaaaaacatcacccccaat

SEQ ID NO: 298 - DNA, 3116 bp, Cricetulus griseus
ggaaagaaagactgacagggcaaggccgggtctcggcctcagattcccgggatgactggtcagaagccacccttgtctacgtgggataattctccccttcgtgtaggtggaggatggggaaattctgatgccagatataccccaggttccagctggggagagagcagctcagggagaataacgaattggcttgttttgaaaaacctcacacctcagattgatggctcaactctgcgcaccctgtgcatgcagcatggcccactgattacattccatctgaacctccaacatggaaatgctctggtccgttacagttcaaaagaagaggtagtgaaggcacaaaagtctctgcacatgtgtgtgctggggaacactactattctcgctgagtttgccagtgaagaggagatcagtcgcttctttgcacaaagtcagtctctgaccccttctcctggctggcagtctcttgggaaccaggcccagagcccggctaggctcccttgactgttcccactcattcctccagccggaccgatctcaatcactggaatggtgctgggcgtgtcgggaactaactgtggagaccttcacggcacttccctctgggggaccccacattattccacaagcctcgtggggtcccccaagcagcagcgacccccggggaattagcagcccatcccctattaatgctttctttctgttgaccacctgggtgggggtggagagtccatgtaaccacataggtatagacgcaaactgtgacctcaagatgagaaggaaaggagcactaagttgggctcgccgcctgcagcagggccacctgtgggaacagctatttctgcacattttccactttgttttccccagaacatatcagtttgaatacttgaatcatgcaggccaatattataatgtgaaagggtatctatctatttacactcccaaatagcgccatacagctaaccgtgtggaatgagctcacttgtgtattcatcatgtttagccttcggattccttctttccttcatttccatcccccatccccaccttttatttttatttgtatttttttgcaaaaccagtttttgggctgatgtatgagcttttacctttgcactgagtgatgttctctccgtctaatcggcaatatgggggggggcagctgttccagtgtaaatgtttactcaaggatgttcttaaaggcgagcactctctactatgcctcatgttgcctaccttattgtggtatcgtggagtttaaaagatcaagttaagatactgacgtaggattcttaatgaaagtattgcaccagttttttcatgttgtaaaactaaagaattttcgctctacagtttgagaaactgtggccaccgctgtgacctgcagcccgcctgctgcccaggacgggccctgcactttgaacaggctttccatgttgttttggaggttcccacggtgaaccttcttgtttacagattttttgtttgttttttgagaaaaaaaaatgtttactcttccatcatttaaaaaaaaatttaaaagacaaaaaaaaaagaaggagggtggtttaaaagaagctttctatctctgggaaaaagagcagcatttggccatgttcttctgttttctacccctgtcctaaatcaaagagcatggttctcaggaaaccagttccccggacaaaaaaaatcttgtagtttcttataggaaaaagaaaaccccaacttttagcactgatattacgtattgctctgttcaagaattttctctgaccaaaaaaagaaaaaaaaaaaaaaaaaaaaaaaaaaaaaaaaaaaaagcgctttgagctggagttgccgtctgctttcagatgctgtcctttattagtgagtgatgatggtttgctgataatcgatcgctaggtgactttttgtaaccccatcagtggctctcatgtctctgctctcttgtgaccgtgttcatgtttaactgttgtaccttaaagccgagatcagtaactatgcatactgtaaccaagacattgggcttacagagttgtttgttgtaataaaaaaaaaaatttaaatgttgttgcaaactaacgagttacaccattttaaaatttctttcctccccagctcctgtttttttgcccacaaatggtattataatgcttgcttagtcaaagaagagactaaacaagggtaaacttttaacagtacagaatatgccatcatttcattgccttgattctaactgtttgtgtcctaagatgcaaaagaggtcagtggcttttaactgtttacaaataggatgtgattgtaaatgtacagtttggttgtgtttgaattatgaaatcttcagataataaaccatgacttttttggctgctcaacattaattgtctcttttttgtgaatttatttgtaggctcttttttataatgaaagttacaaagttgctgcacatgagcattcttctcatagagcagcagattaaaaatgtaagcaaatgtttgaacatttacctgaacttctccacaagcaccctgagataatgtgagaacagtggaagctgtagcttgctccctcctcccccgagcatctttgggatcttgttgctcaaagctcttctgtggcttcacctcccccaccatctgtgcccatctcaagcctcagcgggaccattcggaacatgaagcttagtgacttgacagcatcctagtgttaacctcatacctctcacacagtggggatgccaccgccgtgcccctcgctcctcactgcaggagctctagggcagaactgtgtctgtattccagtgtatgacttcaaatcacgctccagcttgccagctgtaagctcatgtcggacaccgtaacctaagcaaatgttcagtgcattcggtgtgtattgacgtccatactggtttttccaaaaccaaaggtagctttgaaaaaccatgtgtggagatgtttggaacattaagctgagtgaccttttggggctttgagtagtatataactgacttcataacttcgttaattgtattgttaaaagtgtttgggagttttttgcgtcttgttatgtggaaataagtgtttgatttaaaaaataaaaaaaaaaaaaaa

SEQ ID NO: 299 - DNA, 3115 bp, Cricetulus griseus
ggatgtatgtgagaagcaccagcgctggcacactgtagtcaaggaggcatgtctgactgaggggatgaccttatatagctatggcatgctgctgccctgtggggtagaccagttccatggcactgagtatgtgtgctgccctcagacaaagattgttgattctgactctactatgtccaaagaggaggaggaggaggaggaggaggaggaggtaggaagaggaagtactatgatcttgataaaagtgaatttcctactgaagcagatttggaagacttcacagaagcagctgcagatgaggaagatgaggatgaggaggaaggggaagtggtggaagaccgtgattactactatgactcttttaaaggagatgactacaatgaggagaacccaactgaacccagcagtgatggcgctatttcagacaaggaaattgctcacgatgttaaagctgtctgctcccaggaggcgatgacggggccctgccgggctgtgatgcctcgttggtacttcgacctctccaagggaaagtgcgtacgctttatatatggcggctgcggcggcaacaggaacaattttgagtctgaggattattgtatggctgtgtgtaaaacgatgattcctcccactcctctgccaaccaatgatgttgatgtgtattttgagacctcagcggatgataatgagcacgcccgcttccagaaggctaaggaacagctggaaattcggcatcgcagtcgaatggacagggtaaagaaggagtgggaagaggcagagcttcaagccaagaaccttcccaaagcagagagacagaccctcattcagcatttccaagctatggttaaagctttagagaaggaagcagccagtgagaagcagcagcttgtggaaacccacttggcccgagtggaagccatgctgaatgaacgccggcggatagctctggaaaattacctagctgccctgcagtctgacccaccacggccgcatcgcattctgcaggctctgcgccgttacgtgcgtgctgagaataaagaccgcctgcacaccattcgtcattaccagcatgtgttggctgttgacccagaaaaggctgcccagatgaaatcccaggtgatgacacacctccatgtgattgaagaaagaaggaaccaaagcctttctctgttgtacaaagttccttacgtggctcaagaaattcaggaggaaattgatgagctgctccaggaacagagagcagatatggaccagttcacctcctccatctcagagagccctgtggatgtccgggtgagctctgaggagagtgaggagatcccgccgttccaccctttccatcctttcccatctttgtctgagaatgaaggatctggagtggcagagcaagacggcggcctgattggtgcagaagaaaaagtgattaacagtaagaataaaatggatgaaaacatggtcattgacgagactctggatgttaaagaaatgattttcaatgctgagagagttggaggcctagaggaagagccggaatctgtgggacctttgagggaggacttcagtctgagcagcagtgcccttattggcttgctagtcattgcagtggccattgctacagtcatcgttatcagcctggtgatgctgaggaagaggcaatatggcaccatcagccatgggattgtggaggttgacccaatgctcaccccagaagagcgtcacctgaacaagatgcagaaccatggttatgagaacccaacctacaaatacctggagcagatgcagatctaaggacaaggacatgtgtgacaccctggttggaggctggtgcgggtgggctagaagaggttcagcatttgtgcctgactgctgaccaccagtggtgccataaggcctcatcatacatcctgctctcctggattgttaagactagaaagtactactgtaggattgcaatttccattcttttaaatgggtaaaaaaaatgttaatataacaatatatgatatataaaccttaagtgaaatgaaaaaaatgatctattgcagataactgatggatgtagttttcttttttaaattagaaatgccacttctattgtattgtctcacacatgctctatataaatgaaaaatgttgattttttgatgatagactatatacacaggctattcccgttacgtaagtcagttctttaggcttatttgctgtgctggttttatttgtttttaatgtaaaaaggcagtattccctttttcaggttgctgagaaacttaagtggaactgaagtgcattgtgatacagttattgaactattttaaagatatagtttctttggaagcctaatgtttccagtgctgggtgcctgagtgcttctataccagctgtcaccaagcaggtctgaggcacctgagctagcccagtgcatatagagagagatccactgtgctttccttcaaatccagttcttccacagcaactagcctatagttagtatgtgctgttcttccactgttgttcactgtggctttttccaatctactttcctttaccaagtgtgtcctcatgtgcagccacctcctctttggacatctccctccaatgcactggccctctgccctccttggtacctcactctactcccaccagtctcccaggcctttgctgttcactcagagaataccgtgagaaatatgtggctgaggacccaggagaattcatgggcgccttctctatatgaaaggagaatgttctgggttgtacatgaaactgactctgtagacactgtggaaatctttgaaaagttttgtttccttcacataactctgtaatgctggtgtaacagaagttaatgctcataacctttggagttttgttgtttgttttattttgttttaatctgaaggttctggtaacctgttgtgggttttttgtttgttttgtttttgttttgtttttgtatttttgtgtgatttcctcctccccttccgtccccccttggccctagccatgcctcttcccactatgcacagattgaaacttcacttacagactccttagtatgatctgtggagaatgtacagaacttaaccacatcaataaacactttaacttcccctga

SEQ ID NO: 300 - DNA, 3115 bp, Cricetulus griseus
gtggacaatcaagcaccgttacagcgactttcatgacctacaatgaaaagcttgttgcagagagaaaaattagacaaaactctacttccacccaaaaagataaattggaaagaactccagaagcttggtagagaagagggagaaggacctggaggtgtacctccagactctcctgaccaccttccccgatgtggctcccagagtttttggcccacttcttgcattttcacttctatgaaataaatggtatcactgcagcgctggctgaagaactctttgaaaaaggagaacagcttctgggagctggcgaggtctttgccctcaggcccttgcaactctatgctgtcacggagcagctgcagcaaggaaagcctacttgtgccagcggtgatgccaagactgaccttgggcacatcctagacttcacctgtcgccttaagtaccttaaggtttctggcacagaaggaccttttgggaccagcaatattcaggagcaactccttgcctttgatcttctatattcaagtctcttcatcaggtggagataagtcattgtgatgctaagcaaatccgggggctggtcacctccaagccaactttagctacaatgagtgtcagattctcagcaacgtctatgaaggaagtccttgttcctgaagcctcagaatttgatgagtgggagcctgaaggcgcaacccttgaaggccctgtgactgctgtcatccctacatggcaagcattgaccactctagacctgagccacaacagcatctctgagattgacgaatctgtgaaactgatcccaaagatagagtacctggacctgagtcacaatggagtactagttgtggacaacctacagcacctatacaacctcatacaccttgacctgtcctacaacaaactctcctccctggaaggtgtgcacaccaaactgggcaatgtcaaaaccctaaacctggcaggcaacttcctagagagtctgagcggcctacacaaactgtactctctggttaatctggacctcagagacaacaggattgagcagttggaggaggtcaagagcataggcagcctaccatgtctggagcgagtggccttgctcaacaaccctctaagtatcatccctgactaccgcaccaaagtgctctcccagttcggagaacgagcctctgagatctgtctagatgatgcagcaaccacagagaaggagctggatactgtggaagtgctgaaagcaattcagaaagccaaggatgtcaagtccaaactgagcaacacggaaaagaaggttgatgactcccggctctcagctgctccctgcgtcagacccaacagctcccctcccactgcagctcccacctcagcctccctgcctcagcccatcctctccaaccaaggcatcgaggagctgaggcacttgctgtggtcatcagtggtgttctaccagagcccggggctggaagtgactgcctgtgtgctgctctccaccaaggctgtgtacttcgtgctgcatgacggcctccgccgctacttctctgaaccactacaggatttctggcatcagaaaaacacagactataacaacagtcctttccacatctctcagtgctttgtgttcaagctcagtgacctgcagtcagtcaatgttggcctttttgaccagtacttccggctgacgggctcctccccatcgcaagtggtcacatgcttgactcgtgacagctacctgacacactgtttcctccaacacctcatgctggtgctctcctcactggagcgcacaccctcacctgagcctgttgacaaggacttctactcagaatttggggacaagaacacaggaaaaatggagaactatgagctgatccattccagccgtgtcaagttcacctaccccagtgaggaagaggttggggacctgacctatatcgtggcgcagaagatggctgatcctgaaaaggctccagccctcagcatcttattgtatatacaggccttccaggtagtcacaccacagcctggacgaaacaggggcccactgcgccccaagacactcttgctcaccagtgctgagatcttcctcctggatgaggactacatccactacccattgcctgagtttgccaaagagccaccacagagggatagataccggctggatgatggccgccgtgtccgggatttggaccgggtgctcatgggctaccagccctacccacaggcccttactctggtgtttgatgacatgcagggtcacgacctcatgggcagtgtcaccctggaccactttggggagatgccaggtgctcctggcagggctggccagggccgggaggtccagtggcaggtgtttgtccccagtgctgagagccgagaaaagctcatctcactgctggcacggcagtgggaagccctttgtggcagggagctgcctgtggagctcaccggctagtgcacgccaccacagccctggctacctgccatgtgcagtctagtgtggtgcccagaagggcaaggaagcaggccttctgtgttctttttaaggtgttctccctccttagattccttacagtgattgcccacagccccccacacagctcccacagagaatgtgaacatgtgtgttgagttcatcctcctaatgctgggaagaagtatgcttgccccaccagagtgtcccgtgccgtccgcttcccttgtgtcgcctgcttctgaagtggcatggccaggcacaaaagctagttgtttgtccgtgattgtgatgctggtgttatggcgctgtgaacctggaaacctccacgtcctttcctgaagtgttgagtgcagtcccttgttgctgttgctgttgctgtccttgtgggcgctttgctgctaattacgaagctggtagcagaatataaattggaagctcccattttgtgggcttttccaaaatggaggcctcctcaggtccagacaagaggaagtcctatggggagttcccaggccatggggccaagaggagccggtacaggggacctagagctgccagcaccaagcgtaattcctgttgcctattttctctattctaataaagcagagtttgacacaacaaaaaaaaaaaaaaaaaaaa

SEQ ID NO: 301 - DNA, 3110 bp, Cricetulus griseus
aaactgtttgaagttattgaaacagagaagacactctacttagtcatggagtacgcgagtgggggtgaagtatttgattacttagttgccccacggaagaatgaaagagaaagaggcccgtgcaaaatttaggcagattgtatcagctgtacaatattgtcatcaaaaatgcattgttcaccgtgatcttaaggctgaaaaaccttctccttgatgctgatatgaatattaaaattgctgactttggttttagcaatgaattcacagtgggggaacaaaattggacacattctgtgggagcccgccttacgctgcccccgagcttttccaaggcaagaagtacgatgggccggaagtggatgtgtggagtctgggcgtcattctctacacgctggtcagtggctccctgcctttcgatggccagaacctaaaggaacttcgggagcgagtcctccgggggaagtaccgcattcccttctacatgtccacggactgtgagaatctcctcaagaaactcttagtgctgaatcccatcaagaggggcagcctggagcaaataatgaaagaccgatggatgaacgttggtcatgaagaagaagaactaaagccatattctgagcctgagctcgacctcagtgatgcaaaaagaatagacattatggtcaccatgggttttgcacgagatgaaatcaatgatgccttagtaagtcagaaatacgatgaagtcatggctacttatattcttctaggtagaaaaccacccgaatttgaaggtggtgagtcactgtccagcggaaacttgtgtcagcgatcccggccaagcagtgacctgaacaatagcactctccagtcccctgctcacctgaaagtccagcggagcatctcagccaaccagaagcagcgtcgcttcagtgaccatgccggtccctccattccccccgctgtctcgtacaccaaaagacctcaggccaacagtgtagaaagtgaacagaaggaggagtgggacaaagacacagcccgaagactgggcagcacgattgtgggttcaaagagcgaagtgacagccagccccctggtgggtcccgacaggaagaagtcttcagctggcccaagtaacaatgtctattctggaggaagcatggcaaggaggaatacatacgtgtgtgaaaggaccacagaccggtacacagcactgcagaatgggagagacagcagccttacagagatgtctgccagcagcatgtcctctgcaggttccacagcagcctctggtggcccctcagcacggccccgccaccagaagtccatgtcaacctctggccaccccattaaagttgcactgccaaccatcaaagatggctctgaagcttaccggcctggtacaactcagagagcgcctgctgcttctccatctgctcacagcatcagtgcctccactccagacaggacccgtttcccccgagggagctccagccgaagcactttccatggggaacagctccgagagcgacgcagtgcggcttataacggcccccctgcctccccatcccatgaaccgggagcgttcgcacatgccagaagggggacctcaacggggataataagcaaaatcacttccaagttcgtacgcagggatccaagtgaaggcgaagccagcggcagaagcgacacagccagaagtacatcaggggagccaaaagagagagaaaaggaagagggcaaagactccaagcctcgttctctgcgattcacgtggagcatgaagaccaccagctccatggaccccaacgacatgatgagagagatcagaaaagtgttagatgccaacaactgtgactatgaacagaaagaaaggttcttgcttttctgtgtccatggagatgctaggcaggacagcctcgtgcaatgggagatggaagtctgcaagttacctcggctctcactgaatggggtccgcttcaagcgaatatctgggacatctattgcctttaagaacattgcatccaaaatagcaaatgagcttaagctgtaaagatgtctatgcttcagggtcagggaagatgcacccacatctgcggtacaggttttgaatgtactggtgatgcgtaatgtggtcctcctgtgaatctcccgtgtagaactcgtccttgatgcaataaggttatacatagttacaaactgtaaaattaaagtccgtatgagctataataagaatctgtagcttaaaaagtaggcccacatgtacaggtaagtatattgtgtatttctgttcattttctgttcatagagttgtataataaaatatgattgctttaaaacctgtatacctgtctagatctccacacagaaatgtgcggtcaatgctttcagttgaaaatggtttcctgttatttacacctttggtgggttttttaaaattctcacctccatcgtgctattttgaaaattgtgtccgggattaaaagcgcacagaaatcgtctttaaaaactgtagcatgaactttataaaattatttttaaaatcatatttaatttaaaccagaaattgacagtggtcagtgtcattcagtttctcctgcttttcttgctgtcagcctgtgtcaaacaagcgtggttggggaacacacaatgtttacagtgtcggcacctagacttctaaacaatttcttccacatcattgtgcctgtaacgcgccactttgtaactggtcatttgccttctctcctttcaaaactggtgacggatgcgacgtaaagccgctggtaacggtacctttttaacacttactattttgtactgaaaagccttggagggtgactgtgcgatgctatttaatgttgtgacttactgtaatgtcagcatatgggccccatctgcacacccctgagaaacagaaactgctctcaaagcttatcattgaaagaaaacaggctgtcgccgtgctcgcattgattgggcgctacctggaagctgccggtgtaggcgatgggctgtccaatggcttccagacaaaggtggcttttttcttctgtactgtactgtgatgtagctttcttcttaacattctgttccaaatgatgtgttttcttgccttagggaagggcggcgtt

SEQ ID NO: 302 - DNA, 3110 bp, Cricetulus griseus
ctgtgagcaggctaacaagctgggcgccatcaatagtacattaagtaatgaaagcaaagaagcattcattgactgggcaagatatgatgactcacaggatcacttttgtgaacttgatgatgaacgctctcctgctgcgcagtatgtggacctgttgctgaacccagagcggtacactggctacaagggctcctcggcatggagggtgtggaacagcatctatgaagaaaactgcttcaagccacgatctgtgtatcgtcctttaaatcctctggcacccagccgaggggaagatgatggagaatcattctatacatggctagaaggtttgtgtcttgagaaaagagtcttctataagcttatatcaggacttcatgccagcatcaatttacatctgtgtgcaaattatcttctggaagaaacctgggtaaacctagttgggacctaacatcaaagaatttaaacgccgaagaagactgaagaatctatactttttatacttgattgagcttcgtgctttgtcaaaggtggccccttattttgagcgctcaattgttgatctttacactggcaacttggaagaagatgccgataccaagaccctgctgctcagcatcttccaggacacaaagtcctttcccatgcactttgatgagaaatccatgtttgcaggtgacaaaaagggggccaagtcattaaaggaggaattccggttacatttcaagaacatctcccgaatcatggactgtgttggatgtgataaatgcagattgtggggaaaattgcagactcagggtttaggaactgccttgaagatactattctctgaaaaagaaatccagaagcttccagagaacagtccatctaaaggcttccagcttactcggcaggaaatagttgctcttttaaatgcttttggaagactttctacaagcataaaagaattacagaactttaaagcgttattgcagcacaagaggtaatgaagacttttctatgtctccatagacataatggactgtgtgaagccttttagccttggacattgagcagagagacaaagtgtctaagacttcaagaattttgaactcttaaagagaaaattcaaatgttcacttgaatatttatgatccttaatagaatgtcaattagagatatttataaatgaagtatatactttaaaattgtaaattatactaatcccatgtttgtttcacattggttttgtttgtattgtattacccttcattcctagtttgtcaaactttaaatgactgtgtctatcctgagaagactattcattctgttatagaaaaagaactagggaaccagtgctacctagggctggtctcggtgacagaaatttgtcaatgctgtagttagtgtttcagccttgcctaacactgtgtgtcatcttctgtaaggcagggctgtcactataatgaataggcctttcagtgactagtgagagaggttctggatgacttcccaggacttcaaacattttaagatgtttagttgccgttgctgctttggtttggcctaaaaggacctgccttggtgaaggtgggtaagtgtccacccatgctcacttggccagatgtcctgtgtacaccaggctggctcaagagtggagtgtcctttacctaaagcctacaactccttcttctgacttctctctttgttcctctcctagttataaatattttcagttattttgtgaaaagcccttatttatttaatggattgtttattcaaaaatttgaatgggattctatgggtttataatgctaattgcattatacacaaattttgctgttttaaagtaagcattttcaatatttgattttgaacacaatctatgcaatcctctacctctttgtgtgattctatctggtgagatgcttcggcaggagtgtcaccacccccactccattttcaattcatcccagatcagctgtccttggtgtgacttgagacagtggaggacttgaaggccctgactgtcattttctaaacctgggatttaaagtctttaaatattttaaatcttttaaaggtggcagtggataatgggattacttgaaaggtttttatctgtgtggaagtaatgtgagtccaaagttttgattctccttagattccgtctttctgaagtaaacagtaagtgctcttaaacccacatcttatctgccaaagtctgaactatgttccttgtacttcatggtgtgtgccagattactgagttggttcattgtgctctctcaatacttcgtcatctactgtggaggtgtgatgggggactgaggcctcactagtttgttcccctcctaatttctaacctttataaacttaatgttttgttgctaggtgaattttataggttgattattttttaggcagggtttcagttttcccttttctttgtctttttatttttaaagtagtttgctaagtgttaccatgtgacaggagtggaccactgtaagcaaaaagtctacaaagtgaatgcagtgactttgctagtacatcagtaagaagtgttctgtagtgtccctttagaatgtaaggaaatgtgaaaatttgcactttgtctattttatttaaatgcagaggtcattttggtaatgtcacttaccattactacagttatactaaaatggtcagtgttcagtattccttcggtttgcttatgtggagccacaaaacaacaagacctcaggttttgaaacttgacaagtcaaatgttgggcccctgaattgtgtgtatgaaatgctgtgccgtatttcttgactctgcctaggtgccactatatataaggaaggacagctgtgctgttcttctcagcattgccttcagcagtttgcagactgaagttcctgcagaagccatagttagtcaccaaaaggctcagacccaggtacacggtgtcatggaaatcccttagtacaagccaagcacagaaatccacatgtcctttatttgaaatgacatttacaggtgcagctttgagttttctgagcagaattccaaataatttactgttgtacccaccagaatctagaccatgaattaaaatacatgtttctgacaaaaaaaaaaaaaaaaa

SEQ ID NO: 303 - DNA, 3109 bp, Cricetulus griseus
agctcatgggagagattgccaaggccacctttatgtatgaacaattcccagagctcatgaacatgctttggtcccgaatgctaaaagacaacaaaaagaattggagaagagtttataagtcgttgctgctcctggcttacctcataagaaatggatcggagagagttgttacaagtgccagagagcacatttatgatttgcgatccctggaaaattaccatttgtagatgagcacggcaaggatcaaggtataaacattcgacagaaagtaaaggaactggttgaatttgcacaggatgatgacaggcttcgagaagagacgaaaagaaagacaaaagaagaaacaaagacaagtatgttggggtctcctcagacagcgttggcggattcagatacaatgaaagatatgatcctgagcccaagtccaagtgggatgaagagtgggataaaaacaagagtgcttttccattcagtgacaagttaggggagctgagcgataagatcggaagcacaatcgacgacaccatcagcaagtttcggaggaaagaccgggaggactctccggaaaggtgcagtgacagtgatgaagaaaagcaagcaagaagaggcagatctcccaaaggtgaattcaaagatgaagaggaaacggtgacaacgaagcatatccatatcacacaggccacagagaccaccacaaccaggcacaagcgcacagcaaacccgtccaaaaccattgatcttggagcagcagcacattacacaggggacaaagccagcccggatcagaatgctccaacccacacgcctcagtcttcagcgaaggtgcagccatcagtgccgaacagcaagtcatcaggggacctcgttgacctgtttgatggcaatagccagtcaacaggaggatcaactgatttattcgggggatttgctgactttggctcagctgctgcatcaggcagtttcccttcccaagcaacaagtgggaatggagactttggtgactggagtgccttcaaccaagccccatcaggtcctgttgcttccagtagtgagctctttggcagtgccccacagcctgcagtagaactcatcggtggctcacagccaactttaggcccacctcctgctgcctcaaactcttccgacctatttgatcttatgggctcatcccaggcaaccatgacgtcttcccagagtatgaatttctctctgatgagcactaacactgtggggctcggtttgcccatgtcaaggtcacagaatgcagatatggtccagaagtcggccagcaaaaccctcccctctacttggtctgaccccagtgtcaacatcagcctagacaacttactacctggtatgcagccttccaagccccagcagccgtcgcttaacacaatgattcaacaacagaatatgcaacagcctctgaatgtgatgactcaaagctttggagctgtgaacctcagttctccatcaaacatgcttcctgtccggccacaaactaaccctctgatggggggacccatgcctatgaacatgcccggtgtgatgacgggcaccatgggaatgccccctctgggaaacgctccagtgatgagccagagcatggtgggcatgaacatgaacatgggggtgtcatccacggggatgggcttgacaggcacgatgggaatgggcatgcccaacatggccatgccttctggaactgtgcaacccaagcaagatgcctttgcaaactttgccaactttagcaaataaaagattataaagaagcaagtggaagaagaatgtgtagctgcaaataggtgatgttgggatggaaaatgctaagcagttcccttttcttttatcagttaattaaataacccacataaagaaccaaaaagtctggtggttcagaagcaacgcaagagcacttcagacgaggcagtcaggatcattttccccagtgaagatgccatgcgccactaatggggtgaggagaccacgaaggcctttccaagtctggagagcccctgtcacaggatagtctgtgggaggactggcacagggctgagtaaatgtgttcactctctaactttatacttttctttccctgaggaacttgatttttctgtccctcaatcgccttgtcataattgggtctgttcctttactaccactctcagtccatatatgaaatcattaaagttggatgatcagttttttataaaaatatatatttttgtccaaaaaaaaggcatacatatgtgattatggctaaatcaaaggtaacctgatgtatatacttttgccaaggttccagcaacactgctgacacaccatctgagttttcatggaattgaaccctcttttcacagctgtcaatagctgtgagactttgcccgtgtctccttctataattaccccgtgcagaactgggaaagctttcttcttttcaggactgctctgtggtttcctttaaaagatggagaaggaagaccttgtgtgttttgtttgtagcagttgttcattgcacttcgcagtgattgacttggcaaagctgctttccgtgcatatccttgtagccatcattcaagtcagaaacagtcaaaagagaaaaatatttatttttatcttttttggtgtcttttcaaaaaactgaaaggtaaaaatgcattaaaaccttaagttaaatataaaagttaggactcagcaatgttcacgtttagattttatactgtatttgttttgtttgggttttgagtgtctataatacggcattagcaatatggttccaatagaagttcgatatatattattaaaggagacctgtagcagtcagagattttattgatttaatgacaaataaaggaaattaattaattttttttcctgctgtgattctacattaagctcacatgaaaatcatgatgctagagtttggaatgcaaaattaaatgtttcaacctcaagctgggaatattttttaaaataaatactataagtatcaaattattacctccccactttatgttgtaaaatttttttattcaattgatacaactttgtttccattgtattcatgatgttctgttatatataacattaaaacgttcattaaaatcaa

SEQ ID NO: 304 - DNA, 3108 bp, Cricetulus griseus
ctggaaagccatcaacagacaaaaaacccgaatgtgtctaagcataaacaggatatcaaatctgactcacctcgtttaaaatcagaaagagctgaagccttaaagcaaagacctgatgggcgatctgagtctctaagacgtgaccatgatagtaaacagaaatcagatgataggggtgagtcagaacgacatcggggggagtcaggcaagggttcgaagaccagaaacattgagatcttctagtagaaatgaacatagcattaaatctgatggttcaaaaactgaaaaagctagaaagaaaacacaggcatgaatcaggggactcacgggacagactttcttctggggaacaaaaatcaagaccagacagtcctcgtgtaaaacaaggagatactaataaatcaagacctggttttaaatcaccaaatagtaaagatgacaaaaggacagagggtaacagaagtaaagtagatagtaataaagcgcacactgacaataaggctgaatttccaagctatttgttggggggcaggtctggtgcattgaaaaatttcgtcattccaaaaatcaaaagggataaagatggcaatattactcaggaaactaagaaaatggatatgaaaggagatcagaaagacaaagtagaaaaaatgggattagttgaagatctaaacaaaggcgctaagccggtagttgttctgcaaaaactgtcgctggatgatgtccagaagctaattaaagatagagaggagaaatcaagaagttcccttaagtctatcaagaataagccatccaaatcaaataaaggtagtatagatcaatcagtgttaaaagaattgccccctgaactcctggcagaaattgagtctaccatgccactttgtgaacgtgtgaaaatgaacaagcgcaagcgtagcacagttaatgaaaagccaaaatatgctgaaatcagttcagatgaagataatgatagtgatgaagcttttgaatcctctaggaaacggcataaaaaagatgacgataaagcttgggaatacgaagagcgtgacaggagaagctctggggatcataggagaagtggccactcacatgaaggaagaaggagctctgggtggcggtcgctaccgaaaccgaagtccatcaaattctgatatggaagattactctcctcctcccagccttagtgaggttgctagaaaatagaaaaaaaaacttgagctgttgatgtattttacgaaacactcagatgaagaagtacaaacaaaagccatcattggtctaggctttgcctttatacagcatccaagtctaatgtttgagcaagaagtgaagaatctgtataataatattttatctgataagaactcctcagtgaatttaaaaatacaagtgctaaaaaacctccagacttacctacaagaagaagacacacgaatgcagcaagcagacagagactggaagaaagtcgcaaaacaggaagacttaaaagaaatgggagatgtttcctcggggatgagtagctccatcatgcagctttacctcaaacaggtgcttgaggccttcttccacaaccagtcaaatgtacgccactttgcactaaatgtcattgcattgactctaaaccaaggtcttattcatccagtgcagtgtgttccatatttaattgccatgggcacagatccagaacctgctatgaggaacaaggctgatcagcagcttgtggaaatagacaaaaaatatgctggattcattcatatgaaagcagtggctggtatgaagatgtcttaccaggtacaacaggcgatcaacgacgacggaaaagatcctgtcaggggtttcagacaagatgagtcctccagtgctttgtgctcacacctctacaccatgatccgtgggaaccgccagcacagacgcgcctttcttatttccttactcaacctctttgatgacacagcaaaaacagaagtgactatgctcttgtacatagcagacaatctagcctgttttccataccagactcaggaagagccgttgtttataatgcatcacatagacattacactctctgtttccggtagtaatctattgcagtcgttcaaggagtctatggtaaaggacaaaaggaaagaaagaaaagcatcccctactaaggagaacgagtccagtgagagtgaagaagaagtttccaggcctcggaagtctcggaagcgggtggattcggattccgactcagactcagaagacgatgtgaactcagtgatgaaatgtctgccagaaaactcagcccctttaattgaattcgcaaatgtttcccagggtattttgttactccttatgttaaaacaacatttgaagaatctctgtggattttctgatagtaaaattcagaaatattctccatctgaatctgcaaaagtatatgataaagccattaaccgaaaaacaggggttcattttcatcccaaacaaacactggacttcctgcgaagtgacatggctaattccaagctaacggaggaggtgaagaggagcatagtaaggcagtacctagactttaaacttctcatggaacatctggatcctgatgaagaagaagaggaaggcgaggtgtcagccagcacgaatgctcggaacaaagcaattacctcgctgcttggaggaggcagccctaaaaataacacagcagcagagacagaagatgatgaaagtgatggggaggatagaggaggaggcacttcagggtcattgagaaggtcaaaacgaaattcagactctacggagttggcagcacagatgaatgaaagtgttgacgtcatggatgtcatcgctatttgctgtccaaagtacaaagatcgaccacaaattgcaagagtagtacagaaaaccagcagtggcttcagtgttcagtggatggcaggctcctacagtggctcctggacggaggctaagcgccgcgatggccgcaaactggtgccttgggtagacactattaaagagtcagacattatttacaaaaaaattgctctaacgagtgctaataagctgactaataaagttgttcagactttacgatccctgtatgccgccaaggacgggacttccagctaa

SEQ ID NO: 305 - DNA, 3108 bp, Cricetulus griseus
  modified_base (2369)..(2369): a, c, t, g, unknown or other
gggctgcggccaggatcccgggctgaagcgcttaccccggaagcttgatgtcctggagggagagaatgcagtgctgctggtggagacccgagaagctggggtccaaggttcctggagccacgatggggaggagctaccagccacctgccagagcagttctggtcacatgcatgccctggtccttccaggggtgacccgagaagatgctggggaaatcacctttagcctgggcaactcccgtaccactactctgcttagagtcaaatgtgtcaagcacagtcctcctgggccccctgtattggttgagatgttcaaaggccaaaagaacacagtcttgctgacctggaagcctcccgagcctcccccggagacctccttcatctaccgcctagagcggcaggaggttgggtctgaagattgggtccagtgcttcagcattgagaaagctggagccgtagaggtgccaggggactgtgtacctgccgagggcgactatggtgtcaggcctggaggatgtacaggtgtatgagggagaagatgctgtcttctcccttgacctgtccaccatcatccagggcgacttggttccttaatggggaacagctcaagagtaatgagccagaaggccaggtggagcccggagccctgcggtaccgcatagagcagaagggcctgcagcacagactcatcctgcaagctgtcaggcaccaggacagtggggccctggtaggcttcagctgtcctggtgtgcaagactccgcagctctcgctatccaagatagcccggtgcacatcctgagtccccaggacaaagtgtcactgaccttcacaacctctgaacgggtagtgctgacctgtgagctctcaagagtggactttccagcaacctggtacaaggatgggcagaaagtggaggagagtgaatcactcatagtaaaggtggatgggcgaaaacaccggctgatcctgcctgaggctcaagtcccagacagtggtgaatttgaatgcagaactgaaggggtctcagccttcttcagcatcactgttcaagatcccccagtgcacattgtggacccccaggagcatgtgtttgtgcatgccatcacttccgagtgcgtcatgctgacctgtgaggtagaccgagaggacacccctgtgcagtggtacaaggatgggcaggaggtgcaggagagtgactccctggtactagagaatgaagggccccatcaccgcctgttgctgcctgcagcccagccctcccacgggggcgagtttcagtgcgtcgcagggaacgaacgtgcctacttcactgtcactatcacagatgtttcctcatggatcgtgtaccccagtggcaaggtgtatgtaacagccatacgcctagagcgtgtggtgctgacctgtgagctgtgccggccctgggctgaggtacgctggaccaaagatggggaggaggcagtggagagcccagcactgctcctggagaaggaagacaccatccgccgcctggtgctgccctcagtccagcttgaggactccggcgagtacttgtgtgaaattgatgatgagtcggcttccttcactgtcactgttacagaggttgcctgctgcccagccagaggacgggggcgagtttgtttgtgatgctggagatgactctgccttcttcactgtcactgtcacagccccacccgagaggattgtgcacccagcagcccgatccctggatttgcagtttgcggctccaggacatgtggagctacgctgcgaagtggccccagccgggtcccaggtgtgctggtacaaggatgggctggaggtagaggtgtccgattcactgcagctgggtgctgaggggcctgcccgcactctcaccctgccccatgcccagccctgaggcgggggagtatgtgtgtgagacccgagatgaggctgtcaccttcaacgtcagcctggctgagctcccagtgcagttcctggccccagaggcagccccaagcccgctctgtgtggctccgtggggacgccgaggtggtgctgagctgtgaactgtcccgagcgatgtgcgggctgaggaaggtcaggatgtgtgccttgaggtagagacgggccgagtgggtgcagctggagctgttcgctggttacgaggtggggagcctcttcccctcgactctcgcctgaccactgtccaggatggccatgtccaccgcctctccatccatggtgtcctacttagcgaccagggtacctacggctgtgagagccaccatgatcgaaccctggccaggctcagtgtgaggccctttactgcggacacccttcgatgtgctgctcggctctcagtgagagaagtcccagtgactattgtncgggggccacaggacctagaagtgactgaaggtgacacagcgacgttcgagtgcgagctttcccagactttggctgacgttgtatgggagaaggatgggcaggcactctctccgagcccgcggctccgactccaggctctcggagcgcgccgccttctgctgctgcggcgctgcaattcctcggacgctgggacctacagctgcgttgtgggaacggcccgctccgggcctgcgcgcctgacagtgcgcgagcgcgaggtgtctgtgctccgtgagctccagtccgttagcgcccgagaaggagatagcgccacgttcgagtgcactgtgtcagagaccgagaccaccggacgctgggagctcggaggccgcgtcctgagacccggaggccgcgtccgcatccgacaggaagggaagaaacacattctggtgctgagcgagctgcgagccgaggacaccggtgaagtctgcttccaggcgggacccgcccagtctttggctcgactggaggtggaggcgttgcctctccagatgtgccgccgcccacctcgcgagaagacggttctggctggccgcgagggcggtgttggaggtgactgtgtcccgccctggaggccacgtgtgttggttgcgggaggggtcgaattgtgtccgggaagcaagtatgagatgcgcagccacggccccacccacagcctggtcatccatgatgtccgacctgaggaccagggcacctaca

SEQ ID NO: 306 - DNA, 3105 bp, Cricetulus griseus
  modified_base (21)..(21): a, c, t, g, unknown or other
  modified_base (2825)..(2825): a, c, t, g, unknown or other
aggtcagggagaagccgcttntaaattaccgcttcctccgcgccgccgccagcgtcgtgctccgggacctggctgcagtcgagctctcgtgcccagccgccaacgccgcgatcgccgccagccccgccagtccctccagtcccgggccatccgccgcgggcttagccacccaggtgcagagccagccgcacagccccttcagaggagcctctcaagcaaaacgaggaaatggccaccaaggagaagctgcagtgtctgaaagacttccacaaagacatcctgaagccttctccagggaagagcccaggcacacggcctgaggatgaggctgaggggaagccccctcagagggagaagtggtccagcaagattgactttgtgctgtctgtggccggaggcttcgtgggtttgggcaacgtttggcgtttcccgtacctctgctacaaaaatggtggaggtgctttcctcataccgtattttattttcctgtttgggagtggcctgcctgtgcaaccacagctggaacacaccacattgcatggaggacaccctgcgtaggaatgagagtctctgggtctcccttagcgcctccaacttcacctcgcctgtcatcgagttctgggagcgcaatgtactcagcctgtcttccggaatcgacgaaccaggcgctctgaaatgggaccttgcgctctgcctcctcttagtctggcttgtctgttttttctgcatatggaagggtgttcgatccacaggcaaggttgtctacttcaccgccactttcccgtttgccatgcttctggtgctgctggtccgtggactgaccctgccgggtgctggcgaaggcatcaaattctacctgtaccctgacatcacgccgccttggacggacccacaggtgtggatcgattggctatcggcctgggccctggatgaagtacagctgggctgtcatcactccagttctctgtgctggatgtttcatcttctctcttgtcaagtatgtacccctgacctacaacaaagtctacgtgtatcctgattgggcaattgggctgggctggggcctggccctatcctcccatggtgtgtatccccttggtcattgccatcctcctctgccggacggagggaccgttccgcgtgagaatccaatacctgataacccccagggagcccaaccgctgggctgtggagcgtgagggggccacacccttccactcccgcacaagcctcgtcatgaacggcgcactcatgaaacccagtcacgtcatcgtggagaccatgatgtaaggtcctggccatgcaacaggcgccgctttccaagacaggtgaagtgtaagggagagggggttcatccagctgcggcagcatctatggtcgtgcctgtctacccttcccctccaccaggcatgctactctggcgagccatcagtattttgggttggcagacaaatggcaccattctggaaatggcctgagaaaggcctttttatcattcccagatcaaattctagaccaaagacgcagtgggccaagtccccaggccctgcctagatggaaggccagccgcctccagagcccattcccaaaagtgtccctgcacttgtcttcaatgcctaccactctcacccagcccctagccctaatggccctgatggcccttgttgtgatgcttgtgtttctatgtctgcatgtaagtaacattttgaagtagagctcgtgactctggtccacctgcctcttggagagagggctaagctgtccaccaaccagcccttgcctggaacaggtcaggctgtgccctgcctgttagatgtgggcaggaagcaaggtacaatgtcaaatttagatgaggaccagggtgggcccgggaggactctcctgggagatgttatttggacccaagaggttatgttagtccccaagtggaggatccctgctaagcactgtggacagtcccagaggtcccccaatctcaggcacttttgtaaacaggaaaactgaggcctaccctggaagaccatgcagaccatggcaaagcatgggaagaaagcagcatgtttcccctctgcacaggaaggggctttctgtatcccagggtgtcactaccatggcattccagccctgctcctctggatggacggggcaatgctctaggcaaccagtctaaatgggcaccagtcctgttcctctctccaagacgcagacacaagccaggaaggccccttagagaaggccctcacagtcccacgcaatcccgagacccctgtccttatggacactgtaaatacctctgtgtgcacacccctccttcatcaagtctaaaaccacacacacaaaaaaaaccagataccccaagatggagaggggtgcctctgaagccagaagcagtgctcccgcctcccctcctccatgctgacctcccagtagttgggtcttcacaggaagctggttttccatgtttctttaggagggttgtggtgtcattacaggcatgttctggcatgttccctgaagggcagagcatcttgttatatatttggcttcaaaatgagatggtagctccattttttttaaacccaattaatctttccaatccctaacaactgtgactctgtatttagcacaagagaaagctgagaacgtgggttttgcctccttcagaaatatgtctggctcatcaggacattttttaaaaacttcaaaatatttttaagatattttaaacttttgtaaaaaataaaaaacaaaaaaacaaacgcgcacacacacacacacacacaacacacacacacacacacacacacacacacacacacacaaanaaaaaaaacctgaaaccaaccaacaaggggaggagcgttcatgtttgaaggatccttggtgtgtgacctgtcttgcagtgtataagctctgtgtattggtgtttaatgacgacacccctgcatttgcagggtttcgtgtgttttttcctcttttgctttttagatgaatatgtatattgatattttaaatccatctttgctttttttagaggagtttataatcaccttgtaacacaacaataaacatttcctttttaaaattcaaaaaaaaaaaaaaaaa

SEQ ID NO: 307 - DNA, 3104 bp, Cricetulus griseus
tgcacgatggcggcggcctacgagcagctgaagctgcatattacacctgaaaagttttatgtggaagcttgtgatgatggagcagatgatgtactcaccattgaccgagtgtctacagaggtcacccttgcagtcaaaaaagatgtccctccttcagctgttacaagaccaatatttgggatactgggcacaatccatctggtggcaggtaattatcttgttgtcattaccaaaaaggtgaaagtaggtgaatttttaatcatgcaatctggagagccacagattttgatgttctttcttataagaagacaaatgttgcacttgactgatattcagttacaagataataaaactttcctagcaatgctaaaaccacgtcttgagtaatggatggattttacaagaaatgagtctcttggaaaagggcagatcagacggtttgtatggaacgggcatctgctcagagagctgtctgctcagccagaggtccatcggtttgctcttccagtgttacatggctttgttgccatgcactcatgttctattaatgggaagtactttgattggattctcatctccagaaggagttgtttcagagctggtgtgcgatactatgtaagagggattgattctgaaggccacgcagctaactttgtagaaacagaacagatcgtgcactacaaaggggaacagggctttcgtttgtacagactcgaggatcaatacctattttctggtcacagagaccaaatctgaagtacaaaaccacaaccgcagatcaaacaaagtagacaaatcatatggatggtttccaaaggcattttgattcacaagtaattatttatggaaaacaagtcataattaatctggtgaaccacaagggttcagagaaaccacttgagcaagcatttgcaaagatggtgtcatccttggggagtgggatgatctttttagtagactctgctggcaaggtggtaaacaaaccaggaaggagttttccgcagcaactgtatggattgtctagatagaacaaatgtgatccagagtttattggctcgccgttctcttcaagcccagctgcagagactaggagttttgcatgtgggacaaaagcttgaagaacaagatgaatttgagaagacttgtgccttgaagactgactttacaagaactgggaaaagaactcgattgggacttataatggatggctgcaactcattattacggtattacaaaacaacttttctgatggatttagacaagattccatagacttatttcttggaaactattcagtggatgaattagaatctcatagtcctttaagtgttccaagggactggaaatttcttgcactgcccatcatcatggttgtttgccttttccatgtgtatcatctgcttgcttatggctggtgacacttggacagaaaccctggcgtatgtcctcttctggggagttgcaagcattggaacattttttattattctttacaatggcaaagattttgttgatgctcctagattggtccagaaagaaaagatagactgaatttgtgtttgtggaaagcggcttggcttggaagactccatgatgcagaactggagtctttactgacctgctttccacatgagtcccaaggtcttcttaaagcctttacccagaagcacctcttgtggtctgggctgggtgatgtcttagggttgtcgatattactgacttgatctcttcactgttgggatggttatatttataatttgaagctatactgtaattgaaatgtagcttaaattcagctcacacagatcagaaaaaatctattcactgtcaagttaatcagaagttcacagataagtaatatattttaaaattttaacttctttcattatttaagacagtaaaattatttttctagctctgtttcattattgtcattataaagcagccactgttagcaagcatattttccatatatctttgggcttttcttaaaagttttaatagtacgctaatcctatctttatagaatgtctcttacaggtatcaagtagtttgctaagttgtaatttcacaagaaggaagaggagaatggaatctagcgttgttccaagtttctagtagctgcctcttggcttcagccagcttgagctgcttagtgccctagcagcttaaatgtcatagaaaagttcagatataatttattacttttttaaaaggtagtaaatagaaatacaaagaatagtaaagtctgtctacttagttactcattgagacatgcaggcaggcctcatagagggtcttgtgctagatttggttcacacttggagtagcaactgcttttccatgcatggtactctggctttctcactttgtaaaggtttttgttggctgtcaataagtgtctgaaatttagtgcttccaggtagccataattctccaaatcaaggaccaactttaatttgtgcataaaacagactgaaaactacgcttcagaagctgtgcatagttgtaattgtaagacaggttatatattaaaattgtaattatgaagtttagatattagaacagtatataaggtagtatcattgcactatcttacaacagttcagttaaacactgctatggtacatcagtgttttgcttgaaaatatgtagagttttttctaatagtagtaccttatgttgtccttaaatatttctaaaagcgcctttattttaacattaccttttcttcaacattatcttttataaacaataaaagttactgcttttagaaactctgggaaaatgtagcttaaaatcagtcattaaaactcacagtagggtaagtaaatagagccacctattctgacatgtaaataagcataatttgttccaaagatggaatattgaagcccagcccatgtctactataatgtgttattcaaatgctactgggcttttttcatgtcaacagctacagctaacaccaaatctgaactgctgatgtggctactttgcaagaactaattgtcagtgggttaggctgcaagtgatcaatgtttcagagccctgcagtgattttgtttaattcacgtactgtacatccatatgacaaaaaaaaa

SEQ ID NO: 308 - DNA, 3104 bp, Cricetulus griseus
  modified_base (3094)..(3094): a, c, t, g, unknown or other
aacgaaagatttgacaagactgaagactcttctcacagagacagagacagcaagtaatgtcctccctggatgtcatgtggaagacttagatgaagggtcttgtaatggttggcatttccgcccgccacccaggggaatcacaagcagcgaggaatatactttgtgtaaaaggtttttagagcaaggaatctgtaggtatggtgcccagtgtacttcagcacattcccaggaagaattagcagagtggcagaaaagatacgcctcacggttaataaagttgaagcagcaaaatgagaataaacagctctcaggcagctacatggaaaccttgatagaaaagtggatgagctcactgtctcctgagaaagtgcttagcgaatgcataggagggagttcgaggtggagcacaccctgacttgtcggtcaccgtctcgctgggtgaagactgtccacccagttgtgcatccagtactgtttgatctcaggcgcacattccacctttcagatgccccagaaggaagacgttctgaaacatcgagtggtggtggtcacattgaatacttcccagtacctctgccagctggaccttgaccccgggttttttactacatattctgttagatgaagctgcccaggccatggagtgtgagaccattatgcctctagccttagcaactaaaaacacacggattgttttggctggtgatcatatgcagctcagtccttttgtttacagcgagtttgccagggagagaaaccttcatgtttccttacttgatcgactctacgagcattaccctgccgagttcccatgtcggatcctcctctgtgagaactaccgctcccatgaggctatcatcaactatacctctgagcttttctatgagggtaaactgatggccagtggaaagcagccagcacacaaggacttctacccactcacgtttttcacagcacgaggggaagatgtacaagaaaaaaatagcaccgccttttataacaatgcagaggtatttgaagtggtggagcgtgtggaagagctaagaaggaagtggccggtagcatgggggaagttagacgatggcagtattggtgtggtgacgccgtatgctgaccaggtgtttcggatacgtgctgagctccggaaaaagaggctctctgatgtgaacgtagaaagggtgctaaacgttcaaggaaagcaattcagagttctatttcttagcacagtgcgtacatggtccagcagcaaagccaggtacctccaccaggccccgccagccatcgcctcaactctctcctgcatttcagcggggcccaccaatgcacttttcaataatgcagttgctcaccgaccacagtctcctgctgcagaggctgtggttcccgagcagcagccaacgcccgtgcttcctgacggtcacagtccactgagagccatcacacagcctgctcccatcctggcttcacctctgaacaacttttgttgatgagagctccccaggattgcctgtaggagaagctttggatggagtacatggaggcgtagctctggagacattgaggcagcagcaggcacggctacagcactggagcgagcaccgcgcctatctcagccagggcagcatcccatacccacaccatcacccaccctcacctcccgcatcttccccagccggccatgggcctcccccagccgccagggagggcagagtggaaactcgccagcagagttgacgacgacgcagagacaacgttctccaggtttcaagacttactcagagagctgtctcatcgtgatcaaggtgacactcgagaactagctgaaatgccaccacctcaatcaagacttttgcaatacagacaagttcagactagaagcccaccagcagtcccgtctcccccttccagcacagaccacagtagccacttttctaactttaatgacaacagcagagacattgaagtagccaacagcccagcattcccacagcgcctcccacctcagctatttggctcccccttttcgttgccatctgaacaccttgccccacctcccctgaaatacctggctcccgatggagcatggaattttgctaacttgcaacagaatcacttaatagggccaggctttccctatggcctacctccattgcctcccaggccaccgcagaacccttttctacacatacagaaccatcaacatgccattggtcaagagccatttcacccactgtcatctcgcacagtgtcttcctcttcgctccccagcctagaagagtatgagcccagaggacctggtcggcccttgtaccaaagaagaatttcatctagctcagcccagccttgtgtggaagaggcaagcactcctcaaggcagcctggctcagggcaaagaactacaggaccacagccgcccacctgctttcagctacccagcccctgagtcctgggccaacaccacctcgtctgccccctaccagaacattccgtgcaatggacccagcaggacagctcagcccagagagttgatagcgccacccaagactgtcaagcccgctgaggatcagctgaagcccgacagctcggaggtgtccagttccttcaactacacggtgctgcagcacctcggccagttcccacccctcatgcccaacaagcagatcgcagagtcggccaacagcagcagccagcagagcccagcagggagcaagcctgcgatgtcctatgccagtgcgctgcgggccccgcccaagcccaggccaccacccgagcaggccaaaagggcagcgacccgctgtccctgtttcaggagctcagcctgggcagcagcccgggcagcaacggcttctactcctacttcaagtgaccccgggctcttggagtgttcagttcctgtttatcagtagggttgaggtggcaggctcctctgtgtgcagcctctgcgaaatgttgaccgcgctctcactcagtccccttgctgctagacctgcgcctaagtttaaaagtatattccattattttgcatttttgatgtgagtcagaactttgacagcttttatgtagaataaaaatatttttaaatttgagaaaaaaanaaaaaaaaaa

SEQ ID NO: 309 - DNA, 3103 bp, Cricetulus griseus
gcaggggccgccgcgcccatcctgatggctggaggcgtctgaggggcggacggcgacggcggcggcggcggcggtggtggcgggcgcgggcggcgagggcagcggggctgggactggaacagccgccgcgcggacccgaccagcctcgccggctcctgcccgcaggccgcgagcgcgacgaccgggtcgaccaggcggcggcgtgggcgccagacggggcgagatagacttacatgtgtgggaaaacagaccaggaacacatctgaattaagaacttggattctgaagtgtggaaagcactgagacctgaagatgagtgaacttgaccagctgcggcaggaggccgagcaacttaagaaccagattagagatgctcgtaaagcatgcgcagatgcaactctttctcagatcaccaccaacattgatccagtgggaagaattcagatgcgaaccagaagaacactgagggggcatctggccaaaatttatgccatgcactggggcacagactcaaggcttcttgtcagcgcctctcaggatggaaaactcatcatctgggacagctacaccacaaacaaggttcatgccatccctctgcgctcttcttgggtcatgacctgtgcatatgctccttctgggaattacgtggcctgtggtggcctggataacatctgctccatttacaatctgaaaacccgtgaagggaatgtgcgtgtgagtcgtgagctggctggacatacaggttatctgtcctgctgccggttcctggatgacaatcaaatagtcaccagctctggagacaccacatgtgccctgtgggacattgagaccggccagcagacaacaacatttactggacacactggagatgtcatgagcctgtctctcgctcctgacaccagactgtttgtctctggtgcttgtgatgcttcagccaagctctgggatgtccgagaagggatgtgccggcagacctttacgggacacgagtctgacatcaatgccatatgtttctttcccaatggcaatgcctttgccactggttcagacgatgctacgtgcaggctgtttgacctccgtgcagaccaagagctcatgacctactcccatgacaacattatctgtgggatcacatcagtttccttctccaagagtggccgcctcctccttgctgggtacgacgacttcaactgcaatgtctgggatgcactcaaagctgacagagcaggtgttttagctgggcatgacaaccgtgtcagctgcttgggggtgactgatgatggcatggctgtggcaacagggtcctgggacagcttcctcaagatctggaactaaggccagtagcaggtggataccgtggtgactggaagaccattccaaccctgaagcgtcacagcgatagcataccctatccaactgtactaacgtggacacccacacctcccctcagaacttcaaaagggcaacatcttttttccttcacttattgctgaaaccaagagcacaactcccattcagagaaggatctctgtgctgtaaactaaaacaaattgtgcattccttccggggccattgtctttgttttcttttttttttttgtcttgttttcgtttttggtttcttttttttttgtcttgagtaaattttaaaaggaaatactacaataaaaatgttaaccagaaggtaaccctgagtgtgattgtgagacagacacgcctctttactagttcttttgcattttagatcagtgatcctattctgtggcatttatgaaaaacaagttgaagactttatctgtaattgtttctaaatactagtcgtttgtagcaggactttggaagcattcgcattactttcttaaatatattcctttatgttcagtaattaagagaaccagagcccatggtattctctgatttgtcagtgatcttttttttttttttttttttttttttttgtctcatgtcacagatgactgtttcgtacaaacacagcatagtggaagaaaacaaactcagaagcaaagtagccaagcacatgttgtgatggccgcgaatgctttatcgaaatccttccttcctttgctcagcagtacttactcccagcacccttccctcctgacttgtcctcctcactgtctagtttctgctcttacctggggtttctgtgatgttggaggaagtttgtagtcccgtgacactagccgtcctgcccctgcccctgctgtcagagacttgttctccagagaggtgcctgtcctgtgcttggatagccagttgggtgtttgtgtatgaaaccatgtacaaatcaaatgttttgaaaataatgatctcagactttctaagttaaattttaaacaatttgattgtttgccatattgggtgggtttactcttagaatcgcatgctgtagaaatgctctaaagtgcatataggactcagtccttagatgttcttttcttttaagaagtaacctcttcaagttgtaaccatggcggctttgtccattactgttgctactctgcacacatcggaagcagcaagcgctttacacgcttgaatagtgggataagtcactgttttctttataaacaaaacaaacagtcctgttgggaatgactgctgttgggttcaggaggggagggggaagctgctctgctgcctctttgccacttcctggaagcctgcctccgtggaacagccttttgcatctgaggcgacaagttttacaccttgcagatcttcgtggttatcatctcaagccatgttcagcagcagcgtttggacagcagtgttctgtgggccctcccctcccccgtatcctgcactcctcatagcagtagtggctttgccattccgttttctgcagtgtcctgtacaaaactgctgtgactgcggtaggcctggacctggcaaagagaacacagcgaacccccttctcttcctaccagacaactctgtagagctctctgcaccctataaccttttcaccttttgtatttaattttaaagtcagtgtactgcaaggaggctggatgcaagatagatactatattaaactgtactgttatttaagatgtaataaagcagtttgacatgaggga

SEQ ID NO: 310 - DNA, 3102 bp, Cricetulus griseus
cctactttgaatgccgtgaaaagaagactgaaaactccaaagtaaggaaggtgaaatacgaggaaacagtattttatgggttgcagtacattcttaataagtacttaaaaggtaaagtagtgaccaaagagaagatccaggaggccaaagaagtgtacaaagagcacttccaagatgatgtcttcaatgaaaggggatggaactacattcttgagaaatatgatggtcatcttccaattgaagtaaaggctgttcctgagggctctgtcatccccagagggaatgtgctgttcacagtggagaacacagaccctgagtgctactggcttaccaactggattgagactattcttgttcagtcctggtatccaattacagtggccaccaattcaagagagcagaagaaaatattggccagatacttgttagagacctctggtaatttagatggtctggagtacaagttacatgattttggttacagaggagtctcttcacaagagactgctggcataggagcatctgctcatttggttaacttcaaaggaacagatacggtggcgggaattgctctaataaaaaatactatggaacaaaagatcctgttccaggctattctgttccagcggcagagcacagtaccataacagcttgggggaaagaccatgaaaaagatgcttttgaacacatagtaacacagttctcatcagtgcctgtgtctgtggtcagcgatagttatgacattttataatgcttgtgagaaaatatggggtgaagacctaagacatttaatagtatcaagaagtacagaggctccgctaatcatcagacctgactctggaaatccgctcgacactgtgttgaaggtcttagatattttaggcaagaagtttcctgttactgagaactcaaagggctacaagttactgccaccttatctgagagtcattcagggagatggagtggatatcaacactttacaggagattgtagagggaatgaaacaaaaaaaatggagtattgagaatgtctcctttggttctggcggagctttgctacagaagttaacaagagacctcttgaattgctccttcaaatgcagctatgttgtaacaaatggccttggggttaatgtttttaaggatccagttgctgatcccaacaaaaggtcaaaaaagggccggttatctctacataggacaccagcagggaacttcgttacacttgaagaaggaaagggagaccttgaggaatatggccatgatcttctccatacagttttcaagaatgggaaggtgacaaaaagctactcatttgatgaagtcagaaaaaatgcacagctgaatatcgagcaggacgtggcacctcattaggcggcctggttgttgtttgtgcagtgtgtgtatacatacgtgcactatgtgtgcacttgtgtgtatgtaataacatgttcattgtacagatgtgtgggtttgtgtttatgatacattacagccagattatttgttggtttatggacatagtgccctttttcttttcgccaatgtttagacgatctcaaattaggaaacacttataaccatgtacaagattaatgctaaagtgagcttttagtgccctttgctaatagatagtaactcaatctggtgttgaccttttcacaaatcacagaaccaagaaacttttatatatataactacagatcacataaaacagatttgcataaaattaccatgactgctttatgtttatatttaacttgtatttttgtacaaatgagattgtgtaagatatatttaaagtttcagtgatttaacagtctgtttccaacttttcatgatttttatgagcacagactttcaagaaaatacttgaaaataaattacattgccttttgtccattaatcagcaaataaaacatggccttaacaaaattgtttgtgttgttgtacatttggaaattatgtcaggacacatacccaacataattactaacctcactgcccttgtagaatatgcattagtcattctatattgatgggaattatggttcttactcgaatgttctaggcattgtacagttctataccttggtcattgtattgtacaagtgagatgccaaattcaaaaggcctgttctgcaattttatatgtcagagaatagcctgtagctctaatatgcacctcaagattttaagaagataatgtttttagagagaatttctgcttccactatagaatatatgcataatgtaaaatattgaaagtgaaagcagtgtattttaaagtaattacacttctgaatttatttttcatattctgtagttggtatgacttaaatgaattgctggagtgggtagtgagtgtacttattttaaatgctttgattctgttatattttcattaagtttttaaaaaattaaattggatattaaactgtatgggcatcatttattaattttaaattaaaccctcagtaactaatattttttaagcaagttcttgatattacccccaatggaaagtgtggttcttagtagaagaatctactttaatcagagttgtggctaaatttaaaatatccgtcatcaaaacgtttatagtgacttactgctagatcctgagttggccattgcatctgactagacactagttgttcactaaacacaaacacagaaaactcactagcctatgctctaagaaaaggaacatgcgtttgcactttaagagttctcatttaagaatctgatactagaaactgattagtcaagtttttatttgtaccctatatttaaagtaaaaagtttttattatgagtagcccttttcttgaaataaactgttatgaaaaaaacttttatagtgaaatccatcttggaaaattagagaaaactagcaaggtatttgttgttgtatttaccataacttagaactcacttaaactagtattttgtagttttacattcctttttaacccatccagtggagaattatcaagctttctcccaagttgtatgttaagtcaattctaatatgtactcttcatcaaagacaatatgtaataaacatggaaataaagtttagttctgttagtgaaatgtta

SEQ ID NO: 311 - DNA, 3099 bp, Cricetulus griseus
tgggcggcggcggcggcgaggcaacattgtcttgttgacacaagccctttagaagaaagtttgtcattcctgactttatgtcttttacctcacacattgatgagttatatgaaagtgctaaaaagcagtctggagggaaggttgctgattatattcctcagctggccaagttcagtcctgatttgtggggtgtatctgtctgtacggtggatgggcaaaggcattctattggagacaccaaagttcccttttgtcttcagtcctgtgtaaaacccctgaaatacgccattgctgttaatgatttgggaactgagtatgtgcatcgctatgttgggaaagagccaagtggattaagattcaacaaactaattttgaatgaagatgataaaccgcataatcctatggtaaatgctggagcaattgttgtgtactttcccttaattaagcaaggagttaaataatgccgagaagttcgactatgtgatgcaatttttgaataagatggctggtaatgaatatgttggattcagtaatgcaacgtttcaatctgaaagagaaagtggagaccgaaattttgcaataggatattacttaaaagaaaagaagtgctttccagaaggcacagacatggttgggatactagatttttatttccagctatgctccattgaagtgacatgtgaatcagccagtgtgatggctgcgacgttggctaatggcggtttctgcccgattactggtgaaagagtactcagtcctgaagcagttcgaaataccctgagtttgatgcattcctgtggcatgtatgatttctcagggcagtttgccttccatgtcggtcttcctgcaaaatctggagttgctgggggtattcttttagttgttcccaatgtcatgggcatgatgtgctggtctcctcctcttgacaagatgggcaacagtgttaagggaattcacttctgtcatgatctggtttctctgtgtaacttccataactatgataatttgagacactttgcaaaaaaacttgatcctcggagagaaggtggtgatcaaagggtaaagtcggtaataaatcttctgtttgctgcgtatactggagacgtgtctgccctccggaggtttgctttatcagccatggacatggagcagcgggactacgactccaggacagcactccatgtagctgccgcagagggtcatgttgaagttgttaagtttttgctggaagcttgcaaagtcaatcctttccccaaggacaggtggaataacacccccatggatgaagcactgcacttcggacaccatgatgttttaaaatcctccaggaataccaagtccagtacacacctcaaggggaccctgacaatgggaaggaaagtcaaactgtccacaagaacctcgatgggctgttataatggtctgcagtgttactggagtttccttcatgtgcgcacaggacacatctgatttctttgggaaaatagaaataaaacaacctcccttcataatgtgagcaatagttacctcgtgcgttgtacaatttgatgtaaaagaatagttaccaatgctagctgaatggtgtggtcttcatgatttatgtgttttgtaaattttcaatcctgggtgatgatatgctcatctgcatttatgagttgagctttgttgtacagtctgtccacaggggtcgatgctgttattagacgaaaacagtgtgatttttaagacattaaatatagatttagtttgagtgtttggacaaccatatgcactaacatggttgagtgtttaaaatgtctcccatcacccccacttcacagtgtgactcattaaatattaaaaatagctactaactcttcatagaatttgccaattctgattagattttatcagggaatctgttgtttggtgaccaaaacatatgtgtgaatatagtctagcactttgaaaccctttcctttctataatagtccttaggccagtctctctgtggtgtttagctatctgtctcttccccttagctgggaaggagagtgagtgctggcatgctatgcagttttcaagtttcctcagcaagtcatcaaacctcacagtttgagcatcagagatagagcttagccatcaatctagagaagatgaaccaaaattaagacgtctaaattagctatcagtcttaagagtaaagactgtgtggacttgtaagttcctttttcagcttctacaataaagaaaaattcagaaatgctttcagttaccagagttacagtgatacattttaagaactgctacaggtaacatttgctttttgttttatttttgttttctgagacagggtttctgtgtgtagccctggctatcctggaactccctctgtgaatcaatctggccttgaattcagagatctgcctgcctctgcctcttgagtgttgagcttaaaggtgcccactaccactgcctggccacacacacacacacacacacacacacacacacacattctgtatattatttgaaaacaaaaagttgtcatcttttctgagatcagcgctgttttgtacagtctttgtggctcggttaaaaatgctcttttccctcatggtgttaatgactgtttgctattggctgataacaatgagaacattttgtttaagtgcttgaatgggctgttactgctgccatcagtaaactccaaagatcttttttggtttggctttacaatcttgtgtaattttttcttgtatcatggaaacagtacatggccatgttgaatttgaagctgttgacactgctgtttctctgtccctgttctaacacccatgtctggtgatacactccaccccactgctgcccacactatgctttagctgcacagctgggtttgctgttcctgctgtcttatcagggacgaaaagacctgatattggatttaggtccctcctgggggtccaaagctatgaatgtatttacttccgatgtttcccaaaatgaaatcttaaaactataaattgtaagtattctgaaattgggaattatttattttaaatgaggtcaggtagtgttgctttttacagcataataaatacacatgttgaaaacaaa

SEQ ID NO: 312 - DNA, 3097 bp, Cricetulus griseus
  modified_base (444)..(444): a, c, t, g, unknown or other
cgctgtgcgaggagctagtgaaagccgtgacggtcatgatggaccccagctccacccagcgctaccggctggaagccctcaagttttgtgaagagtttaaagaaaagtgccctatctgtgtcccatgtggcttgaggctggcagaagtaacacagattgccatcgtcagacatttttggccttcagatcctggagcatgttgtcaagtttcgatggaacaccatgtctcgattggagaaggtttacctgaagaacagtgtcatggagctgattgcaaatggaacattgagtattttggaagaggaaaatcacattaaagatgttctgtctagaattgtggtagagatgatcaaacgagaaatggccacagcactggcctgacatgttaatggagctggactctctccagacaagggaaacacagagggaattagtgatgttcanccttttgcgattggcagaggatgtagtgacctttcagacactccccaactcaaagaagaagggatattcagcaaacattaacacagaacatggaaagaatcttcagttttctgctcagcaaacttcaggaaaatgtaaacaagtaccagcaaatgaaaactgatgcttctcaggaggcagaggctaaagcaaactgccgagtaagcatcgcagcactgaatactttagcaggctacattgactgggtgtctttgaattacattgttgctgaaaactgtaaactgctggagacactgtgcctgcttctcaatgaacaggaactgcagttgggagctgctgagtgtcttctcattgcagtcagcagaaaaggcaagctggatgaccggaaacccttgatgatcttatttggagatgttgctatgcattatattctctctgctgcacagactgctgatatccaagttcagttttcttacggctcttcaacacatatgacctggggagccctctttcaggcatgagattttatcccgtgatccagcactgttagcaataataccaaaatatcttcgtgcatctatgaccaactcagttaagattgggctttccttctaagacagacagccccagctgtgaatattctcgattttgattttgatagtgatgaggacttcaatgcttttcttcaattcctcccgagcccagcaaggagaaggtgttgagatgtgtgtgtcgcttggatcctaagttttcatctgttacttttgaaactgttggagaaagtaaggctcccaggagtcgtgcagtgaggaacgtgcggagacatgcttgttcctccatcaacaagatgtgccgggactaccctgatcttgttctgcccaattttgacatgctttatagccatgtgaaacaactcctctcgaatgagctactcctaacccagatggagaagagtgccctcatggaagccctggttctcattagcaaccagtttaagaattacgagcgacagaagctattcttagaagagctgatggcaccaatggtcaacatctggctttctgaagaaatgtgcagagtgctcaaagacattgatgccttcattgcctatgttggagccgatctgaaaggctgtgacccagctgtggaggatccatgttgcgcaaaccgtgctcgaataaccttttgtgtgcacagcattctgggggttttgagacgaactagctggccttccgacatagaagaggccagagcaggggggtttttggtgggttacacacccagtggaaatccaatcttccgtaacccctgcacagagcaggtcctgagacttctggacaatttgctggcccttgtaagaacccacaatactttatatgcaccagaaatgctagccaaaatggcagagcctttcaccaatgttctggatatacttgaatcggagaaaacagcaatattaggattacctcagcctctcttggaagtcaatgaacaccctatgttcaaaactactttggaaagaatgcagcgtttctttggcatcctctatgaaaactgttaccatatcctagggaaggcaggcccttccatgcagcaagatttctacactgtagaggaccttgctacccagctccttggttcagccttcgtcaacttgaacaatattcctgacttccggctcaaatctatgcttcgtgtctttgtgaagccccttgtgctcttctgtcccccagaacactatgaatccctcatagctcccatccttggacctctcttcacatacctccacatgaggctttcccagaagtggcatgtcatcaaccagaggagtgtgctgtgtggagaggacgagattgcggaggacaaccctgagtctcaagaaatgctagaggaacaactggtgaggatgttaacccgagaagtcatggacctaatcatggcttgctgtgtatcaaagaagactggtgaccacagtgctgtccccactgtggatggtgatgatgaagagatgatggccaccgaagtaaccccttcatctgtggcagagctcacagacctgggcaagtgcctgatgaagcatgaggatatttgcacagcattgttaattacagcgtttagttccctgacctggaaggatactctgtcttgccagagagcaaccacacaactctgctggcctctcctcaaacaagtgatgtctgggaccctgctcgcagatgctgtcacatggcttttcaccagtgtgctgaaaggtttacagatgcatgggcagcacgatgggtgcatggcttccctggtccacttggccttccagatatacgagacactgcgccccaggtacctagagataagagcagtaatggagcagatccctgagatacacaaggagtcactggaccaatttgactgcaagcttttaaaccctcccttcaaaaggcagctgacaaacgccggaaggaccacttcaaacgtctcatctctggctgcattgggaaacccttgggagaacagttccgaaaagaagttcacattaagaaccttcccacacttttcaaaaaaccaaaccaatgctggagacagaagtgttggacagtgatgccggtggactggccaccatctttgaaccctgaatcaagcttttgggcatccttct

SEQ ID NO: 313 - DNA, 3096 bp, Cricetulus griseus
  modified_base (91)..(91): a, c, t, g, unknown or other
tccgcctagacggctatgctcggctggtgcatcagaccatcctgtgccatcagaatccagtaacaggattgcttccagccagctatgatcngaaagatgcctgggtccgagataatgtgtatagcatcctggctgtgtggggttttgggcctggcatatcggaaaaatgcagaccgtgatgaggacaaggcaaaggcctatgaactggagcagtcaagtatagtcagagtactaaggatagcctccatgccaagtacaacaccaaaacctgtgccactgtggtgggtgatgaccagtggggacacctgcaattggatgctacttcagtgtatctgctcttcctagcacaaatgactgcttcaggactccatatcatccacagcctagatgaagtcaattttatacagaaccttgtgttttacattgaagctgcatataaaactgctgactttgggatatgggaacgtggagacaagaccaaccaaggcatctcagaattgaatgcgagttcagttggaatggccaaggcagccttggaagcactagatgaattagatttgttggtgtgaaggtggcgcaatcagttattcatgtcctggctgatgaagtacaacactgccagtcaatcctgatgaagttgctcgttatttagaccaccttttggcacacactgttccccatcctaaactagctcctacctcacagaagggagggctagatcggttccgagctgctgtgcaaacaacttgtgacttaatgtccttggtgaccaaggccaaggagctgcatgtacagaatgttcacatgtaccttcctacaaagttatttcagccttctcgcccttcactcaatttacttgactcaccccagtctccacaagataaccaggttccttctgttcgtgtagaagtacatcttcctagagaccagtcaggggaagtggactttcagtcactggtttcacagttgaaggagacctcaagcttacaagagcaagctgatatactctacatgctgtattcaatgaaagggcctgactgggacactgaattgtatgaagaagggggtgctactgtcagggagcttctcagtgaactatatggcaaagttggtgaaattcgacactggggtctgatccgatacatctctgggatcttaaggaagaaggtggaggcccttgatgaggcctgcacagaccttctctcctaccagaaacatctgacggtaggacttcctccagagcctagagagaagaccatctctgcacctctaccatatgaggccctcactaagctgatagatgaagccagtgaaggagacatgaacatttcaatccttacacaggaaataatggtatatcttgccatgtatatgagaactcagcccggcctctttgctgaaatgttccgacttcgaattggtctgatcatacaagttatggcaacagaactggcccactctcttcgatgctcagctgaagaagccacagagggcctgatgaatctgagtccttcagccatgaagaacctcctgcatcatattctcagtggcaaagagtttggagtggaacgaagcgttcgtcccactgattcaaatgtgagtcctgctatttccatccatgagattggcgctgttggagcaacaaaaacagagcgaactggaatcatgcagttaaaaagtgagataaagcaggtggaatttcgtaggctgtctgtctctgctgagagtcagactagtggtggtcatccctcaggtatagatatgatgtcaccgtcctttctgtcccctgcagcctgtattgctgcaagtaatggatccttccctactgtgtgtggtcaacagacatgtaaagatagtcgtcaaggtcaatggcagaggcggagaagactagatggagcactaaatagagtaccggttggattttatcagaaagtatggaaaattttgcagaaatgtcatggactttctgtggaaggttttgttcttccttcttcaaccacgagagagatgaccccaggcgagattaaattctctgtccatgtggagtctgttctgaatcgtgtacctcagcctgagtaccgccaacttctggttgaagccatccttgtccttaccatgctggcagatattgaaattcacagcattgggagcatcattgctgtggaaaaaatagtacatattgccaatgacttgttccttcaagaacagaaaaccctcggcgcagatgataccatgttggccaaggatcctgcatctggcatctgtactcttctgtatgacagcgcacccagtggcagatttggcaccatgacctatctctccaaagcagctgccacctatgtgcaggagtttctgccacacagcctctgtgccatgcagtgagggctatgggttctggctgctggaagactttcaacatctggtcactgtcttggttggtttgcatggaactgaaatgttagcaactgaccactccccatacccctttcctgcccatccctcccaagaagagagaactttgctgataatctcactacttttgaagaaaagaattccttacttggaaacttgcctccagtggaaacttgcctccagtgtgaaagttcaaccagtctacaatcactatccttacttttatggttcagaaaagtctgcatgtgtttttactatgtagagctgttaccaacttagttttctaactcctattggggagcaggtattaataagttattttgaagctcaattttcttatttctgggctttctttcttctttttgtgtgtgagtggtgggtctttattggaccattatttcaagagcatagatgctaagttgttggattttatgctgctgtaaattggaaatgtctactttaagtgcctttacttaggaaaagccagcatcagatcatggcttccttcttcactcaaaggttgcttcatattgagtggtgaaatagtttctttatagaagtattgccattccctgttgttctttctgtatctgcccattgcctactctgtggtgaaatattaaaaaatttaagctcacagagaagctgaggcaggaggatcagtgaaagttcaaggccagcctg

SEQ ID NO: 314 - DNA, 3093 bp, Cricetulus griseus
cctcggcttgtggccgcgcctgctcctgctaagggggaagcctggggccggccggacatggtgcgaggcgcgctgcgctactgctgccgccgctgagctcgcgggccgcgcccggctcgcacgtccagcaggaagatgttctcggcgttgaagaagctggtggggtcggagcaggccccgggccgggacaagaacatcccgccgggctgcagtccatgaaccaggcgctacagaggcgcttcgctaagggggttcaatacaacatgaagattgtgatccggggtgacaggaacactggcaagactgctctgtggcatcgactgcagggcaagaaattgtggaagagtacatccccacacaggaaatccaagtcaccagcatccactggaactacaaaccactgatgatgtagtgaaagttgaagtctgggatgtagttgacaaaggaaatgtaaaaaacgaggtgatggcttgaagacggagaatgacccccaggaggcggagtctgaaatggctctggatgctgagttcctggacgtgtacaagaactgtaatggggtagtcatgatgtttgacatcactaaacagtggaccttcaattatgttctccgggagcttcccaaagtgccaacccatgtgccggtgtgcgtgttgggcaactaccgtgacatgggcgagcatcgagtcattctaccagatgatgtacgtgacttcattgaccacctggacagacctccaggttcctcctatttccgctatgctgagtcttccatgaagaacagctttggcctaaagtacctgcataagttcttcaacatcccaattttgcagttacagctgaggcagctggagacaaaccaactagatattgatgccactctggaggagctgtcagtgcagcaggaaaggaccagaactacagcatcttccttgaaatgatggaggctcgaagtcgaggccatggccatcccctttggcggccaatgggcagagtccatcctcaggttcccagtctccagttgtgcctccaagtgctgtatccacaggaagctccagccccagcactccccagcctgccccccagctgtccctcagtgtctcctccacctgtccccaagcaccgtctcctgcaccccctttggaggctgtgccctcctctgtgcagccttcagccccagccccagccccagccccagccccagccccagcccagcgtcgcagtatcatctctaggctgtttgggacctcaccagctgcagaagtgtccccttcacctccagagccagctccagccctagaggccccagcaagagtccagaatgttgaggattttgtccctgaagatggccttgatcgaagcttcctggaagacacaaccctgcctaaagacaagaagaaaattggaaccaaaggcccacagcaggatagtgacagtgatgatggggaggccgtaggagggaacccaatggtggctggtttccaagatgatgtggacatagaagaccagccacatggcaaatccctgctgtcctcagaccccatccccagtaagaacatcagtctttccagtgaagaggaagatgaaggactggcaggccaccccagagtggctcctcagcagtgctcagagcctgagacaaaacggacttccaccaaggcctcacatctacaaaagaagggagctcccacccgagccataccctcatggtccgatggtctcacctactgatggctctcatagacctcaagaaggaaaggacaagcaggtgtcgtcagaaagtgatcctgaggggcctattgctgctcagatgctgtccttcgtcatggatgaccctgactttgaaagtgatgaatcggacacgcagaggagagtggggggtttcccagtaagagaagacctctctgatgtgaccgatgaggacactggctctgcccagccacccctaccctccaagccctcagtctctgctttcagactgaagaatgactcagatctctttgggctgggcctggaggagacaggacctaaggaaagcagtgatgaagataaagacagcaaacttccctcaaaagagaagaagaaaaagaagaagaaaggcaaagaggaggaagaaaaggctacaaaaaagaaaagcaaacacaagaagagcaaggacaaagaggaaggcaaggaggatcggaagaagaagaggaagccccctcggagcaaggagcagaaggctgctgatgagctggaagccttcctggggggtggggtccctggcagccgccaccctggaggtggggactatgaggagctgtaggcattccagaggagctgattgtcctgggaagagaggaactgctagtgggtgatttggggaggctgctgcctatgtacccatgttcccaggaccaccctgtcacctatgtcccccagccattgtgtctgccctcatgtggtctggcccactctacattgatttttatgctggagaccttggtggtggtcaggcccttgggtcaggcactgcaggtgctgggcctcaacctagcataagcctgctctgcagggagggaggggacagaacagagttgcagctggcttggtgaaccacctagccctccccagatagagctgcagccagtccccggtgtttctcagggatgtgcctggggccgagaagggacccaccagggtctgtttacagaggcagggtgtgggactgcttggcttctcaaatgtccaccacccagccccactcctgcttgccttcctgagctctcccagagccatagcatggcttgggttgtgggccttcttccccatggatccagagtagtgcagggtcattccctgagcacagatgtgtactcgggagggtgtggcagcatctgctactgcaaagtggcccaggccccgcactgggtaaggctggcaagagaacacaatgtaccacctctcctgtgggagaggcactaacagcttgccgcttgtgccagctgcgcctctgcttgttgagcacctgcgcaggtgagcctagagggcaccttcttaagacactccgcccagactataaagatctccgaattttaaaaaaaaaaaaagaaaaaa

SEQ ID NO: 315 - DNA, 3091 bp, Cricetulus griseus
  modified_base (355)..(355): a, c, t, g, unknown or other
tcagctaactgccggggttactttgggaggagaaaacagagtcagcaagcagcaggagggaagatgaaaaaggagcgctctcgaaagaaggattcggtggatggagagctagaagcactgatggaaaatggtgaggggcctctctgataaaaaccaggttcttagttatcccggctcatggttagaattgaaactctggaacagaaacttacctgtctcaagcttattcagaacacacactcgcagtcctgtctcaagtcgtttctggaacgtcatgggttgtcgctgctgtggatctggatggcagagcttggggatggccgggaaagtaccagaagcttcaggaagagattanaaagactctggagcatttgcaagctgagcacagaagtggatacagagactcccaagaaactcgtgtttcgaaggcttaagattataagtgaaaacagcatggacagtgcaatctctgacgtcaccagtgaactagaatgcaaggatggtaaagaggaccttgatcaattagaaactgtcactgtagtagaagatgatgacttgcagtcacaacagctactaccacaacagcccgtgtgagtccaaagttgagagtgaaaccaccattgaagtcagtaaattacccacatctgaaccagaggctgacactgaggcagagctcaaagaagcagtggcacaaaactgatgttgaaagtgagagaagccaagaacctccagataaaacagtggatataagtgatttggccaccaagctgctagatagttggaaagacctaaaggaggtgtatcgaattccaaagaaaagtcaaactgaaaaggagagcacagtaactgaacgaggaagggatgctgctgccttcagagatcaaaccgttccaaagactcctaacaggtcgagagaaagagacccagacaagccaactcagaataaagagaaaaggaaacgaaggggctactctttccccaccctcttctgcctatgagcggggaacaaaaaggccagacgacagatatgatacaccaacttctaaaaagaaagtacggatcaaagaccgaaataaactttctacagaggagcgcaggaagttgtttgaacaagaggtagcacagagggaggctcagaagcaacagcaacagatgcagaacttggggatgacatcaccactaccctttgactctctgggctataatgcctctcatcacccctttgctggctatcccccaggctatcccatgcaagcgtatgtggaccccagcaatcctaatgctgggaaggtgcttctgcccacgcccagcatggaccctgtgtgctctcccgcaccttatgaccatgctcagcccttggtaggacatttccacagaatcccttgctgcccctgcatcagtgccggtggtaccccatgtggcagcctctgtggaagtttccagttcacagtatgtagctcagaatgaaagtgtggttcaccaagactccagtgttcctgtaatgccagtacaagctccaggcccagtccaaggacagaattatagtgtctgggattcaaatcaacagtctgtcagtgtacaacagcagtactcccctgcacagtctcaagcaaccatatattatcaaggacagacatgttcaactgtctatggtgtgacatctccttattcacagacaactccaccaattgtgcagagttatgcccagccaaatcttcagtatatccagggacagcagattttcacagctcacccacaaggagtggtggtgcagccaacttcagccgtgaccacaatagttgcaccagggcagcctcagtccttacagccacctgaaatggttgtaacaaacaatctactggatctgccacccccctctcctccaaaaccaaaaccattgttttacctcccaactggaagacagcccgagatcctgaagggaagatctattactaccatgtaatcacaaggcagactcagtgggatcctcccacttgggaaagcccaggagatgatgccaaccttgagcatgaagctgagatggacctgggaaccccaacatatgatgaaaaccccatgaagacatcaaaaaagcccaagacagcagaagcagacacgtccagtgagctggcaaagaaaagcaaggaagtattcagaaaagagatgtctcagttcattgtccagtgcctgaatccttaccggaagcctgactgcaaggtgggcagaatcaccacgacagaggatttcaaacaccttgctcgaaagctgactcatggagttatgaataaggagctgaagtactgtaagaaccctgaggacctggagtgcaatgagaatgtgaaacacaaaaccaaggagtacattaagaagtacatgcagaagtttggggctgtttacaaacctaaagaggacactgaattagagtgacttgcagggccagagtgagcagtgtgatcgggaagaatcctgtggcttctgccctaccccatggccaggcctgtacttactactggtatgatggcctgtcatcctgagcagttcaaacctgcaggtgtcaactgtaagccacaaatgagctctattacaactgacccctagttgtgagctgttgggatgtaatagttacaggccattggaggcagtagcctagggaagaccttggccacacctgaccccattctcaaatctgggtctcccccttggcggtgctgtcagcgcacagacccatgcgcaccctcccccaagaccctttaccccaatgatctgtattatattttaatgtatatgtgaatatattgaaaataattttgtttttcttggtttttgttcagtttttgttcgccgttagcctctatgtgctagaatcatgggaagactttgtaaggacagtataaattctcctgcaaggtttaatttgttatcatgtaaatattccaaagcaggctgccttgtggttttggccagccttgtgctatgttgataagattgatttactgcttaagatcactttactttatccaatttttactgaactttttatgtaaaaaataaaatcaattaaagaacttagacaatgtgtgttccctaaaaa

SEQ ID NO: 316 - DNA, 3090 bp, Cricetulus griseus
aacttttttttttttttttgattataagaatgggttacgtggtcctggccccttacaagagagatctctctttgagaaaaaaaggggcgctcctccaagtagcaatattgaagacttccatggactcttaccgaagggttatccccatctgtgctctatatgtgattttgccagttcattctaataaggagtggagtcaacatatcaatggagcaagtcacagtcgtcgatgccagcttcttcttgaaatctacccagaatggaatcctgacaatgatacaggacacacaatgggtgatccattcatgctgcaacagtccacaaacccagcaccaggaattctgggacctccacctccttcatttcatcttggaggaccagcagttgggccaagaggaaatctgggtgctggtaatgggaacctacaaggaccaagacacatgcaaaaaggcagagtggaaaccagcagagttgttcacattatggattttcagcgaggaaaaaacttgagataccaactattgcaactggtggaaccatttggagtcatttcaaatcatctgattttaaataaaattaatgaggcatttattgaaaattggctaaccacagaagatgctcaggctgcagtggattattatacaaccacaccagcgttagtatttggcaagccagtgagagtgcatttatcccagaagtataagagaataaagaaacctgaaggaaaaccagaccagaagtttgatcaaaagcaagaacttggacgtgtgatacatctcagcaatttaccacattctggctattctgacagtgctgtcctcaagcttagctgagccttatgggaaaataaagaattacatattgatgagaatgaaaagtcaggcatttattgagatggagaccagagaagatgcaatggcaatggttgaccattgtctgaagaaggcactttggtttcaggggagatgtgttaaagttgacttgtctgaaaaatataaaaaactagtgctgaggattcctaacagaggcattgacttactgaaaaaagacaaatcccgaaaaagatcctattctccagacggaaaagaatccccaagtgataagaagtccaagactgatggttcacagaagactgagagtccagctgagggtaaagaacaagaagaaaagtcaggcgaagatggtgaaaaagacactaaggatgaccaggcagaacaggaacccagtatgcttcttgagtctgaagatgagctgcttgtggatgaggaagaagcagcagctctcctagaaagtggtagttcagtgggtgatgagactgaccttgctaatttaggggatgtgtcgtccgatggaaaaaaggagccttcagataaagctgtgaaaaaagatgcaagtgcttcagcagcatccaagaaaaaacttaaaaaggtggacaagatggaggaacttgatcaagaaaatgaagctgccttggaaaatggaattaaaaatgaggaaaatacagaaccaggtgctgaatctgctgagaatgctgatgattcaaacaaagacacaagtgaaaattcagatggccaaaatgatgaaaacaaggaggactatacaattccagatgagtatagaattggaccatatcagcctaatgttcctgttggtatagactatgtgatacctaaaacagggttttactgtaagctgtgttcactcttttatacaaatgaagaagttgcaaagaatactcattgcagcagccttcctcattatcagaaattaaagaaatttctgaataaattggcagaagaacggagacagaagaaggaaacttaagatgtacaagaagcttaattatttcaaggaaaacaatggttctttgattttaatgttaaccttttttaaatacaataccgatagttagaaaactattgtactcttttgttttagtggaaaaataatagatgtctgttcatgtgtttaagtgttatagcagaaagtacacatatggttaagttaatgaaaaagtttttgtttcatcagaatggcaacagacaaaagtacttcctagagattgactgttataagctatgaaaaacaacttgcaccactaagagaaagataacagaaccattcagaaaaaatgaaatttagtagtttgaggcttcaaagaaatgtcaacttttgattccattcaataaagaacaaaaccaattgtattttttattacttttcatctaaaacattccacattttaatctgagccttgcagacttttcatttgacttcggaagctgttttggttgcatttcatttttagagaacttcattcatgtgagattggcaattggaatgcaggtgcagttttcttttaatgtcacactgtttagatgataagaaatattaagtaattggctttagatttgtaatttttttccctgagttcctgctaggtttcgtattctagtagtcaaatgttatttcagtgaaatgtaaaaatattcctgttctctttgaccagtattaatttcttgaaaacctattgcttgtcacttgaatcctgtagttgtcatacatctctggtataagcaacatttgatttttgaagtgtgtgaaccatctctatattttcaggatgtgattttacatttctgccttttaaaaacagtttggacataattctatacgcacgcttctaattcatgtacctgcacatgtgacctttgtgagcagaactttgcatgtataatctgtgtttacttgtaactctctggttatatactgcttatatctgtggattcaagttactgaagtgaataccaataaaaaaaaaaaataggccatgttgaatggatggttaaacgtttggaatgttaaccaaaatatttgtcagttgtgactttttattcactattacattttgtgcatgcttaaacaaataatcctgagagtagagatttggtgttctaaaaactactaaagatctcggtttactcctggtggatttcttgttcttgttacataaataaaaatgaggctttttagtttaaacttaagtttaaaaggctgtgaataaagaagttgcaaaagctcatattcaga

SEQ ID NO: 317 - DNA, 3089 bp, Cricetulus griseus
ccttaaaggaagatgatgacaaatctggcctatttttattgttgttccaaatggaaaggagcaaaggatgagagatgagaaaagggattaaaaggtgctaaaagtggaattttactactccacgtgatgaatacattgaacagctgaagactcaaatgtctagctgtgtggctaagtggttacaagatgaaatgtttcactcagacttccagcatcataataaagccctggctgtcatggttgatcacttggagagtgaaaaagaaggtgtcattggttgcctggatcttatcttaaaatggcttaccctccggtttttcgacaccaatacaagcgttctaatgaaagcactggaatatttaaaattgctctttactctgctgagtgaggaagaatatcatctcactgagaacgaagcatcttcctttatcccctatctcatcctcaaggttggagaaccaaaggatgtcattcgtaaagatgtccgtgccatcctgaacccgatgtgccttgtctacccagccagcaagatgttccccttcatcatggaaggaaccaaatccaaaaactctaagcagagagcagaatgcctggaagagctaggttgcctagttgagtcttatggtatgaatgtttgtcagccaacaccaggaaaagccttaaaggagatagctattcacataggagaccgagacaatgctgtacggaatgctgcccttaacaccatcgtaacggtgtacaatgtacatggagatcaagtcttcaaactgattggaaatctttcagagaaggacatgagcatgcttgaggagagaataaagcggtcagcaaagagaccctctactgtaccagtgaaacaggctgaagagaaacctcagcgcacacagaatataaactccaatgccaacgtgctacgcaagggaccagctgaagacatgtcctccaaacttaaccaagctcgaagcatgagtgggcatccagaagcatcgcagatggttcgccgagaattccagctggatttagatgagattgaaaatgacaatggtacagtccgatgtgaaatgccagaacttgtccagcacaaacttgatgacatttttgaacccgtccttattcctgaacctaagatccgggctgtttctccacattttgatgatatgcacagtaatactgcatccactatcaatttcattatctcccaagtagccagtggtgacatcaacacaagtatccaagctctgacacagattgatgaggtcctcaggcaggaagacaaagctgaagctatgtctggccacattgatcagtttctgattgcaaccttcatgcagctaagactcatctacagtacacatatggcagatgagaagttggacaaggatgaaatcatcaagttgtatagctgtatcattggcaacatgatttcgctatttcagatagagagcctggcccgggaggcttccactggagtactgaaagacttgatgcatggcctgatcacattaatgctggattctcggattgaagatcttgaggaaggacaacaggtgattcgttctgtgaacctcttggtggtgaaggttttggagaaatcagaccagaccaatatcctcagtgccctgcttgttttacttcaggacagcctgctagcaacagctacttctcccaaattctcagagcttgttatgaagtgtctatggagaatggtgcgactattgcctgacaccatcaacagcattaacctagacagaattcttctggacatccatattttcatgaaggtctttcccaaagagaaactgaagcaatgcaaaagtgaatttcctataaggactctaaagacccttctgcataccctatgcaaactaaaaggacctaagatcctagaccaccttacaatgattgacaataagaatgagtctgagctggaggcccacctgtgtcggatgatgaagcacagtatggaccagactgggagcaaatctgataaggaaacagaaaagggagcctctcgaatagatgagaaatcatcaaaggccaaagtaaatgatttcttagctgagatttttaagaagattggttctaaagagaacactaaagagggcttagcagagttatacgaatataagaagaaatattcagatgcggacattgaaccatttctgaaaaactcttcacagttctttcagagttatgttgagagaggccttcgggtgattgagatggagagggaaggcaaaggccgtattcccacttcaacaggtaacacaaatggagaagaagtggggccatctgtctacctggaaaggctaaaaattctccgacaacggtgtggtcttgacaacacaaagcaagatgaccgacctccactgacctctttactctccaaaccagcaattcctccagttgcctcttccacagacatgcttcacagcaagctctcacagctgcgggagtcccgggagcagcaccagcactcagacctggattccaatcagacccactctgcaggaaccatgacctcatcctcctctacaactaacattgatgacttgaaaaagagactggagagaataaagagcagtcgcaaatgaagctgcccatccctcagcactctgcagctttagtttactaatctagaagtcctatagtgtgaaatggccactgcaggcctcagtacacaaactggttttatgtatcggacagcagatggggaggagcattggtggcacaagtcgcacatgctctgcttctaaaagactgactgtggcttaggttagtgtacagacttctaaacagctgcaccctcagctcagactaggttccatatcttttttagttttgttttaatggctcatttgtaaaattgtcctaatttttcctagctttcagccattagaaactcttctaatagttccttctgagttgtgagctcttcttctgtagccctggagggacactgtattctgtatgaatgcatggcatgagacaactaatttaagagtcttttataaataaagttcgcattaactataaaaaaaacaaaaaaaaaaaaaaaaaaaaaaaaaaaaaaaaaaaaaaaaaaaaaa

SEQ ID NO: 318 - DNA, 3086 bp, Cricetulus griseus
cagacgcagtggactcatcttgacaattccgttatgccttgaacagacaaacatggatgaactgagtgtcactttggactatctactcagcattccaagtgagaaatgtaaggccagaggatttactgtgatcgtggatggcaggaagtcccagtggaatgtggtgaagacagtagtcttaatgctgcagaatgttgttccggctgaagtatcccttgtatgtgtagtgaagccagatgaattctgggataagaaagtaacacatttttgtttttggaaagaaaaggatagacttggctttgaggttattttagtgtctgccaataagttgactcgttacatagagccatgccagttgacagaagactttggtgggagccttacctatgaccacatggactggctaaataagaggctggtctttgagaagtttacaaaggagtccacatcattgctagatgaacttgctctgaataaacaatggaagtgaataaggggaatgagcaggagaaagaaaggtctgtggatttaaacttccttccgtctgttgatcctgagacagttcttcagacagggcatgagttgttatctgaattacagcagcgtcgatttaacggactctgatggaggagtctcgtggtctcctatggatgatgagctgctcgcacagccacaggttatgaagttgttagattcactccgggagcagtacacacgctaccaggaagtctgcagacagcgcagtaagcgcacacagttagaggaaattcagcagaaagtgatgcaggttgtgaactggcttgaagggcctggatctgaacaactgagagcacagtgggggattggtgattccatcagggcctcccaggccctgcaacaaaagcatgaggagatcgagagccagcacagtgagtggtttgcagtatacgtggagcttaaccagcagattgcagcactcttgaacgctggggacgaggaagatctggtggagttgaagtctctgcagcaacagcttagtgatgtttgttaccgacaggccagtcagctagagtttaggcaaaatctcctacaggcagctttggaatttcatggtgtggcccaagatttgtctcagcagttggatggcttattaggtatgttgtgcgtagacgtagcaccagctgatggagcatcgattcagcaaactttaaaactgctcgaagagaagctgaaaagtgttgatgtgggattgcaaggcttacgagaaaaaggtcaaggtctcctggatcagatctccaatcaggcttcctgggcctatggaaaggatgtaactattgaaaataaagaaaacgtggaccacatacaaggagtgatggaagatatgcagcttagaaaacaaagatgtgaggatatggtagacgtgcggaggctgaagatgcttcagatggtgcagttgtttaaatgtgaagaggacgcttcccaggcagtagaatggctaagtgaacttctggatgccctgctgaagacccacatcagactgggcgatgatgctcaggaaacgaaggttttactggaaaaacatagaaaatttgttgatgttgcacagagtacgtacgactatggcagacagttgctgcaggcaacggttgttctgtgccaatctttgcgctgtacttcccggtcttcaggggacacacttcctcgactgaacagagtgtggaagcagtttacagtagcgtctgaagagagagtgcataggttggaaatggctattgcctttcactcaaatgctgaaaagattttgcaggactgcccagaagagcctgaagcgcttaatgacgaggagcagtttgaggaaatagaagcagttgggaaatcacttttggatagactcactgtccctgtggtttacccagatggaactgaacaatattttgggagtccaagtgacatggcttctactgcagaacacatcagagacagaatgaaactggtcagtctcaaaaggcagcagctgagacatccggaaatggtgaccgcagaaagctaatgtccccagctcccacagatctgcaggtcatacgctgcccacacatcttcgccgttggcatactgctgtgctagccacagctcattaagatgcatttcccagcaggataagcctcctttcttcccacaacacgtctctaaatgctaacacctcttggctcccgaggcataatcatgtaacatgcttagatgctctagactccaggtgtcttaaagaaggaactgtaaacactgcactgagtccttgctttcacgctttacctgacttgtcagtttgtagatgaacaactaaaaacaagcttttgaatggtgctaatcggagtttaggaattctctatgaaaacatggttgcccctcctccccaggtgatgtagaccatttagaccatagttaaactgttagtggatagtgaatacaaaattttactttgtgattcttcaaaattgattatttttattgtctatatgaagaaaacccttcagatctttgatatatcatattcattggaagacattttcctattgtattcataatgtattaaaagttgtttgtgcttaataaaagtcttctttaagtatcttattaatttggtagttacatcctaattctaaacatgagtgccttaataaaagggcattctttgggttgtgaggatgggcttttggttttgatggtggctgcatgtattttaggcaggaatttcatatgtatgcatgtgtatataataaaaaataagcatgtttattgtgaaaaattagacctttaagaacataataatagaaaactatttttaatttttctcttgaaaatgctgtccaaattgttaactaccctaaagatacttgtctctgggcaaagaaggctaggaacaaaaacaaagcgtaaacttaactatttcaatatagtcttttgtatcacagtaattactctggaactaaaccagaaattgttaatagtatttaatatctcatgatgctagaggcaaaatcatcctgaagaagtctagtcacaaaaactgtacagatctttagaaataaaatttgtcaataaaattgtaa

SEQ ID NO: 319 - DNA, 3085 bp, Cricetulus griseus
gagaggaccaaggcaggatctggcagtagttcccaaccctcacttagggaaagtcacaacagacctgtcttcaatgggactggaaagccccaccccaacacctgttcaccaagtgtcccaaagacttctgctagtgggactcagaaatcctcttctgagcacaaagccaaaaaacctcttccttctcatcccagccattccaagcctgggcccacagttctctcacacaacaaagctaagagtccaggtgtcagacagctaggcagcaactctggctcagctcctgggcgacctagcccagggacagctgggcccacagttagttctggcgctatgcctaggcgccagaataagtggttctgttccagctggacgaactgccagttcaggtcctggaagaccagtgagcagcttaggacctggacgaacagttggtagtccaggcctccccataaaacccaagtgcactgttgtctcggaaacaatttcttcaaagaatattattagtcggtcaagcaatggacagataaatggaacgaagcctttcctgtctggctacagatctgcccaaggtcctcaaaggctccccttccctactggctacaaaaggcctcgagagtatgaagatgatgatgatgatgacgaatatgactcagaaatggatgatttcatcgaagatgaaggagaacctcaaggaagaaatatccaagcacattagggaaatctttggctatgaaccgaaaaaaagtataaagatgaaagtgattatgccttacgttacatggagagcagctggaaggagcagcagaaggaggaagccaagagtttaagactgggtatgcaagaggacttagaggaaatgaggcgtgaagaggaagaaatgaaacgtcgaaaggccaagaaactgaagcgacattagctgctgctcagtttggattatgggacactgccgcaagggtttcctgccttcagactgatcaagccccttatcagtttagatttacatgtgggcactcaagaggaaggaatgaaggaatgcatactgtcgtttgccagctattatttgagtgtacagtgttttctaatagtccaggatggaatctgtaatgcagatgatacgatacttgccgtgtgctctgatgaagttaaccattcacagggctggctttgatcctgatgagctatgcacactaaatgtggggccactcaccagtcagctggtcttttattgttactgttcctactgctaaaggaaaaaaagataaaagagtgatgtgtgacttgtctgtcagacttgtccttataaaaggcctggcccttgtgtgagtgctgccagcaataaagtgacctgtcccagtctatgtttgaactgaaaacccaggaaagagtaggctttatagttatttattatatggttgtcattccttgtgtactttgacatgacaaaatagaatgaattatattgtattcagcattatttgtggattggatgctaagcattctttatatgattaggtaattaaaattttatctggctgccttcagctgtttagccatgagagatggggcactggagaagctgttctacaaagaactcttacttttcaacaggtccagaccccatgtattttgtctatgatgtcttcattctttaagcttgggtattatgagtgataatttttagccttcctttgtgggaccatttgacccagtccttaaaacttactcattttgaattgagtttcaaactttgaaagtgcaaggatttaattttagagggtataatatcctaactctccttgtagatttctatacactggcagcagaaagccattgacttccctttccctatcccactgttgatttaaagggagtatgatattccacttgataaagtaggtttggaacattattttattgctatcacttgtggaatctataattgcagttgagggtttctggtgactgaaagtactgtactcaattacagggtgcagctatttgcacagaaaggagccattatgttaaagtttcagaagttggtaaagaatcaggttgtaatgtctgtcatgtctgaatgcatttctgtaatagatatgcgtcaattttacaggaaagattgtaagtccaaacgtgtcttccattttgctcttctgtatttcctgaccacttagaaaagctcacaagcctgtgaaaagccaggagcaggctattctttttccaaggtttacaaattaagtgcttgatttttaatgtatgctatctactgttttgattttgattttgattcaatatttgaagatgtgccttttattgggtgatgttaattctcgaatgtagtaatgttgtttcacaattgtaatgttacatgatcatgggtgtggcattctctaacaaattatgtgacaagaaagtagttttcataaaacttgtggctctggttgcacagtcccacttgctaaagcaaagggcactttcttttaaggctacttcagaactggtctttgtactttctctatgcaatggatgcagtcatgtccaccacatgtcatgggcagccctgtgtgtgccatgagaaagttcaaagactgttaacagaaagtctaagggaactccggaatttcatttttgtaatggtaaacccccaagattttctccaagaaataaattattttgtattttataacttaaaagcagctagtagtacatttctgagatatagcaggagaccaaaacatttttggaaagagaataaatatatgaagagagactggttgttttattttcagtgtgctgagtagactatttattttgtgaatggatgtgatgaaatacatattcaggtgtttagtgtatgattaagagtggaatatagatttctttggagttattaaaccacgatgcttttacataatggacaaatcaaatgtaaaagaagaaaattttgacatagcttagcttgttttctggtgctgttgacctgcagaagaatatacttttgcaaatacaggtgaatgttttgcaatttatgtatacaagcaattgtaggcattaaaatattttactgaataaaaaaaaaaaaaaa

SEQ ID NO: 320 - DNA, 3084 bp, Cricetulus griseus
  modified_base (2288)..(2288): a, c, t, g, unknown or other
gggccaagtaattgtgagcatccccacaggttcagcagtgtctgcaggtggagggaatacccctgctgtatcccccacctccatcagcagctctgctgcagctggtctccagcggctggcagcccagtcccagcatgttgggtttgcccgaagtgtggtgaagcttaggtgtcaacactgtaatcgtcttttgctacaaaccagagcttcttgactacaaggtaaatgtttcagttctgtggcaagaattgttctgacgaatataagaaatcaataatgtaatggacaatgtgttcaactccacatagctggaggaagagttgaatcattatgccttaaagtcaaatgctgtgcaagaagctgattcagaactgaaacagttctcaaaaggggaaacagaacaggatctggaggcagattttccatcagaatcctttgacccacttaataaaggacagggaatccaggcacgttctcgaacaagacggagacacagagatggcttccctcagcccagacgaagagggaggaagaagtctgtagtacctgtggagcccaggagtcttattcaaggagctttgcaagggtgttcagtgtctggaatgacactaaaatatatgtatggggtaaatgcctggaagaactgggttcagtggaaaaatgccaaggaagaacagggagatctaaagtgtgggggaggtgaacatgcctctcctagtccaggttctgactccttaggaagtgttcaagaccaggcactctctcaagaatcctcagagcaaggttgtaaagtccgccctgtgaagctgaaggaagatattctatcctgcactttttctgaattgagtttaggattatgccagtttatccaagaggtgcggagaccaaatggtgaaaaatatgacccagacagtatcttatacttgtgccttggaattcagcagtacctgtttgaaaatggtagaatagataacatttttacggagccctattccagatttatgattgaacttaccaaactcttgaaaatatgggagcctacgatacttcctaatggttacatgttctctcgaattgaagaagagcatttgtgggagtgcaaacagctgggagcttactcgccaattgtcctgttaaataccctccttttttcaataccaaatacttccaactaaagaatgttactgagcatttgaagctttcctttgcccatgtgatgagacggaccaggactctgaaatacagcaccaagatgacatatctgagattcttcccgcctttacagaagcaagagtcagagccagataaactaactattggcaagaggaaacggaatgaagatgatgaggctccggtgggtgtggagatggcagagaataccgacaacccactgagatgtcccgttcggctttatgagttttacttgtcaaaatgttctgaaagtgtgaagcagaggaatgatgtgttctaccttcagcctgagcgctcctgtgttcctaatagtcccatgtggtactccacattcccgatagaccctggaaccctggacaccatgttgacacgcattctcatggtgagagaggtacatgaagaacttgccaaagccaaatctgaagactctgatattgaattatcagattaagatggaagtaaggtttctatttccatgagcattggtatgcaccaagctgtgaatgcactcagctgtcgggaagatgtgtaaatccaagtcctcttgacttgcttgtaagacatgaagaacaggccgctcctgagcaacagtgtggctgtaaatgaaacccgaggggacggaatgtgagtgacttggcagggagagtccgtagacatggtcagatgactaaccagtttctgagtggtgcataatcttattttgtttgggaataagaaattatggaatatttttaaggaaaactgttgtataaaattctaccatagtaaccttagttagaaaggggtagctttggagtgagaccctggctatttgagcacgatgtccatgaaagtcaggaaagaaatcagtacagagctgagagtgacatcagatgaggacactgggactcagccttgaagatccaaataaaaatactcattgtttttaggaaaaaagatagtggtcttgattgatttatactgccaacccacttatgtgaaggatagaagcctttggtactttgtctggaggcccctcacatcaggggaaatgcccttcactgctgttgttagtgtgccccttttcgtgtagggtcttaccttctcagctgtgggtnattgaaggcaaagggataatgttccacaagctaattatgtacccagaaaacctgtggagcacattagaccctaggtgtcctgaactgtttgcagaaagcccacttattccagattctagctgtcttagttgtatgaggattgcaaggcataggtgtggtgtgtcattatcacactgactccctcttctccagtctcagtttcttccctacaaaaattgagtcaagcttttaataatgttggctaattactgagcttctttaattgaagttaatttgagcttacagcagaactgagagaagtcataagcttcttccaaagtatcaccttgaaagacttcattgtgtcccatattttaggtggggatagcaagttttattttgttttttaaacaaataagtcatttaaatacaacagaattttaaatgggccttttgacattgtatacttggtggttctgtcctctgcctgtaacgaatctcccttttgttactaagaactgtgtgaaagaagtaaatctgccccagtctgtatggttaagttcatctgtgtttgtcatttttgatggggaactgcttccttccagacctcctttgattgaacggaaagcagttggcctgtctaataagtcaccaataaaccatccagaaacaccaggtgtccagtcctgctgtatcagttatgatttgtgtaaacactaacatttcgaatctatagttgtatgagaaacaaatactgttagcttagtagataaattgttataaaataacaaaaaaaaaattttttattttgttaaaa

SEQ ID NO: 321 - DNA, 3079 bp, Cricetulus griseus
ctcttagagcctgcttggatggcggctgagggctcagatgtacctttgccaagaaccagaggtggatgatgctactctaagaaaccatttagacccagcctgtctttgttctcacaggatattcctgaacagcaagatgggcacaatgttctctctagttcactccaggatcccctcaggggtgaggactcccaggaagtccctgtggagcagcctcaaatagaaaatattgcagaggacagggagaatatagctcctgttgtcccagtagatgcaaaagttggccttggtacctcacagtctagttccctgctgccttcccaagtcccattcgagacaagaggaccacgcacaaacagctccatacacatgttactagaagataaggtgaaggcagagagtgggtcccagctccatcacagaccttgcctggcaagcagtgttaggttcagtggtaaggacatgcttcccatggctccagagcccaggtctggtgagaggccccagtgggactctgtgctatataggacttcatcccctggcaacaccctcagcctgatgcgggcttcttgtgccttgccattagacaaatgtagacagggaattgtgtgcaacggtgccctagagactgaaaacaaggcctcagaacagcattcagggtttggcacccttcagaagtaccccacacccaatgggcactgtgccaatggggagctgggaggaataaggactcactgagccaccagctatctgccacaagctgcaaactctaactcacttgtactcaaggaacttgcaccacaagtggctgaatagccactcagggaggccatccactaccagcagtcctgaccagccttcccgaagccacctggatgatgatggcatgcctgtgtacacagacacgatccaacagcgccttcgtcagatagagtctggccaccagcaggaagtggagaccttgaagaaacaagtccaggagctgaagagtcgcctggagagccagtacctgaccagctctctgcgcttcaatggggacttttggagatgaagtgatgacccgttggctacctgaccacttggctgcccactgttatgcctgtgacagtgccttctggctggccagcaggaagcaccactgcaggaattgtgggaacctattctgctccagttgttgtaaccagaaggttccagttcctagccagcagctatttgaacccagtcgagtatgcaagtcttgctatagcagcctccatcccacaagctccagcattgaccttgaactggataagcctattgctgccacttcaaactgaagttcagtgacctggggtggcagaggccatgctgctgttcctttaacaggctcatactcagcctgggcagtccgagaggcccatacactttggaatgggggcatggaacaacctgtacagagattgggatgtaccactggattgtaaattgatttttgtttcatcttcccttccctttccatgcttcctctttgccttctaaaagaaaaatagtccccagttgttctttaatttttttttaattggaagcctacaggttaccaggcccctataactgctgactgctgagttgtttattctcaggtatgatgggggatggctcagtgcttcccagtagaaggagccagaatgaaggtctgagacagcaggacagaaagtcagcctaacattagtgaccattcctcacatcacagctctgtcagagctgactggtaaacctttgctgccggggaggctagaaatgttggcccatgtggattccatctttaacttgaccagattgtgtagggctccctttgcctccttgggcttccagacctaaaggtgcagactggccagaatgtagtgccctgccgatgtggtcaaggcctgccctgaactaggcacctgggagctctctctggggcctggccccacaaacaatctcttcctcggccaacacagggaaatccagactcagggttccacaagtcccccattcccaaagcaaaccaatcatgcatctctccccttaagggacagagtcccgcagttacaaagctctccacacaatcagccctcctcttcccctacccttgggggctgcaggaaggacccaggcgtccctgtcctgcttttggctgcctgtttgggcacgtgtctggctcctgctatcagtgaagaaccacttggtgattgcagggttcctagaaaatgacaggaggagatgtggggtacctttcctcagtgagctttgatgtggtccaaaagagccttaaaccagtggctacctgtggtggaagtgggtataggaagagtggagagtagtttcggtttgtgctttgaattgttggtatctgtgtttgtgcccccactccccacccccagggccatgcttggctctgctaaaagccgctaaactgctaacaaagcagattgtagtgtgagggctggatgaggttggggggacacctcagttctagtctggcctatgtccatgcccctctcctttggaagctgttacctggccatgggcattctgtttcaggaaggtggttctgcatgttcctgagtgtgtaaaagaagcccagaagccttccctagtactgtctgctgaaacgaagcccagggtatcagagcattgctcattcctccagcagcaagtcacacagaggcaaagtctagtgaaacagggtgaagttctcctccatgcttgctgtggtttggaggtgtgggtggagaaaggttggcataattgaagattgtgcagttcctagtgacaggtgccaagaggttatgatacgggtttcttgggtctgttgtacagtgtgaataaatgcttgcagctcttagccctttttgatcaatgaagcacttttttattaatattttctttgtatgtaaaggaggaaccataactctccgtagctgtacatataacccttttctcctaaagaggagtcaatgctcctatatttttcatttctttgtcaaagcaagaagtaaatactttagaattgttaaatatatagataaagtgaataaagttgagtgtccgcacggtg

SEQ ID NO: 322 - DNA, 3079 bp, Cricetulus griseus
  modified_base (577)..(577): a, c, t, g, unknown or other
aggggctgctgaatgctgaggtggcccgcttattgctggaagcacaggcagccacaggcttcctgctggacccagtgaagggtgaacggctgactgtggatgaggctgtgcggaagggtctggtaggccctgagctgcatgatcggctgctttccgcagagcgggctgttactggataccgtgaccccctataccgaacagaccatttcactcttccaggccatgaagaaggagctgatccctgctgaggaggcattgaggctgctggatgcccagctagccacaggaggcattgtggaccccccgcctgggtttcccacctccccctggaggtggcttaccaacgtggctacctcaacaaggacacacatgaccagctttcagagcccagtgaggtgcgcagctatgtggatccctccacggatgagcgcctcagctacacccagctgctctcatctccctcttccaggccatgaagaagggcctaatcctgaaggaccacggcatccgtctgctagaggctcagatcgccactggtggcatcatcagatgacactagggtttctttgaccccaanacggaggagaacctcactttacctgcagctgatggagcgctgcatcactcgacccccagactggcctgtgtcttctgccactgaaggagaagaagcgggagcggaagacgtcctccaagtcttcagtgcgcaagcgccgcgtggtgattgtggaccctgagacaggcaaggagatgtcagtgtacgaggcctaccgcaagggcctcattgaccaccagacatacttggagttgtcagagcaggaatgtgagtgggaagaaatcaccatctcctcctcagacggcgtggtcaaatctatgatcattgaccgacgctctggccggcagtatgacatcgacgacgccatcaccaagaacctcattgaccgctcagcactggaccaataccgtgccggcacactttctatcactgagtttgctgacatgctctcgggtaatgctggtggcttccgttcccgctcctcctccgtgggttcgtcttcttcctaccccatcagccctgccgtctctaggaaccagttagcttcctggtctgatcctaccgaggagaccggcccagtggctggcatcctagacacagagactctggagaaggtgtccatcacggaggccatgcaccgcaacctggtagacaacatcactggtcagcggctgctggaggcacaggcctgcactgggggcatcattgatcccagcactggtgagcgcttcccagtcacagaggctgtcaacaagggtctggtggacaagatcatggtagaccgtatcaatctggcccagaaggccttctgtgggtttgaggacccacgcaccaagaccaagatgtcagctgcccaggccctgaagaaaggctggctgtactacgaggcaggccagcgcttcctggaggtgcagtacctgacaggtggtctgattgagcccgacacccctggccgtgtaccccttgatgaggctctgcagcgtggcaccgtggatgctcgcacagcccagaagctgcgggatgtcagtgcctactccaagtacctcacatgccccaagaccaagctcaagatctcctacaaggatgctttggaccgcagcatggtggaggagggcacagggctgaggctgttggaagctgcagcacagtccagcaagggctactatagtccctacagtgtcagcggctctggctctaccgctggttcacgcactggttcgcgcaccggctcccgggccggctcccgccggggcagctttgatgccactggctctggcttctccatgaccttctcgacttcctcttactcttcctccggttatggccgtcgctatgcctcagggccttcaacctctttagggggtcctgagtctgcggtggcctgaccccctgcctgcaccctgccctcccgctctgcatgcggccaggctccctgtggaggcgctggggtcttttttttttttctttttttttaatttttaacatgtaaaggtgtcttcctcccaagcggtgcctaaaatttaaaccaaataagaccagactaacacagatgtccagacagcctgtgtctcgggaaatggggctggcccaggcccagtgaccgcttcactctccttgggtctccctgatcctttccacctgccactcaccacacactctgtctctcctgggaggattctatctgggaaaggcctccagacctctaagccaaccccactggatgtctacctgctggtcctagctgctgaggggacctggggacaatcctatgagcagacagctctcgaggcctctgtcttgagccagctgcgtctctccagtgtgtctctggattacctgcctattattcattgggtcttgctggtgaaggaaaggccccaagccagccgtctcttccagcctgaccagagaggccccttccccatgggaagataaggcctggtcctggccccagcctcccgcctggctcctgcagctgccattggagctgcgctttgtagttcaccaccctgtacttactccccacccgagacctgagcctctgcttcagccttccagcctcagctccccttgtaagtgccttctgtgtccttcttgtacccaggccctaaagacccagacacagggtaggagatggactttctgtctgggcagggctggagggttctccggatctgagacttctcctatcccagaggccccggtggctcctcagcctgtggaaacccactctgggtgctgctgtccacctctctcccagggagccttggcctctccatggcccagagacactggctggcccatctgtgctgacgttagcacctggccagtgccaccctcccttcctgtccagtcagcccctggccttggtggctcctacccctgcctccaccctcaatgagctttgcatgttccactaaccttgagctggtggcaggtggagatgccaggcagaacactaacctgaccatgggcggaggccctgcggtgtccgcccctcaataaaagcaattccaaccttca

SEQ ID NO: 323 - DNA, 3075 bp, Cricetulus griseus
tatcaccgccagcatgaggtgtgctgccaggatgctgtggtaaagctcaggaagatctctgactgggccctgaaactgagcagcttggacagaagaactgtcacctccatcctgtatcctctgcttcggctcaggcaggcctgttgccatccacaggctgttcgtggggagttcttaccactccagaagagcaccatgacaatggaagagctgctgacgtccttacagaagaaatgtggaacggaatgtgaagaggctcaccggcaactagtttgtgccctaaacggcttagcaggcatccatatcattaaaggtgagtatgcctcggcagcagagctgtacagagaagtattacgctcctctgaggagcacaaaggaaaactcaaaacggattcacttcaaagacttcatgctacacataacttgatggaactgttggcagccaaacaccaggggatacctcccaccttggagagacctccatcccgtgatgtgattgagtctgcaactgtctgccatctgcgaccagccagactcccgctgaactgctgcgtcttttgtaaagctgatgaattgttcacagagtatgaatcaaagctattttctaacacagtcaaaggccagactgcaatctttgaagaaatgatagaagatgaagaaggacttgtggatgatagagtacctactactacccggggcctgtgggcgataagtgagacagagcgatctatgaaagcaatattgtcatttgcaagatcacataggttcgatgctgaatatgtagatgaaggaagtgtttcaatggatctcttcgaggcatggaagaaggaatataagttacttcatgaatactggatgactttgagaaatcgtgtgtcagctgttgatgaacttgcaatggctacagagcgactaagagtgcgccatcccaaggaaccaaagccaaacccacctgtccatcacatcattgaaccacatgaggttgaacaaaatacgtataaaactggtaaatgataaagctgttgctacatcacagctccagaaaaaacttggacagcttctttacctgacaaatttggaaaagtctcaagataaaacatcaggaggtattaatccagagccttgtccaatctgtgctcgacagctgggaaaacagtgggcagtgctgacctgtggacactgcttctgtaatgaatgcacttctattataattgaacagtacagtgtggggtctcatcgtagctccatcaagtgtgctatctgccgccagaccacatcacacaaagacgtctcctatgtttttacctcagaaaaagcaaaccaagaggatgatatccctgtgaagggtagccattctacaaaagtggaagctgtggtcagaacactgatgaaaatacagcttaaagatccaggggccaaagcactcgttttctctacgtggcaagatgtattagatattatttcaaaagctctcaccgacaacaacatggaatttacacaaatcaatcgcattaagacattccaggagaacctttcagcatttaaacatgatcctcaaatcaatatttgctgctgcccctgcacacgggctctaatggattaactatcatcgaagccactcatgtcctcttggtggagcccatcctgaaccctgcccatgagcttcaagccattggcagggtacaccgaattggacagacaaaacctactattgtacatagattcttaattaaagcaacaataagaagagcgaatgcaggcaatgctgaaaactgctgagaggagtcatacaagctcatctgggaagcattctgaagcctctgtgttgactgtggctgacctggcagacctgtttaccaagaaaccgaggagcttgaatgaagaattgaaaacaaaagatcagcaaatattagtaaatactatttcaaattgaatgaattgttttgttatacactagcctagtaataattagccattggttctttttcagtatactaatttcaaaacatgtacaatgaattttaattttgcattcctactgaaacactttttattccagtgaatatctataactgataaggcaggggaattaagaaaggtattgaagacttttcattgaatggatagacatttgtaataacaagtcagaatacataagagaaaaagtaaactagtctaattttgtatgacctgatagtatccaatcaatgtagatcacatttttgaaagggccttcagcatctttagcaaatgattcaccattatcttttcagtaatattttaagaaaatactgaactataataacttgttatttgcatgagcttaaatggtaacattagtcattttcctgtgtttcctctaactagtcattttagccattagtatttaaattttacaatagagttttattcattttcagtttactctgccaattaggaacttgtgtctgatcttactgcaggagagtgctgtgttcacacatgcatataactgtaagtgatagaaactgtgtcttcttctgtgaagaattaatagatgtactttgaaatcacaaaataagaagtagcttgttgtatcctagccctgtgatggaatataaatgttcttgttttctttccttaaagcttttggagtttcaagtgaccctcaggattcattagctcctacctaactgcccagaaagctgtactggactagtccctgggtcctccttcatcagtgagctctggtgcttagctaaggtgcatttcctactccaggtttacaggtgacagttcaactgaagaagacacattgtgggtgcttattctttagttgaagggacatatgcattgattcttttatatgaaattaactatttttacagctcttttacatatgaagagcttttatgtatattcatgtagttaatattcctaatagtcttgtgaagtagatataattaatatcatttcctaatttaaaaaaaaaaactaatagactacaaaaaataagtaaagaaatttgcctatgacatgtagcaatcagacagtggaacccaggctctctggcttcacattctactgttcttccac

SEQ ID NO: 324 - DNA, 3075 bp, Cricetulus griseus
gcaagaggatgactcgttacttggggaaactcggagggacgctggcccggaggaagaagccaaggaagtgtccgagttccaggagggtaaggaatgaacgccattcaacctgcccctgagcccccatctccttcgagctggaccccgaggacaccatgctggaggagaatgaggtgcggacaatggtggatccaaactcacgcagtgatcccaagcttcaagagctgatgaaggtactcatcgactggatcaacgacgtgctggtgggagaaagaatcattgtgaaggacctggctgaagatctctatgatggccaagtcctgcagaagctcttcgagaaactggagagtgagaagctcaacgtggcagaggttacccagtcagagattgcccagaagcagaagctgcagactgtgctggagaagatcaatgagaccctgaagcttccacccaggagcatcaagtggaatgtagactctgttcatgccaagagcctggttgccatcctccacctgttggtcgctctgtctcagtatttccgggcaccaatccgactcccagaccatgtttctatccaagtggttgtggtccagaaacgagaagggatcctccagtctcgacaaatccaagaggaaataactggtaacacagaggccctttctggaagacatgaacgtgacgcctttgacacgctgtttgaccatgctccagacaagctcaacgtggtaaagaagactctcatcacatttgtgaacaagcacctgaataaactaaacttggaggtcacagaactggagacacagtttgcagatggggtctacctggtgctgctcatggggctcctagagggctactttgtacccctgcacagcttcttcctgaccccggacagctttgaacagaaggtcctgaatgtctcctttgcctttgagctcatgcaagatggagggctagaaaagcctaaaccccggccagaagacattgtcaactgtgacctgaagtccacactgagagtgctctacaacctcttcaccaagtaccggaacgtggagtgaggacccagtctgtctacctgcctggtctctctcactgcaggctgtctggaccagcttcccatctgccttaccctgcttgctcccatctcttgctctatgctctcccataagcccagcgaccacccagagatagtggacattaaaatcagtaaggattaaaggaggtcattctccccttttacagacgaggaaactgaggctcaaagatttggagatttactactcattagcatgtatttttcctctttgggcaacttactgattaataactggtcaactgtgttccattctgtatgtatcctaaagtgtgtgcatgctcgagcagactcgccttacctgcatatacctgcttcctctagcagacaagacactctgatctcaccctagggcaggccaggtcagagctgggtgattcgcactaaaattgccaaattgaatttaactcaattaatagtgtgtgtgtggcaggagccgtgtccctcaaatcctttgtacaaatgaaaattacccttaattccttcagatttgtaataagcccacgctccggttgcaggatgacatttgggaagggttctgtttggaattaatagagtgcccatttcgcagcctttttgcttgattgcatgtaatggatgtgccctatattttcctgcaaagtaagtactcaattcattatcgttaggcaaatgtagggtatactcgcacatggcagagagctgggcacagacccactggagcatcgcctgagaagtagggctcatcaatgggagacccttgaactttaaaaaaaagggacctcctttttgccttctaattggtcatttagagcattctggctaagtctgcccacatgcaattactggctaattccagttgaggaaaatgtcagtcatttaaaccaaagctcagcatctagattcctcacttgagtgactcgagggctgcaggttacatatctcctggagcaaacctgacttggaaggaaagttctgctgtgccagtctgcatctgggtcctgtagaaaaaacaaaggggctggtgggtagagggagggtcagacttaagggaacaagaattggggtaggagagcttaatactaatgtgtttaacatgtgggggataccctcagagacagagctgctgctatggtccttggcctttgtgctcttcaattgagatcttgtttctttttatactggccatccagggcagctcagaacccagaacgtttagatctgctgtgcacctccctgttttgttctaggaattgttacttagcactgtgagcgtctaagatgtgaaggcaatgttctgccttttgttgatctatgtgtacaaacagaattcttttttgcataattaatgaaatatcttatttttcattaggattaatgttggtctcacactcttttaaattcctggcaggcaattgagattagtagctgtttggcctgtgtgagcattactgaagcagacagtgtacccaataactgggcattgggactaaggtctttgcctcattccagagtcccgggcttgtgtctgatatataaccctgtcatctcatggagatgggtgttttcctttagattctaggatcacatacttcagacatgagcatggttttgaagaagaaagagacatcatcattataagtaatcaaacagccttcatctcctaagaaaatagaggaaggaaaaaactgagacaagaatcatcctggctcacagtttgaggggctgctgctcagcttgctgattttttatttaatctgggaccccagcctatggagtggtgccaccacagtcagggtgagtcttcccatctcaactaatcatcataattaatagttaatgcataagtaacacagaattcagaaattgggaaccatgtctgataaaaatcctaaatatccatctctccttttccccatcggtctccaccttccaaggagatgactcccttgatccatttcttctgcatgattccagaaatactctgtgcaaataaagcctgaatg

SEQ ID NO: 325 - DNA, 3074 bp, Cricetulus griseus
ggacgaggagtctggtagtgcttccaatcctttccagaatttggagaagagtgctgtcctgcaggaggcacgcatattcaatgaaacccccatcaatccaagaagatgcttgcatatcttgacaaagattctgtacttactcaaccagggtgagccctttgggactatggaagctacagaagccttctttgcaatgactcgcttgtttcaatctaatgatcaaacactcaggagaatgtgctaccttaccattaaggaaatggctaccatctctgaggatgtcatcattgtcacaagcagtctgacaaaggacatgactggaaaagaagatgtgtaccggggcccagccatcagggctctctgcagaatcacagatggaacaatgttgcaagctattgaaagatatatgaagcaggccaattgtggataaagtctaccagtgtatccagttcagcacttgtatcttccttacacatgatgaagataagctatgatgtggttaaacgatggataaatgaagcccaagaagctgcgtcaagtgacaatatcatggtgcagtaccatgcattgggagtgctgtatcaccttaggaagaatgatcggcttgctgtctccaagatgttaaataagttcaccaaatgtggtctcaaatcacagtttgcatactgtatgctgattcgaattgctagtcgcttactgaaagaaagtgaggatggtcatgacagtccactctttgatttcattgagagctgcttgcgaaataaacacgaaatggttatttatgaagctgcttctgcaattattcaccttcctaactgcactgcaagagagttggcgcctgctgtctcagttcttcagcttttctgtagctctcctaaaccagcccttgagatatgcagctgtgaggaccttgaacaaagtggcaatgaagcacccctctgctgttactgcctgcaacctggatttagagaacttaatcacagactcaaacagaagcattgctaccctggccattactacattgctcaaaacagggagtgagagcagcgtggacaggcttatgaagcagatatcttcttttgtatctgaaatctcagatgaattcaaggtggtggttgtgcaggcaattagtgctctctgtcagaagtaccctcgaaagcacagtgtcatgatgactttcctttcgaacatgcttcgagatgatggaggttttgaatacaaaaaagccattgtggactgcattatcagcattgtggaagagaaccctgagagtaaagaagccggcctagcccacctctgtgaattcattgaggactgtgaacacaccgttctggctactaagattctacacttactgggcaaagagggccctagaactcctgtcccctctaagtatatcagattcatttttaatagagtagtcctggagaatgaagctgtcagagctgctgctgtaagtgctttggctaaatttggagctcagaatgagagccttctcccaagcatcctggtcctcttacaaaggtgtatgatggatactgatgatgaggtacgggaccgagctaccttctacctgaatgtgctacagcagagacagatggccctgaatgctacatatatcttcaacggtctgacagtctctataccagggatggaaaaggccttgcaccagtatacactagagccttcagaaaaaccctttgacttgaagtccattcctctcgctatggctcctgtctttgaacagaagtcagaaatcacgcttgtgacttctaagccagagaagttggctccttccagacaagatattttccaagaacagttggctgccattcctgagtttatgagtctggggcccttgttcaagtcttctgagcctgttcagctcacggaggcagagacagagtacttcgtgcgatgtatcaagcacgtgtttactgaccacattgtgttccagtttgactgtaccaacactctgaatgaccagctgctggagaaggtaacggtgcagatggaaccgtccgactcctatgaagtactgtgctacgtcccagcccccagcctcccttacaatcagccggggatgtgctacacacttgttcgcttgccggatgaggatcctacagcagttgcaagcacctttagctgtaccatgaagtttacagtccgggactgcgaccctcacactggagtcccagatgacgatgggtatgacgatgaatatgtgctggaagatcttgaagtgactgtgtctgaccatattcagaaggtactaaagcctaactttgctgccgcctgggaagaagtgggagatgcatttgagaaagaagaaacctttgctcttagttctacaaaaacccttgaagaggctgtcaacaacatcatcacatttctgggcatgcagccatgtgagagatcagacaaagtacctgagaataagaattcccattccctttatctggcaggcatgtacagaggtggctatgacttgctggtgcgatcaaggctggccttagcagatggagtgaccatgcaggtgactgtgagaagcaaagagaaaacacctgtggatgttatcttggcttctgtaggataagttcttgctgggaaaggtgatgtggctatgctcaccctattcgtggtttttaggccaatggcatgaattttccagaatcacactccaatgtttggccctgagccagcagatcaagcaaatgtttatcttttgtgcatggacttcagtgtgtttcttcccttctcattgtctcacttgctcagctttgctatgacaatgcagctttgagtgatcttgaaaaccagaatctatgtatgctattctacagctgcttggcttcattatatgcttttatttcatgtatgaaaactctaggcaatgttggaaaatcttatcccagaagggtggagggggaggggaagccggaatccatttttgtcacagtttgtttttattaatagaaaataaacactcattcattccaaaaaaaaaaaaaaaaaaaaaaaaaaaaaaaaaaaaaaaaaaaaaaaaaaaaaaaaaaaaaaaaaaaaaaaaaaaa

SEQ ID NO: 326 - DNA, 3074 bp, Cricetulus griseus
ggtttcattttgcttctgaattcctgccttgtagacagcaatggcagcccgagttcttgtgattggcagtggagggagggaacataccctggcctggaaacttgcacagtctcatcatgtcaaacaagtgttggttgccccaggaaatgcaggcactgccagttccggaaagatctcaaatgctgctgtctccatcactgatcacactgtcctggctcagttctgcaaagatgaaaagattgagttcgtggttgttggaccagaggcccctctagctgcaggggttgttgaggacctggcctgtgcaggcgtacgatgctttggccccactgcacaagcagcccagttagagtccagtaaaaagtttgccaaagagtttatggaccgacatggaatcccaactgcgcagtggaaagcctttaccaagcctgaagatgcctgcagctttattatgagcgcaaacttccctgctttggttgtgaaggctagtggccttgcagctgggaaaggcgtgattgttgcaaagaacaaagaggaggcctgcaaagctgtacaggagatcatgcaagaaaagtcttttggagcggctggagaaacagtggttgtggaagagtttctggacggggaagaagtgtcttgtctatgtttcactgatgggaagacagtggccccaatgcccccagcacaggaccataagcgattgctggatggagaccagggccccaacacagggggaatgggagcctattgcccaacaccccaggttcctacagatttgttactaaaaattaagaacactattcttcagagaacagtagatggcatgcggcaggagggtgcgccttacacaggaattctctacgctggtataatgctgactaaagatggcccaaaagttttggagtttaattgccgttttggtgatccagaatgccaagtaatcctcccacttcttaaaagtgacctttatgaagtgattcagtccaccctagatggcctgctgagtacatctctgcctgtttggctagaaaaccactctgccgtaactgttgtcatggcaagtaaagggtaccctggagcctacgccaagggtgtagagataacagggtttcctgaggcccaggctttagggctgcaggtatttcatgcaggcactgctcttaaagatggcaaagtggtgaccagtgggggcagagtcctcacagtaacagccgtcggggaaaatcttgtgtcagcccttgaagaagccaagaaaggactcgctgctataaagtttgagggagcagtgtataggaaggatattggcttccgtgctgtggccttcctccagcagccaaggggcctgacttacaaggaatctggggtagacattgcagctggaaatatgctggttaagaaaattcaacctttggcaaaagccacctccagaccaggttgcaatgttgaccttggaggctttgctggtctttttgatttgaaagcagctggtttcaaagatcctcttctggcctctggaacagatggtgttgggactaaactgaagattgcccagctgtgcaacaagcatgacaccattggtcaggatttggtcgccatgtgtgtgaatgacatcctagcacaaggagcagagcccctcttcttccttgattacttttcctgtgggaaacttgacctcagtacaactgaagctgttgttgctggaattgctggagcttgtagacaagctgactgtgctctcctgggtggggagaccgcagagatgcccgacatgtaccctcctggcgagtatgacctggctgggtttgctgtgggtgctatggaaagggatcagaaactccctcggctcgaaaggatcaccgaaggggatgttgtcgttggagtagcttcatctggtcttcacagcaatgggtttagccttgtgaggaagatcgtagcgaggtcttccctccaatattcttctccagcgcctggtggacatggtgaccagacgttaggggacttacttctaactccaaccaggatctacagccattcactgttgcctatcatacgttcaggacgtgtcaaagccttggctcacattactggaggtggactgctggagaacatccccagagtcctccccaagaagcttggggtagatttagatgcctgcacctggaggatccccaaggtcttctcatggttacagcaggaaggacagctctctgaagaagaaatggccagaaccttcaactgtggggttggagctgccctggtggtgtctaaggaccagacagaccaaatcctgcatgacattcggcagcgccaggaggaagcctgggtgataggcagtgtcgtggcctgtcctgaagattcccctcgtgtcagagtcaagaatctgatggaggccatgcaaatgaatggggcggtggtgtcaaatggcttcctgagaagtcatttccctgcccagcaaaagaagtcgagagtggctgtcttaatatccgggacaggatcgaacctccaagctctcatagacagcactaaagatgcaaagagctccacacacatcgtggttgtcatctccaacaaagctggggtcgctggcctagacaaagcagaaaaagctggcattcccaccagagtaattaatcataaattatataaaagtcgtgttgaatttgacaatgctgttgaccaggtcctggaagagttctctgtagacatagtctgtcttgcaggattcatgagaattctctctggcccttttgtcagaaaatgggacgggaaaatgctcaacatccacccgtccttgctcccttcttttaagggatcaaatgctcatgagcaagtcctggaagctggagtcacgattacgggctgtaccgtacactttgtagctgaagacgtagatgcaggacaaatcatcctgcaagaagctgtccctgtgaagagggacgacagtgttgcaactctgtctgaaagagtcaaagccgcagagcatagagtcttccctgcagccctgcagctggtggccagcggggccgtgcggcttggagaagacggcagggtccactgggccagagagcagtgac

SEQ ID NO: 327 - DNA, 3073 bp, Cricetulus griseus
atatgctacgatagccatgagggcagaagtgcagttgaccaagcaggtggtgcacagattgtaattgaccatttaaggtcgctgtgcagtataacagaccccgccagtgagaagctcttgactgtcttttgtggcatgctgatgaactatagcaatgagaatgattcccttcaagctcagctaatcaatatgggtgttatcccaaccttagtgaaattactggccactgccacaatgcagctcttacagaaatgtgtcttgtcgcatttgggaatttagcagaactcgagtcgagtaaagaacagtttgctagtacaaacattgctgaagagctggtaaaactattcaagaaacaaatagaacacgataaaagagaaatgatttttgaagttctagctccattggcagaaaatgatgctattaaactgcagctggtggaagcaggtttggtagagtgtctgctagagattgttcagcagacggtggatagtgacaaagaggatgatgctgccgagcttaaaactgcctcagatctgatggttttattacttcttggagatgaatccatgcagaagctttttgaaggaggaaagggcagtgtgttccaaaggggtgctttcttggattccatcgaataaccaccagctgcagcttgctggggcattagcaattgcgaattttgccaggaatgatgggaattgtattcacatggtagacagtgggattgtagaaaagctcatggacttgctcgacagacacgtcgaggacgggaacgtgactgtgcagcacgcagcactcagtgccctcaggaatcttgccattccagttgtaaataaagcaaagatgttatcagctggggtcacagagacagttttgaaattccttaaatctgaaatgcccccagtccagttcaaactcctgggaacactaagaatgttaatagatgcacaagcagaagctgctgaacaactgggaaaaaatgctaaattggtggagcgtttggttgagtggtgcgaagccaaagatcatgctggtgtgatgggagagtcaaacagactgctctctgccctcatacgacacagtaaatcaaaagatgtaattaaaaccattgtgcagggtggtggcattaagcatctagttaccatggcaactagtgaacatgtaataatgcagaatgaagctcttgttgctttggcactaatagcagctttggaattgggttccgccgagaaagaccttgaaagtgctaagcttgtacagactctacaccgactgctggcagatgagagaagtgccccagaaatcaaatataactctatggtcctcatctgtgctctcatgggatctgaatctctctacaaggaagtgcaggatttggcctttctagatgttgtatccaaacttcgaagtcatgagaacaaaagtgttgcccaacaggcctctctcacagagcagagacttacagtggaaagctgagaactgccgctcccagcacaaggcatcaccccagctgaccacccaatgttctccatccagctgcttcctcggctccatcctctcttgtgcatgcgtgtaatgttccagtaccaaccgaagaactctataggtacctgcctaataagatctctccacccatagttgatgtgaacacaactgtccaaacaagtctccacccataactgttatcctgtatccctggcgctcgagctacattaagtagaatgtgcatgttgtagccctatgatgatgtaaacttggtactacatgctgacttgctcttcacctgcagtaagctccataacaatgtactggtaaattagaaacaaagaatgcagcaggatctgtctagcttatttaaagatgaaactgaacagtaaaagtagcaccaaaaaagccgtatggctgctcactcattagtcttctactaatgtcaggcccattgtgcctagagttgaatagattcaatactcactctttccctatggtttctcctttttctgaactgtttaggcaatttgccaaacaacatggcaagacttcattaggcttctcattccatctttaactgagagcagtacagaggcccattgctgagctgttttcagtgtgatcagaacaaaggggttaaagaaaccctagcatgctggaccatgttggatcttgcccatattttacattctgatttgtgtgtggttacatctagaacttccatcagttaactagcaattgtccaacacgggtcgctaaaacttacttgccatatgtttcaaccaaggaaaattgagtacagcttgtttggtggagaatggattttcatctttcaggctgaaagtaaggagtttcatctttcatactccttttatatattgtgctactctagatggatataagaggaaacatgaagatgtaagcttgtctacattaaagaaaggaaggccagttttaaaagccatagtagccagtccggtacattttgcagatggcctcatagcagtcattgttaagagtctctcacctccacttgcccactgagaaccacagtaatctcacagactgcaagccaggactcgatgttagaaaccttcttggcaaaatgtagtgtgctcgtcactgccactaaccactaccaagtgagttttcagagctttgacacacaatctttgtaaattaatcaggactccctgtgacctaccttctagcacccaagtttgatccctgctaatatatatgggaaggtaggctcctttacaaggctggagggcagtgagaggggctgctgaacaggggaccagctccttcctccccaacaggagatataggtatctctgcattatctaaatcggactttggttttcacaattttaaattcaacaaagatttacttaaagtaagtacaaacctgactagcaattcccactgatggccaaataagggaacgattgtgactgcttgtgctacacttattgtaggaatgagctctttaaagtctttctcctgggctggataagtggactaatgttgcataattctgtccatattaataacttaacaaataaatagcatatgaaattac

SEQ ID NO: 328 - DNA, 3072 bp, Cricetulus griseus
gttagtggggggaaggttctagaaaagcggcggtcccggctccagcggcagtagcagcggcgccgggtcctgtgtgcaggtctttcccccgcggcgcggtttctcgagcggcggctgctcttccccccccacagcgtcaggacgagtcccgtgcgtgtgcgtccgcggaggtctttctcatctcgctcggctgcgggaaatcgggctgaagcgactgagtccgcgatggagagagaaaaggagcagttccgcaaactctttattggtggcttaagctttgaaactacagaagaaagtttgagaaactactatgagcaatggggaaagctcacagactgtgtggttatgagagatcctgcaagcaaaagatcaaggggatttggatttgtaacattctcatccatggctgaggtagatgctgccatggctgcaaggcctcattccattgatggcagagtagttgagccaaaacgtgctgtagcaagagaggagtctggaaaaccaggagcccatgtgactgtgaagaaactgtttgtcggtggaattaaagaggatactgaggaacaccaccttagagattactttgaagaatatgggaaaattgatactattgaaataattactgataggcagtctgggaagaaaagaggctttggctttgttacttttgatgaccatgatcctgtggataaaattgtattgcaaaaatatcacaccatcaatggtcacaatgcagaagttagaaaggcattgtctagacaagaaatgcaagaagtccaaagttctaggagtggacgaggaggaaactttggttttggtgattctcgtggtggcggcggcaattttggaccaggaccaggaagcaacttcagggggggttctgatggatatggaagtggacgtggatttggggatggctataatgggtatggaggaggacctggaggtggcaattttggaggtagccctggttatggaggaggaagaggaggatatggtggtggaggacctggatatggcaaccagggtgggggctacggaggtggttatgacaactatggaggaggaaattatggaagtggaaattacaatgattttggaaattataaccagcaaccttctaactatggcccaatgaagagtggaaactttggtggtagcaggaacatgggaggaccatatggtggaggaaactatggtcctggaggaagtggaggaagtgggggctatggtggaaggagccgatattgagcttcttcctatttaccatgggcttcactgtataaataggagaggatgagagcccagaggtaacagaacagcttcaggttatcgaaataacaatgttaaggaaactcttatctcagtcatgcataaatatgcagtgatatggcagaagacaccagagcagatgcagagagccattttgtgaatggattggattatttaataacattaccttactgtggaggaaggattgtaaaaaatgcctttgagacagtttcttagctttttaattgttgtttctttctagtggtctttgtaagagtgtagaagcattccttctttgataatgttaaatttgtaagtttcaggtgacatgtgaaaccttttttaagatttttctcaaaagttttgaaaagctattagccaggatcatggtgtaataagacaacgtttttcctttaaaaaatttaagtgcgtgtgtagagttaagaagctgttgtacatttatgatttaataaaataattctaaaggaaattgtgtaattatagactttttattttaaataagttaaggagtgggtagtataattaaggtccattgcaaagttgttgttgtatttgtgtaagataaaatgctggtcagttttaagtgtgttgtctgcaattcatcaggattaaattatctagttaacttaagggatatctctgcaaggagaaacacctttttagatcttttagatgctgcttcttcaatgcaaggaaaggaaataaccccagcgaggtactcttcagggacacaggtctagtacaagagaactcttgacgactaagctcagccagtcttaagaaactgtgctgtatctataaattgagtctaacataataaactcaagataattttataaaccctgttttccaatctgtcatttacttattattttggttttcccttttttccttctttctcaccccctccctttcatgaagattcaggtgcttaacatatcatttttttccctgctggaattttagcattgatatgaaccatggacaagtatattctgctgccacaaagactgtaaagtgcttcatttcaacagctgaggcaagccaagtgatcattaataaagcttttcttgcttccttcagtggtgttggtagtaaaatggtaggtaaaagttaggctgcaagttcaataaatgagatttacctatcattccacccttgtgtattttattcacctgtcctggatcaagcagtttgagtcaactaggcattagtgtctttactacataagaaatttttgtgcaacaataaaaagaaacccttttgtataccctgtactaaatagttgggttaaaatgtggttattttgcccattgtactacccaaaactgctgtaggttggctacggaaattcatttcctgaaactaccctctgacttctaggctttattgcctttccagaactgtgatactcagggcttatacacatcagtgagtctgctttaatcaataaaaaaccaccactgaagtttatttaggttctttggacaaacatgataaacttcttcagtattactttttttttcccttggcaggaaggtgtcttgctgcaggtaactaatgaagaagtggtcaaccacagagtcttcaagaaataagaaattctgtaccatctgaaagtagttcttgttggtgcctttaagaagcactttaaagataaaagggaatgttttctgattaaaaatcttgatttagtacaggttcttgataaaattacaaaaatgagtactgtttgtaaagagttaacatcaaattagctaaggataatgtattgtttta

SEQ ID NO: 329 - DNA, 3071 bp, Cricetulus griseus
ggtgtgttccttattccctatgtcctgattgccctggttggaggaatccccattttcttcctggaaatctcactaggccagttcatgaaggccggcagcatcaatgtctggaacatctgtcccctattcaaaggcctgggctatgcctccatggtgattgtcttctactgcaacacctactatatcatggtgctggcctggggcttctattacctggtcaagtcattcaccaccactttgccctgggccacgtgtggccacacctggaacactcctgactgtgtggagatctttcgccatgaagactgtgccaatgccagcctggccaacctcacatgtgaccagcttgctgaccgtcgatctcctgtcatcgagttctgggagaacaaagttttgagactctctgcggggctggaggtgccaggggccctcaactgggaggtgaccctatgcctgctggcctgctgggtgctggtctacttctgtgtgtggaagggggtcaagtcaacaggaaagattgtgtacttcactgctacattcccctacgtggtcctcgttgtgctgctggtgcgaggggtgctgctgcctggagccctggatggtatcatctactatctcaagcctgactggtcaaagctggggtcccctcaggtatggatagatgccgggacccagattttcttctcttacgcaatcggcctaggggcactcacagccctaggcagctacaatcgcttcaacaacaactgctacaaggacgccatcatcctggcactaatcaacagtgggaccagcttctttgctggttttgtggtcttctccatcctgggcttcatggccacagagcagggtgtgcacatctccaaggtggcagaatcagggcctggcctagccttcattgcctacccacgggctgtcacactgatgcctgtggccccactctgggctgccttgttcttcttcatgctgctgctgctcggtctggacagccagtttgtaggtgtggagggcttcatcaccgggctcctggatctcctcccggcttcctactacttccgtttccaaagggagatctccgtggccctctgctgtgtcctttgctttgtcatcgatctctccatggtgactgatggcggaatgtacgtcttccagctgtttgactactactcagctagtggcactaccctgctttggcaagccttttgggagtgtgtggtggtggcttgggtttacggagctgaccgattcatggatgacattgcctgtatgattgggtaccgaccttgcccttggatgaaatggtgctggtccttcttcaccccattggtctgcatgggcatcttcatcttcaacgttgtatactatgagccactggtctacaacaatacctacgtgtacccatggtggggcgaagccattggctgggcctttgcactttcttccatgatgtgtgtgcccctccacctcctgtgctctctcctcagggcaaaaggcaccatggcagagcgctggcagcacctgacccagcctatctggggcctccaccacttggaatacagagctcaggatgcagatgtcaggggcctgaccaccctgactccagtgtctgagagcagcaaggttgtcgtggtggagagtgtcatgtgacaggcacctccagctcacatcaccagctcatcctttggtagccatagcagcccctgctttagcctctacccattcctccagggggcctgcctttccttgacagtttgggggtctgccaggggggagggggaagaagcaccatgagtgctaacaaaaataactttttccattttcaataaaatgccaaaaatatcacaacccaccaaaaatagatgcctctcctccccagcccttagccatgctggtacttgcattgcttccaggccccacctcctgtccttccatgtccccaggacctatcttctagccttgccagccctacctgcctgcctcccacgctctgctctgtaacacaccttcacccaagaaacaacagtggcagcttggggaacaggagaggagggaaagaataaggtgggacaggagggggaggcaagagagggacagtggaactaaggcaaatgtttcagctggattagatccctcttcccaaccctattctagaagctagagagccagtcagcaatggaaccttgtgttcttgcgccaattgccaccaatattaattgtatgagcttgggtctgagtgtgtgtgtgtgtgtgtgtgtgtgtgtgtgtgtgtgtgtgtgtgtgtgtgtgtgtagaagatgcgtagatctcttatctcagtgaaggtgaataccagaagtaaacagagcctctgggcaaaggaggcttgtattttgcacattttataagaaaaaaaactgagtgagacttctgcttgtatatttctaaaaagccccaaccatccccaccctaccattcctttccttcacatccctaccttttttctctgaccctagccaaggagtgtgaatttatagacttaattttcataggtgaaacaagagcttcaggctgttgagtatgagtctgttgtgtggatgttttgtgtggtctccagcctgagactgaagtgggaaagtgggggcctcaagggtatccccatgctatccctttgcccctaagtttgtgtggggtagaaggctatagcattgtcccagggttctgggtctgctcacctagcatgctcaggcttgcccataccctgttccctgggctgggcatgattgcagggatcacccatggacacagcccagggaagggatcctgggcacagctcccacctctaagctaaaggctaatgtacttttgacatctcaagtcttccgtgtagcaggttaaactcacatctgtgtcccatcaagcctgagatagctaagtagccctagaaaggcatccttcacacagggctagactaagccagggaggtggggctggataagggtgcaggcctttggggacgttcttactgtgactaaaaaaaaagccactgcaaacatagcaataaagacacttcattttccaaaaaaaaaaaaaaa

SEQ ID NO: 330 - DNA, 3068 bp, Cricetulus griseus
ggaccgtgtgcatgacacaggatcagatcctagaaggcggtattttgctggcagatgacaatgagtccacctcacaaaacgtgtcacctactgaagtcctattcaatgtggaaactcccaacgatgtcctggatgagaagcagatcttcagcacacctgaaatacttgcagacacagactctgtgcaggccatcaatctgcccaacttcctgttttctgccactgaacctgaagacccaaagaagacaagtgatactggtgaccagaaggagcagcctgtggaggagagggtctccagagatgagagtcctaagaagatggggaagacaaggaagagaagccgaaagacaaagaacaaccgaagtacctcacctgtcactgacccagcatccccataccggaagaaatccaaggatggcaaaggcagcacattatctgtggagttcctcctggctcaagtggacccagcgagaaaaaggcatcttcaagttggtggattccaaggctgtgtccaagctgtggggcaagcagaaaaacaagcctgacatgaactatgagactatggggcgcgctctcagatattactaccaaagaggaattctggccaaggtggaagggcagaggctggtgtaccagtttaaggagatgcctaaggacttggtggtgattgaagatgatgatgagaacaccgaaacaccagaagtgccacctccccaggcttctacttcctccacgccctccaccagcaccatccggagagccagctccagggcctcaaacagagcttccgcccaagacaaggatagcctttcctgggagaagccaaaggttcaacacgctggtctccagccatctgcaagcctggagttaggactatctgtggatgacgaggtccccactacctccaccttgcttgtctctccaatacagagccaggccacgctcaccaaaactgtgagcacttcttcagtgcccagcaacatacacctaggagtagcccctgtgggaccgggctccactgtcaccctgcagaccatcccgctgactacggtgctgaccaatgggcctcctgccagtactactgctcctactcaactcgttctccagagtgttccacaggtgtcaacattcaaggacaccttcactttgcaggcctccttccccctgaacaccactttccaggagagtcaggttgcaacccagggagccccattgatcctcagtggcctccctcaacttttggctggggctaaccgtccgagcaacccagtagcaacccaggtcataggtgctggctcagcagggcctagctctcagccccctgggactgtcattgctgcctttatcaggacttccggtggcacatcagtgccaggggtaaaggaggggcccttgaggtccccctcatatgtgcagggtgtggtgaccggggcccctgtggagggcctgttggttcctgaggagaccctgagagagctcctgagagaccaggctcatattcagccacttcagagtcaggtgctttcaaggggttcccataacctgagccttgtggggagtcagactctctctccccctagccgccccactgttgggctaaccccagtggctgaacttgagctctcgtcaggctcagggtctctgtttgtagctgagcctagtgtgaccacatccacttcactcattaagatggagcctcatgacatataaacaaagagaacaaaagtatggcctaccaggcaaaagtgtgaagccttttcatgtagccttaagtagaatacctgcccttacatctagtggggtgtgatacatttgataccaagtcccgcaggccttgttctgacatcaccatgatcaaactatgcccagctcaagcattcctggcttcagcccatggccttcaagggcactagggactagatacgctcttagaaggataatgggttaacttagtgatgggggtaaaaccccaagccaggaaatagcttgtggacagaactggtcagaggccacatgagaagttaagcctggtcatactttgttgtctatattcccgacacagggaacttaccatccatatgtgaatatcttcgtatgtctttgtgtgtacttgtggctctcagctgagggccttcatctcccttccttgaatctgcttgcctctctcctaacagctttaggggcaatgttgagagatgttgggcccagaagcaactctaggctctggtgaatttggttaatgtgaaccagtgctccaggacccttgctatgtcctctgtgccaaagcacctatttgacctaactacctccctggctgctcttcattctcccctactgttctatctccttccttgggggaaggaaccatctgtggttatgcaggtgcgtttgctacgttcccggcagttggcactgaaatgtctttgctaataaaatcagcttatgatgttcccacctatgctctttttttttctgggttctgttcaactgaaatgttccctctcctcactaagaactaaagattgtgtctcgagactgagttttagtggaagcagccagttctttaagttcaattcttagacttgtaactgccatgtgatgggcaggtgactataaacagcctgtgacatctctgttgtaatcacaaactgttacgtagacttttaaatttagagtgttaaactagctaaccggttaactaaccctggctgacaagagttatggaagaggctagaggagaccctcaggacacaactttcttttaagcagagtcaggtggcaacaatagccctgcttttgtgatggtctagtgagtcaggaggcaagggatgatccacatttgccagcagctgatgtcttcccttgtctcggttcccacagcactttgtatatacctctcattgtagcacattgtatgtagttcttccattgtgtttatgtatggttcccctccaatagactgtgagctcctcaaggacaggggctgtgtgctagtcagtgatgtatccccagcacctagccacagtgcctgacacacagtaggtgctcaataaatgtttattgaaagg

SEQ ID NO: 331 - DNA, 3068 bp, Cricetulus griseus
ttgaccttcagcaggcgcacatctactgtgacccggagctggtgctggaggagggctgctgtgagatcttaccgggagggtgtcccccagagaccacaaaggcccgccgggatacccagagtaatgagctcattgaaatcaatcctcagacagagggcaaggtttatacccgctgcttctgcttggaggagccccagaacagcaaggtggatgcacagctgacgggaagaagcagccagaaggcagaaaggggacaaaggcccacggggatactgaagtcaatgagtgcccgccctgtgtccacggtgcccaggagagcaatgtcacacttggtccttctggccaaggcgagaagggtgatggaggcctcaaaggattaccaggaaagccaggccgagatggtcggccaggagagatctgtgtgattgggcccaaagggcagaaaggtgaccctggctttgttgggcctgagggactggcaggagagcctgggccccccggcctcccagggctgcctgggataggactgcctggaactcctggagatccaggtggaccaccaggccccaagggagacaagggcagctctgggacaccagggaaggaaggccctggagggaagcctgggaagccgggagtgccagggactaagggagagaagggtgacccctgcgaagtatgtccaacgctgcctgaagggttccagaatttcgtgggactccctggaaaaccaggtcctaaaggggaaccaggtgatcctgctccagccagggaaggcctagggactgttggactgaaaggtgaccggggagatccaggcatccaaggcatgaaaggagagaaggggaaccctgttcatcctgcagttcaggtgtgggggcccagcatcttgggccctcggacagcccgggatcactgccgagctgggatccttacccattgagcagcacctccttaagagcatctgtggagactgtgcccagggccagacggcccatccagcctttcttctggaaaagggagaaaagggcgaccagggcatccctggcgtgccaggctttgacaactgtgccaggtgcttcacaggaagggagcgcccaagagccgaggaggccaggggagacaacagtgagggagaacctggctgtcctggaagccctggcctgcctggtcctccaggggtgccaggccaaagaggagaagagggtccacccggtgcgaggggctctccaggtcctccaggacctattggcctgcaaggagagcgaggcctcacgggcctgactggagataagggagagccgggtcctccaggacaacctggctacccgggtgctatgggacccccgggtctgcctggcatcaagggagagcgcggatacactggccctgcaggagagaagggcgagtcgggcccaccaggatctgaaggccttccaggtccccaaggcccagcgggtcctcgaggagagcgaggcccccaggggagctctggtgagaagggtgacccgggatttcaaggccagcccggctttccaggcctaccgggtcccccaggattcccaggcaaagctggagcccctggcccacctggcccccaagcagagaagggcagtgaagggattcgaggtccatcaggcttgcctggttcccctgggccaccaggccctcctgggattcagggccctgctgggctggatggactagatggaaaggatggcaagcctggcctaaggggggacccaggtcctgctggccctcctggactcatgggacccccaggtttcaaggggaaaacagggcatcccggcctccctgggcctaagggtgactgtggaaaaccaggtccccctggaagcagtggccggccaggtacagagggtgagcctggcgccatgggaccccagggacgaccaggacccccaggtcatcttggaccacaggggcctccaggccagccaggcccacctgggatctccactatgggcctgaaaggagaccggggagcccctggagaaaggggcttggcaggcctcccaggccaacctggcacccccgggcaccctggccctccgggtgaacctggttcagacggtgcagctggcaaagagggacctcctggaaagcaggggctctatggacctccgggcccaaagggtgacccaggacctgcaggacagaagggccaagcaggagagaagggcagatctggcatgccaggggggcctggcaagagcggttccatgggacctgttgggccaccaggtcctgcaggagagagaggtcaccctggttctccagggcctgcagggagccctggattgcctggtttgcccggctctatgggagacatggtgaattatgatgacatcaagaggttcatcagacaagagatcattaaaatgtttgatgagaggatggcttactacacctccaggatgcagttccccatggaggtggcagcagctccaggccggccagggccccccgggaaagatggtgctccaggccggccaggtgctccaggatcgcctgggctccctggtcagataggaagagaaggacgccagggtttgccaggaatgagaggattacctggcaccaaaggtgaaaagggagacatcggtgttggcatcgcgggagaaaatggtcttcctggccccccaggtcctcaaggacctccaggttatggcaagatgggcgcaacagggccaatgggccagcaaggcattccgggcatccctggccccccaggtccaatgggccagccggggaaggctggtcactgcaacccctcagactgctttggggccatgccaatggagcaacagtatccacccatgaaaaacatgaagggccttttggctgaaaccatcacctgcacagagacaaaggactccattaggaataaatgggcaaagcttacagactctgatgggttgtgaatgtttgtgctattcttgtttgttgttgttgctgttaatatttttttaacaataaagaaacgaaactatttgtaaccccacttccatggggttcccctggtgctgcaaaaaaaaaaaaaaaaa

SEQ ID NO: 332 - DNA, 3063 bp, Cricetulus griseus
ctgctgcttttgggctggagtgactgcggtcgcggctctgggctgggcagatggcagcggcggcagtagcggcggggactggagccccggcgggcaccgagtcggcggagggtgccccagggccagcggcggcgttggagctgtggctcaacaaagccacagacccaagcatggtggagcaggattggtcagctatccagaatttctgtgagcaggtgaacaccgaccccaatggcccaacacatgcgccctggctactggcccacaagatccagtctccacaagagaaggaagccctttacgccctgacggttctggagatgtgcatgaaccactgcggggagaagttccacaatgaggtggccaagttccgcttcctgaacgagttgatcaaagtattgtccccaaagtacctaggggcctgggccacggagaaggttaaaggaagagttatcgaaatcctctttagctggacagtctggtttccagaagacatcaagatccgagatgcctatcagatgctgaagaagcaaggtataataaagcaagatcctaaactaccgatggataaaatcttacccccaccttctccctggccaaagagctccatctttgatgctgatgaggaaaagtcaaagcttctgacaagactccttaagagcaaccaccctgaggatcttcaggctgcaaaccggctgatcaagaatttggtcaaggaggaacaagaaaagtcagagaaggtttccaagcgagtcagtgcagtggaggaagtacggagccacgtgaaggtgctgcgggagatgctgagcatgtaccgcaggcccggccaggccctgcctgaccaggaggccttgcaggttgtgtatgaaagatgtgagaagctgcggccaaccctgttccggctagcaagtgacaccaccgatgatgacgacgcactggcggagattcttcaagcaaatgaccttctcactcagggggttctgctgtacaaacaggtggtggagggacgagtcaacgtggggaatgcagtggccgctccagtgggagaagttactgtccctagagtttttcctaatcaagtggcctgtgggaagaactgccccctcattgacctggagggaccctctttgcttcatcaggacctggcagccttagggatcagcgatattcccactacgaccaaggttgtcattccaagttgctgtaaagacaagaaacagcctgctgccatcacactcctggggggtgcagttgagagcctttctgctgacaggaacttgctggatctcctctcgccacagccaactccaggaccactgaattatgttccacaaaaaagcatccccaaggaagtgccaccaggtaccaaggcctctccaggatggtcctgggaggctggaccactggcttcttccccagcctcacagaatacacctctggctcaagtgtttgtccctttggagtctgtgaaacccagcagcctgccgcccatcatcgtgtatgaccgcaatggcttcagaatcctgctgcacttctctcagaccggggcccctggccacccagatgtgcaggtgttgctgttgaccatgatgagcactgccacccagcctgtctgggacatcatgtttcaggtggctgtcccaaagtcaatgcgagtgaagctgcagccggcatccagttccaagctccctgcattcagtcctttgatgcctccagctgtgatatctcagatgctgctgcttgacaacccacacaaagaacccctccggttgcggtataagctgactttcaaccagggtgggcagccattcagcgaagtaggagaagtgaaagactttccagacctctctgtcttgaggactgcctaactcctcaaccgagactcttcagttacacttaggccagcgttcctttcactgtctggtcgggactcattgtgatgtgttgcagagtgccaagagttctcttctgatgtcagaccttgattgccaatctctgtagatcatgtgtgtgtgtgcgtgtgtgttattggggtgctgggggaggagggagagctgggcttgggatttgggtagtgtgggggatgctgacaatttctgagatcatctctgctgcactcatttctgcttctgcatgttggttgacactgttgtccctgcctcgggttggagttttatataagccaaagttttttccatgtattgttatcttttcattcatccactctgtgccttgtcagcctttgaaagtcttagttgctcccaggctgctattctcagggaccttagaaagggacctggttggtcttgtgacagagtgtgtcttctggggcacactcttccaagaatggccttgtcttcattttcattagggaatgctgcttgcagatgttcagtaaaatctaaatggaatgctcattgcactggttccagcaaggggctgccatgagaccaggagaccacacttggtgggccaatcatgtccttcactacagtgccttagattctcccttagatggactctctgaggccttgctcaggcctcgggttctgtggattgggcagcctgtctgggcccttactcaggacccacaacgtcatcctcattctttctgttcacaaacatctcaaagctctttcattgtgaccctgtgttccttgttgtaaatcacagctagctggctagtcccatgaccctcacaatccaaggtggagaactgtgatgcaggtagagagccatgtgatgactaagtacagaacgtcattgaataaatactgtgtacaaatttgcctggtgttgagtccatagggaatgcatttagaggtgacaggctggaagacacccgtcttctgttggcaagtgaggacataatgaagagcagtgttctgacaagctgtggaagctggagaagagggttgggtatttgcttcaagtgtaaccagaatgtagccctggctggcctggaattcactatgtagaccaagctgtggtggtgcacgcctttaatcccagcactctggaggcagaggcaggcggatctctgtgagtttgagaccagcctgg

SEQ ID NO: 333 - DNA, 3061 bp, Cricetulus griseus
gtgtgtgagtccggacccggtcccctctcccgccgccgtcatgggctgcacgttgagcgccgaggacaaggcggcggtggagcggagcaagatgattgaccgcaacttgcgggaggacggggagaaagcggccaaagaagtgaagctgctgctgctcggtgctggagaatctggtaaaagtaccattgtgaaacagatgaaaatcattcatgaggatggctactcagaggatgaatgtaaacagtataaagtagttgtctacagcaatactattcagtccatcattgcaatcataagagccatgggacggctaaagattgattttggggaagctgccagagcagatgatgcccgacagttattcgtcttagctggcagtgctgaagaaggagtcatgacttcagaacttgcaggcgtgattaaacggctctggcgagatggtggggtgcaggcatgtttcggcaggtccagggagtatcagctcaatgattctgcttcctattacctaaatgatttggatagaatatcccagaccaactacattccaactcaacaagatgttcttcggacaagagtgaaaactacaggcattgtggagacacacttcaccttcaaggagctatacttcaaaatgtttgatgtaggtggccaaagatcagaacgaaaaaaatggattcactgttttgagggagtgacagcaattatcttttgtgtggccctcagtgactatgaccttgttctggccgaggatgaggaaatgaaccggatgcatgaaagcatgaaattgtttgacagcatttgtaacaacaaatggtttacagacacgtcaatcatcctctttcttaataagaaagacctttttgaggaaaagataaagaggagcccattaacaatctgttacccagaatacacaggttccaatacgtacgaagaggcagctgcttacattcagtgccagtttgaagatctgaaccgaagaaaagataccaaggagatctacactcacttcacctgtgccacagacaccaaaaatgtgcagtttgtttttgatgctgttacagatgtcatcattaaaaacaacttaaaggaatgtggactttattgagaggatggcattagtaaaagttactgcaatgagtgttgagaccagacatcatctgctgtctcttgggtcagctacaagcatggcgggaccagggaatggcagcagcatgcagaatcttagcactctttagcacaatcttctgtattagggaatgtttagttggcatgagatgttcaaatcagacatcggaattggaacaactgtaaactgtggttgactcatcaaggcatcacttggattttatattctcaaatgtttagggcatattgaagtcgaggtgctgcattccagaacttaaatatgtagctcactttttttcctcttttaaacaaatcacccgtagttaatttctaaggtttttctcatcaagagaagaaaaactaaaaaatcgtgcttgtttgcaaaagaatcttgaaagaactcagtcttaactatgcacatgatgtgaccagacatcttgaaaatattcctcttagtaggaactgtttgtttttagctcttggtacggtcagacgcaatatttccataattaaaattcttcctggttattgggactacgttaatatagcttttctgactgaaatgtatgttactgttatgtttaatgtgccacgatggcttctaacagcaattacttggagagttctacagtatgcgtttagctctcatttctttaagcttatggttggaagtttaaccttgtttatgctgattaccaaattactagtgaatactgacgtaatatgataaactcctcttcttggacacacccaggatagctgtcaattagatgtgcaaactgctaaattgagaaccaatgacttgctgctacagatctactaaattgaccactttgagtcttgtctgtttgtctcagtcatagggaattttgtataaggtgcctcttgttttccatctctgtggcctttttggttgggagacatctcaagtgtattaacagtgtgtgcttttcttttgtaaatgtggtgccaaatccctgtttgccatcgtttttactgtagcaatgctaattgtagtagtgatccttagttagtatgttctttttctaaaacttgcattttggaacttttttccactttgtcatgtgtacagattttaatctgttacagctggcagcagtattaaaacagtgagtaaagagtccaggtttgctctgcttgtaactggtcctttctggaaatcctgtctaaagtctagttcttcaatgtagtaatattatcaaatctaggactgagggctttatgtccagtctatgtacaagggatatgagtcataattagcttctgatttacattctgcttgtgctgagagctacagttcttttgtacaatatttagcaaatgtcattaacactgagtggatcactgagggatggcaaacagagaatgcattttgagcatttcagatcagtagttggagcagtgccttttgaggtccagtcttttcagattggatccgtttcatcttttgatgttacctcctactcatttaaaaggttgatggtcagaactgctttggaaagcaagccacagtgaccagtgcctttgctggcagcttttaaaatttttaattctcacagaaaatcattattatgcagacagtataactattatctgacaagcatttctttagggctaggaaaataccatcggaaagaaagaaaagtgttgatttcagtcagcaatggacttaattcccacagtgtaggggttcctaagtcttactctgaatttgtcttttctttattgtattctgtaatataaaaacatgtgaaatgttgttttcataacttttctatactttgggattagtgaaatggtgttgataattaaaataatagatatccaaatttaattttactttagaatgcattttgtattttcatttgaatctgtctatttttaaacctttctattaattaaaaatacaagttct

SEQ ID NO: 334 - DNA, 3059 bp, Cricetulus griseus
ggaggcgctgtctgcacggcagcgtctgaaaactgggcaaggcagcctttctgcatgtggtaggaagaaggggaaggctgacggtgctccacagccactgaggcccgaacacttcactaaggaagttcacacagcacaatggggaggacttagatgatggcacttgtaaaactgaagggttccttgtcaaagaagatcagagagatctcagtgagtctcaggatgtggcacttgtacagctacataaaccaagggacccagcttctctgcatgatggagagaagcacagagtgatttccactgctctcctagaggacagtgttggtgaggtagatgtgagtgagtgtgacctgtctattgaaaagctgaatgagaccatcagtacactgcagcaggctatactgaagatctcccagcagcaggagcagcttctcatgaagtcccccacagtgccaacaccaggcgctaaaaataacctgccaggaccaaaggtaaaggccccagtccactttgttgagccactctctccaactggtgtgcctggccaccgcaaacccccacggcttggccaggccggaactccgtccggaaggccagctgaactgaaggttccaaaagacagacagcagggttgttcccggagcaaaaccccaacacccagtatggaaacactcccacatcctcggtctttgcccccaagcactcatccacggtcaccctccgatccaggtggggaaccccctgagaagtgtctctttgacagttataggctccatgatgagagcaaccatcgggcatttgttctgtcctcttgcaaagatgcaaacattgtatcagagaggctcgagcacgcaagcagcagctggaggctgaagtggagctcaagcgagatgaagcccggcgtaaggctgaagaggatcggctgcggaaggaggaggagaaggctcggcgagagctcattaaacaggaatacttgcggaggaagcagcagcaggccttggaggagcaaggacttggcaaacctaaatcaaagcctaaaaagcctcggccaaagtcagttcaccgagaagagtcctgtagtgactctgggaccaagtgctcctccacccctgataacttgagccgcactcactctggctccagtctctccttggcgtctgcagcaacaacagaacctgaaagtgttcattcagggggcacaccttctcaccgagtggaatcactggaagccttacccatcttgagccgcaaccccagtaggagcacagaccgagattgggagactgcatcagcagcttcttctttggcctctgtggccgagtacacaggtcctaaactctttaaggagcccagtagcaaatcaaacaaaccaattatccacaatgccatctcccactgctgtctggctggaaaagttaatgaacctcacaagaattcaatattggaggagctggagaagtgtgatgccaaccactatatcattctgtttcgagatgctgggtgccagttcagggcgctttactgctaccaacctgacactgaagaaatctacaaactcactggtactgggccaaagagcatcaccaagaagatgattgacaaactgtataaatacagctcagaccgaaagcagtttaacctgatcccagccaagaccatgtccgtcagcgtggatgcactcacaatccataaccacttgtggcagcccaagcggcccacagtgccaaagaagaaccagactcgtaagtgaccatggcaaccaggactgagaggatgcgctggcgggatccttatttattatttttatccatttggtacgaagtgtgaggagccacggacagtgtttacagaggttcctacagaacagagaagatcctctcacccctgcacacatggatgctgggcacggagcatacaggagtgagtgctgtgctttcctgggcacggctgctgtggccctgctgaccactgacatccccagaataagggacatcatggagtgaggtcctgggctgtggaccccctcacttgaagttcttcaggataagttaaatgtgatctgctctctggcctcccctcacccacccctttgcacattgcctgatgccctatgttggccagctgtaatcgtgcgtgatagagggccgaggctcgctctcgggtcagggtgtttgaatgtcttcataaaaggagttcgtatgggaaatctttttcattttagagattgtatgatatttattgactgtgtctactgccaacctttatatccagttctaagatttctagaaaaaaaaaaagaaaatcctgttccttgctgctcagaaaaagtttactgaaaatgccagttcactaaaagcactgaaatcaagcaaagtttgtcttctgctaaaatgacgtttacatatttggagtgattatttctaccacacagtcgggagggttgtggggtactggtagctgatgctggcctcgttggaagcaggcagcctaagctggctgcagccaccgctggttaggtctggggaatgtgctgatttgttcactttaataaaggacagattttggtatagtagagtgttacccctggcactgccaggtagacagacgcaaggagcatggcacaggaactagagagtgtgaggttgttatcttcctcttcccttggcaaccgtgtgtccagtcaggggtggcactgtgctgtatgagcattaacgtctgtgactgcctgtcaccagctgtcccccatgtcttcatttctcactgtgcacttgatgttaccatatttattttaagagagcactaaaatgtaataaagcaatgagctggctttctagttaaccatgtgtgtggttgtcacaactccttctgctgacagtgtccccagcaactggcttccaggcagctgcacatgacttttgtgttgccttgggatttgattatttttcatgaagagttggaagacctggtgtagagccaggaagtttgcttttgcacgcaacttctgatgtgatgagtaagcacgtggcctgtcctgaagaccatctcagaatacaggatct

SEQ ID NO: 335 - DNA, 3057 bp, Cricetulus griseus
gatgattccaaagacacttggaaaaagaggggaagtgtggactatgtggtactgctcgactggtttagttcagcgaacgatttgctgcttgggaccactctgcggagtctaaaagatgcacttttcaagtgggaaagtaaaaccgtcctgcgccatgagcctttggtgttggagggaggctatgaaaactggcttctttgctatccgcagtatacaacaaatgctaaggtcactccaccccctcgaagcaaaactgaagaggtgtctgtctcattggattttacgtatccttcactggaagaaccagctcctcccaaacttcctgcccagatgcctcttccacctatagaagtagatgaaaatgcagaattggtaactggccgagatgaaaaaccaagaccactgaaccattcagctctagctggaccaagtgcccctcccacagctgaagcttcacccataattcagccaatgcctgctacaaagactgttccacaggttgaccgtacaaaaaaccaacagtgaggttgcctgaagatcatagaataaaatctgaaaatacagatcagagtggaagagttcttcctgaatcgttccaccaagccagtatttccccctccaactgccatgttaacagatgaagaaaaggcccgtattcatgaagaaatcgcacttcgcatggagaaaaacaagcaggagaaggaactttgggaaaggcagcagaaggaacagaaagagaagttgaggagggaggaacaagaactcaaagctggaaagacaaaggactcagaagaacatgacatcggtgagaaccaaccaaaggacggactagagaagagagacagcaagcagaccaagatggaagaaaaagagccctcagcagacaggggccaggaagaagccacaggaacaaaaagaccaagtaagagtgaacatgaggcttctgatgccaagatgtctgtggaaggtaaaaggtgtcccacgtcaggagtgcagaagaggccggcagatgtgtcccctgtgtctgtgtcaggagagctgagtgcaagcaaggctcaacgagaacctttgacaagagctcgaagtgaagaaatggggagaattgtaccaggactgccttcaggctgggccaagtttcttgatccaatcactggaacctttcgttactatcattcacctaccaacacggttcatatgtatccaccagaaatagctccttcctctgcacctccttccacccctcctactcacaaagtcaagcctcaaatccctgccgaacgggacagggagccatccaaactgaagcgctcctactcatccccagacatcactcaggccctgcaggaagaggagaggaggaggccagcagtgaccccgacagtcaaccgggaaaacaagccccccaaaagctgagatctcgagactttctgcttctcagattcggaacctcaatcctgtttttggaggatctggaccagctcttactggacttcgtaatttggggaatacctgttacatgaactcaatattgcagtgcctgtgtaatgctccacatttggctgactatttcaaccggaactgctaccaggatgacatcaacagatcaaatttgttggggcataagggtgaagtggcagaagaatttggtataatcatgaaagcgctgtggacaggacagtatagatacatcagtccaaaagactttaaagtcaccattgggaagattaatgaccagtttgcaggatccagccagcaagattcacaggaactgcttctgtttctcatggatggcctccatgaggatctaaataaggctgacaatcggaagaggcataaggaagagaacaacgatcacctcgatgactttaaagcggcagaacatgcttggcagaagcacaagcagctcaatgaatccatcattgtcgcactttttcagggtcagttcaaatccacagtgcagtgcctcacctgtcacaaaaagtctcggacatttgaggctttcatgtatttatcattgccgctagcatccacaagtaaatgcacattacaggactgccttagattattttccaaagaagaaaagctcacagataacaacagattttactgcagccattgcagagctcggcgggactctctaaagaagatagagatctggaaattgccgcctgtgctgttggtacacctgaaacgattttcctacgacggcaggtggaagcagaagctgcaaacatctgtggacttcccgctagaaaatcttgacttgtcacagtatgttattggtccaaagagcagtttgaagaagtataacttgttttctgtttcaaaccactacggcgggctggatggaggtcactacactgcctattgtaaaaatgcagcaaggcagcgctggtttaagtttgatgatcatgaagtctctgatatctctgtgtcttctgtgaagtcatcagcagcttatatcctcttttatacttcagtgggaccacgcataactgatgtagccacatagaggtataggttatgggcatgttggtgtttcaaatcacagaggtgcatctcctaatgcttacaaagataatggatcgctgcgactggctgtgtagaggaattccagaatactgggggctgttattagcaccatataatcaggtcaatgctgtttatcaaaaacaaaaaaaaaaaaaaaattcattagccagacatttattattctgttgttatcaaaccattataaccctcatttcctattcactgctatagccttttctcatttttagtcccaggtcaatccactatggatactctagaatatctaacgcagataggaatgtatatgtacatatttattgcactcttgcacatcagatcgctgtacatagtttaacatgtccttctgtgaaaagcctagaagggtatttttttttttcttttggccttttctaggtagctgcagtgctttcttggggaaatgacaaggcaaaactatttttctgttggctttgggctgtatttgtgcactaaagttttaatgaagaaaaaaaaaaaaaaaaaaaa

SEQ ID NO: 336 - DNA, 3056 bp, Cricetulus griseus
tggctgtcgagccattcttaaaggggcccgagtagatcctacggcaacgggccgctgacggccggaaggaaaatgagtgagtctttggtggtttgtgatgtttctgaagatttagtggaaaagctgagaaagtttcgttttcgaaaagaaacccacaatgctgccattataatgaagattgacaaggataaatgcctggtggtactggatgaggaacttgagggcatctccccagatgaacttaaagatgaactacctgagcggcaacctcgcttcattgtgtatagttataaatatcaacatgacgatggaagagtttcttaccctctgtgctttattttctccagtcctgttgggtgcaagcctgagcagcagatgatgtatgctggaagtaagaacaagctagtccagacagctgagctaaccaaggtatttgaaataagaaacactgaagacctaactaaagaatggctacgggagaaacttggatttttccactaatgtgaacatctgtgtttctaaagtatttatgtattaacctgaccatactggaaccagacataaatagttaatttatgcctaaaaatgcactgttacttacagtttgtttcctgcagtaaagaaaacttcttcatttgtgcagtttgaacaaaggggaaatcatcttcatagtaatggaactttgtgaagcatttccttgtgtttgtcattattaggtggacactttcctccaggggtggtttgtcacccttgtgactaatttctataatttatgattcagaatttactgtttgcagacactgttgaaaggtgggtattagactgtgatagacaacagttcctcctctgaccactactgggcgctgctggcagtttctaagtgcaaatagcattttatcatttgtcacatcatcgaggttcatttggggctaaagtcttaaagtgaccgattttgagccaagagtagtgaattagtagaacctctgttgcactttccgtaagttttcattctctcttaatatgtcaatactgtgcctttgacttgtcagcattaacgttagcttaagacttctacactgccagtattctagatttggtgaaattaataatttttaaagggttcaagtaaaacaattttctaatatgtataactgaagtttgtaataaaaccaacttgttgtttttaaaaaatccaactatctgcccaaagtcgtgaatatatggtggtaagagttataatttggggtatatttactattagttttgtgcagtatgtaagcattatttaaaactttggtcatagttaataacaacacatcaatagatgtcatacattttatcctaaatgccagaaaaaattctaatatggacaaagccagtcatgttagatggtggcaccagggttaggaagcaggacttataatctacttaagtgttattacattacgcttaagaaaatatgtcagaaacagttttagaagtttccaattcttagcagctttctttttgaagcttgtccaaccttcccagtaagtgtgcgttttgtaaggcagcacattggactggggcatcaacagaacctttctattctgtctgtccttaggcagctttgtaagtcccatggtccaaaggattcccaaatatttatggaagtttccctttagctaaaatttacattcttttaaagtatttttattattccttttgtacctttccataaagagtatgtccaggtttcttaattccagcttttacactccatgtctttctggaacaaccattcccattcagccttaaatcttaatctttcctttttagaagccactctttccaggaacctctttagcatttggttcggaaatttctgattttatttaagttgtgcatagcatctaatgtcaaaaccaacaagaatcacaatgtgtgtttaattaaaagttttggtgactaaataagtgacgtatgaagaaaggtgttctcaggttactgtgctgaaattccaaaatgtctgagttttgaacagtaatcactttgttctgatattgaagcaaatatgttaagaaaaaagctggttggctgttttgtttaattgacttctaaactctgtttgaattgtctatctggggagttatctggatgcctaatgcagctaaacattctcaaataatttgtagcaaaattgtgtgtgagcattttgcctccctttttgtctcctattttcaggagccaaacttagccataaactgtatcctggtctgctactttcactaacagtttctagttagatgagtttattgccaaattaaacttggctcttatcccacccagatagaaactaaggaagatggacagaagaaatgttcagacacttgtaaaactcatgtgacaacatcaatctgtatatgaactagtgaatagatattttcataagggttgaaatgccaatatttgggaagtagagagtagagtatattctatcagttctattgggtgttaatatggctgtactccttatttgttctgtagactgataatactggaatccataaagtttgagcttaccttacgtgaagaaatgttgcaaacatttctggatgaaccttattttgtatttctggaagagtataaatatctcttaggcctcttcattctgatggttccaaggcagatgtttcttgtgaggccatttgacatttcagatcagtgatcatattcctgtaatgtttaaaacaattacattaagcttgtgataggaacaatttcttgttttttagaatataaatacttgaatattgtttgagatcactaacatgccaaggcaaatcccactgactttgatggtccaatataatctcattcaggaggcttgaaacattggtggtttagtcttgtgaactttaacagttctctgtcattctttaagaaaaccaacaactggcattactcctaagctgtggtttcagtctctgctagttcataccgcatgtttgtttattttggagtcttttggtaagcatggtgcttgtactggtttaaataaaatgctaacatgaaag

SEQ ID NO: 337 - DNA, 3052 bp, Cricetulus griseus
gtggacccctgatcaggacgcatctaggagtaggttgagaaatgcacaagaaaaaatggtatactctctggtctccgtgcctgaaggcaatgacatctcctccatctttgaactagaccccactactcttcgtggaggtgacagccttgtcccaaggaactcctatgttcgtctcagacatctgtgtacaaatacctgggttcacagcacaaacattcccattgacaaggaggaaaaaaaaacctgtgatgctgaagattggtacctctcctcctgaaggaggacaaaggaggcattcgccatagttcctgtttctcctgctgaggttcgggacctggactttgccaatgatgccagcaaggttctgggctccattgctgggaagttggaaaagggtaccatcacccagaacgaaagaaggtctgtcaccaagctgctggaagacttggtctactttgtcacgggtggaacgaactctggccaagatgtgctggaagtagtcttctctaagcccaacagagagcggcagaaagctgatgagggaacagaatattctcaaaacagattttcaagttgttgcaggcccctttcacagactgtggggatggcccgatgcttcggctggaggagctggggggaccagcgccatgcgcctttcagacacatttgccgactctgctacagggtcctgagacactcacagcaagactacaggaagaaccaggttgctgtatcttgctgatctgtgccatgggcctcttcgtacatgagttcttctatagtttgctgctttttgattttagtgtacagagaagagactttgcttaatgtcattaaaagtgtcacccgcaatggacggtccatcatcttgacagcggtcctggctctgatcctggtttacctcttctcaatagtgggctatctgttcttcaaggatgactttatcttggaagtagacaggttgcccaatgaaacggctgttccagaaactggcgagagtttggcaaatgatttcctgtactcggatgtgtgtagggtggagacgggggatgaactgtacctctcctgcacccaaagaagagctgctccctgtggaagaaacggaacaggataaggagcacacgtgtgagacgctgctcatgtgcattgtcaccgttctgagtcacgggctgcgaagtgggggtggagtaggagatgtgctcaggaagccatccaaagaggagcctctgtttgctgcaagggtaatctacgacctgcctcttcttcttcatggtcatcatcatcgtcctgaacctgatttttggggtcatcattgacacctttgctgacctgaggagtgagaaacagaagaaggaggagatcttaaagaccacatgcttcatctgtggcttagaaagagacaagtttgacaacaagaccgtcacctttgaagagcacatcaaggaagaacacaacatgtggcactatctgtgtttcatcgtgctggtgaaagtgaaggactccactgagtacaccggtccagagagttatgtggcagagatgatcagggaaagaaaccttgattggttccccaggatgagagccatgtccctggtcagcagcgattctgaaggggaacagaacgagctgaggaacctgcaggagaagctagagtccacaatgaaactggtcaccaatctttctggccagctgtcggaactaaaggaccagatgacagaacagaggaagcagaaacaaagaatcggccttctaggacatcctcctcacatgaatgtcaacccacagcagccagcctaagcaaaggagatgggggggactatactcaccctctttaaattattatcagcattgggtatggcccattagttctcattcgcccactaaggttacatgtgaatactcagttttgtattgtatgtatatgattgctactctcagaggtttggacttatgtattgtaattagctctgttggcatggtgacttgtctactagtgccaaaaatattaaaaatgccttttttggaaggactacagaaagtacctgatttgcacttgaaccagattatagatttaaaagtatatgacatgtattttgtatttaaaactagaatagccagtatttatgttttttataaaactgtgcaatacaaattatgcaatcaccataactttgtaattcctgagtgtcctacagggagtgcgcgtctttgaagctgatatgttaatacttatgtaataaatggttaaatatcaaatgatgctgctgccaaaattatattaatagcgagtttctggcccctgggcaattttgtaccttataattatcctacggttatgctgtttttcattgctaatagcattggtgccctgtctcctagtgataactccaggtctgtgaactgttcaaacaacattcattttaagaaaagcaactttagttttgagaataattttaagcttcaaaattagtcatttaaggtatttctttaagagagcgatgttagaggataacactttagcttggaaagaagtcaatgaattttttaaagggaactttttccatgacatttgggatacagcatattgctggccattaagtgtcatctccatggttaattttgatgtcacatgatagtcaaatgagttagtgatggtttctagattttcttcatcgaaacaacatgatactgtaggtgagaggttattacgaatatatatatatatacatccacattaagacaaagtaggagctatggccttaggatgcatagctgcccccttacggggcatagttgaacactgacagtgctgttcttctgaaagaaccacgttttggttttatttctatgtcacgtgatttcttttctggatgggtgcaaagtataacaggaaatgttttctacctgttgcctcgttttgtacctgggtctcgttttgctaggccatctctacacaaaagtttaaaaactgaactgtaagcagagttctgaagcaagtcaagtttgtaaatgcatacataattatatttaataaatgatgcagaatactaaa

SEQ ID NO: 338 - DNA, 3051 bp, Cricetulus griseus
gaaaaaggacaagatggaagacctcattgggaggctgaaggaaaaataatcagggaaaaatgtcaaggggctcacattgtccttgaagttcctccctatcataacccagcagttacagctgcagtgcaggtgcacttttatctttgcaatggcaagaggaaaaaaagccagtctcaacgttttacttacacaccagagttgcagtgtggggatgagggtgctagtaaagaacagcacataataccatcttcagtcatgcaccagccttttcaagttacatcaacatctcctatggggtcttcctatcagtctatacaaactaatatgtataatggaccaacatgtcttcctatgaaccctgcctctagtcaagaatttgatccagttttatttcagcaggatgcagctctttctactttagtaaaccttggctgtcaacctctgtcgccaataccatttcattcttcaaattcagatgcaacaggacatctcttagcacattcacctcattctgtgcagaccccacctcatctacagtcaatggggtaccattgttcaaacacaggacagagatctctttcttctcctgtggcagaccaggtcacaggtcagccttcttctcatttacaacctattacatactgtccatcacatccaggatctgctccagcagcttccccagcagcctctcatcccctggctaattcaccgctttctgggccatcatcttctcagctgcagtctatgccttatcaatctcctagctcaggaactgcctcatcaccatctccagctaccagaatgcattctgggcagcactcaactcaagcacaaagtacaggccaagaaggtctttctgcactttcatctttagtatgtcacagtttgtgtgacccagcatcatttccacctggtggggcagctgtgagcattaaacctgaacctgaagatcaggaacctaactttgcaaccattggtctacaggatatcactttagatgatgtgaacgagataattgggagagacatgtcccagatttctgtttcccaagtatatatatatatatttaaataggatacttttatatgatgggtgctttgagtgtgaatgcagcaggctctctatttcagaggtgctgcttttgcaggtgacctggttgcatagctaggattagtaatttgtactgctttctggtcatttgaagagccctttagtcttgatatttttaaaatatgaaattttgataaaaaaaaccttccagaaggcagacaaaaaaaattaatcctaagcccacacttagacctcagaaacttagcatgcgtcctgaagcctttcatagattcataggaaataaagccaaatatagctcatactctttataaaaagtacaatgttaggtaaattgaaaagagaccattccatcattgaagtgttggaatatgaatacattccaaagcatagtgtttttgtaactttagatcgtcatcaaacagtctctccactagctccatgttaaagctggtttcctcccctcaggtaaagggtaaaatggtcatttgtaaggtgaatttcaaaggtaggattttagcttgggtagttgttttctctgtttacagccgcaatgattctatcccatggtgtcctgactgtatgacctaaaaaacagccttttctccaggctttgaggcacatccaaaaatgaggtggtgtcatagacctgtccttccacaccaaagacaccctggtgctgctgctggtgaggcttatgtccaaggcaggggccagcagaaactccagcctgctgtctaccaaaggaggtaccctatttgggtactgttcccaaaccctgcctttacccatcccttttacagtccctgaattttatagtatgttttcaaatgaaatattgtactttcatttattcaggaagcaaattgagtgcctacaagtgagacactgtgctgtactggctgaagacatgggctgttaatctagaggattgtgacctttgatggtagggctttctttactaaggctacatcaggcctaagcagggtctggtctattgcccaccaactctagtgagcagggtaagacatactgattcaggataagggaagtatgtttatttttaacatgaaactagttagaaaatactttgtcaaaaaattgctctgtctactcttagagctggatcttttccaaatttctctgaaagtgagttttgtatcaatgagtgtggatattgagatttgctttagggcccatggttggtagcccacagcttcatctacagggcattggcctttcaggtgaatttgcagagacttggccaaatttgcttctaccctcttttccctggggcagctgcctcatgtggggtcactgaaagaccctttgagggtgctgctttgctgcctttaagaataaaagcctctatcatccagagttgctatgcaccaaattttgatgccttttaaataccttgattgcctgtagcattagaaatgctttcctatttaaaacagtttagattttaaaatagagctttgtattgtatgtaatggttttatattagctttgtataagctttcatgtaagagtcatattttttgcctttgtagataaagatttaaatttttgtgcaaaatagtgttggtaaagcacacatccattggactatgcaaattgatttttagtagcagcactgagcaactgggcatttactagcacatacccttttctctcacctgtattagaccttgggttgaggaatgaaggagcagccttctgtttactagaatgggcccaagttgaaaccatgtgttttatagaatggatgtttatgtgaagaagttggttctcagttatgtttacagcacttggaattgtgttttcttgtacattttatattttaaaatcttttataggagtgcagtgctccttacacaaatacaaagggaagatgagccagcagttcaggctcctcctcagttacagtgctgaaataataaacagtgacgatcaaaagtaaaaaaaaaaaaaaaaaaa

SEQ ID NO: 339 - DNA, 3047 bp, Cricetulus griseus
gaggactacgacgcagagggcatgaggagcagaaggggccatacatcgacgagtcacccaccatgtcaccccagctcagggaccccatccaaaaagcagaccggcgtctttggagtgaaaatcagcgtggtgaccaagcgggagcgctccaaggtgccctacatcgtacggcagtgtatagaagaggtggagaagaggggcattgaggaggttggcatctacaggatatcaggggtggccacggacatccaggcactgaaggccgtctttgatgccaataacaaggacatcctcctgatgctgagtgacatggacatcaacgccatcgctggtaccctcaagctctactttcgggaactgcctgagcccctcctcacagaccgactttacccagccttcatggagggcattgccctgtcagaccctgctgccaaggaaaaactgcatgatgcacctactccgctccctgccccgaccccaacctcatcaccttccttttcctgctggaacatgtcacttcacaacctggccactgtgttcggccccacgttactgagaccctcggaagtggagagcaaagcacatctcacatcagctgcagatatctggtcccatgatgtcatggcccaggtccaggtcctactttactacctgcagcaccctcccatttccttcgcggaactgaaacggaacacactgtacttctccacagatgtgtagcctgaggggggcagctgtgggggtggccagagccagccctgcagctagggcccaacaaagacttgaaagactgcaacagaaactccccagcctagcactccagagtccaagggaagccaccttccaagaactggaacttgtgcattttttgtgccaccttgtacaaagccagctgaccagcccccagcctcctcgccacaccccagctcccaccctctgtacctttgcgtgtatctgatgctccgtgctgtccaagaattgttttatgtatatttgtcatgcagaaaaggtagtggccgctgagctggtgtgggcacagacagcctgctttgttctttcatttctcccaacactttctttctgcctgagtccagtctgggaacttttattttgtgctgtgtaactgctgccagcttctcctctcctggccctgctcccagattgcaggctccctgcagtgtctgccctctccatcttcccagcctgctgcatgcatgtgcagcgtggggttctgcttcatcattggaaagttctgcagaggccctgggcagtggtagcctgtctgatgggctgcgtgctgcccttggcctctttgctctccacctgtggaagcacgcctgctttccttgctgtctgtgcaaatgttgaataaggagacagacgcacactaatccgaagcttagcacagagctggagagctgatttctggaatgttctatttgagaattaccctttctggggtttgtttatctcctgcctaccatgaggcattttcagctgtttcttctactgctgaattttctgttcccttcccccttgtgttgttttctttgagtgtaatgactcacaagtgtcctgctgtcaagagaggtcaggaatgcacctgagggtatggtgggcgcccaggctgtgaaggaacaaaatggacagcgcaggcagcagtggcaagtcagtcttcacagtgaagacatgcagaggctatcctagtggggcatggcctccaggagggcaaagtctgtggctaaatcaggtatccagatgaaagcaggctctgtcctggaacctggaacctcatatacctcgtggtacttttgccttagattttacactctcaacagccaagcactgccacggggcagccacattaccatgcatgctccagagcctagcaatggaaggcacaacccaactggaatggtcctgccctcgtactgcttcagcttctaaatccagccctgtgggtaatcccaagtattctagaagttggggacaggctgcctcctttgcatgttctgttggggctccagacgacaggattggtgggtgtcattctcagttctgcaacctattgcttgttactagaaagagaattattcccaaagcaccatttccagtctgaggagcaactaccagtctgtggcaatcagcagggaaaggtgctcctgtcagaggggcttgcgctaccacagctaccacacagcttcctgttatcttctatgtggcagagttgattcttggccctcaggattggggagaccagctctcattgtgtgtgctcagggctaagtctaaagatgggtttgctggcccccaagctgtagtgtctgctaggtgagaggcagagctctttcgagtcctgttcatccctgttgtctttgacagaacggtacagtttgtgcatagaggaaaagggaatgccaacttcccagctgcctattagcagtttaacaaggaaccttgctgtctcaaacaggttaaagaaaatgcccgtgagtatagaggtcacatcatctagctactatcttggcactcaggtggtggtgtgtggtattcttccaaagaattgacaaaaacagattactgcagttcccaggttgcttaggcagtgtaacagcaggaaggctggaggagctgagaattattaaaggtttctattatttataaatcccaccccaagtggggcaagtgaggtgccagacctcaactgaggtgcaccaaggaagtatctggtgtttctcctgcgacaggggccatgctgcccagaaccccatcactgccagcagggcaccaggagacagggtccagtaaccccaggcatgcctgtacttgcttgggcagtgaatgaggactgccagcttttgctgacaaggtaggatgggaccccctaataagttggtatggatatattttttttgtctctgttctgtttaaacttaatgtagattattataaattgatgtaaaccacgtgagagggaaatgttaataaaaaaaatgcaaaaccccaacatttgcacaaaacaaaaaaaaaaaaaaaaaaaaaaaaaa

SEQ ID NO: 340 - DNA, 3043 bp, Cricetulus griseus
aaagctgtctgtttggtccaaatggggatcagacaacatcatcttctttaccacttatgtgaatggctcctgcactgaccttggtgcactggaattatggagaacatccgacttggggaaaaccttcaaaaccattggtgtgaaaatctactcatttggtcttggggccgttcctttttgcctctgtgatggctgataaggatacaacaagaaggatccacgtatcaacagaccaaggggacacatggagcatggcacagcttccttctgtgggacaggagcaattctattctattctggcagccaatgatgacatggtgttcatgcatgtcgatgaacctggagataccggatttggcacaatctttacctctgatgatcgaggcatcgtctactccaagtctctagaccgacatctctacaccaccacaggtggagagaccgactttaccaacgtgacctccctccgtggagtctacataacaagcatgctctcagaagataactctattcagagcatgatcacttttgaccagggaggacggtgggagcacctgcagaagccagagaacagcaagtgtgatgctacggcaaagaacaagaatgagtgcagccttcatattcatgcttcttacagcatctctcagaagctaaatgttccaatggccccactctcagagcccaatgccgtgggcatagtcattgctcatggtagcgtgggagacgccatctcagtgatggtcccagacgtgtacatctcagatgacggtggttactcctgggcaaagatgctagaaggaccccactattataccatcctagattccggaggcattatcgtggccattgagcacagcaaccgtcctatcaatgtgattaagttctccacagatgagggccagtgctggcaaagctatgtgttcacacaggagcccatctacttcactggcctggcttcagagcctggagcccgctctatgaacatcagcatctgggaattcaccgagtctttcataacccgccagtgggtctcctacacagtcgatttcaaagatatcctggaacggaactgtgaagaggatgactataccacatggctggcacactccacagaccctggagattacaaagatggctgcattttgggctataaagaacagttcctacggctacgaaagtcatctgtctgtcagaatggtcgagactatgttgcggccaaacagccatccttctgtccctgttccttggaggacttcctctgtgactttggctacttccgtccagaaaatgcctcggagtgtgtggagcagccggaactgaaggggcatgaattagagttctgtctgtatggcaaggaagagcacttgacgacaaacgggtaccggaaaatcccaggagacagatgccaagggggcatgaatccagctcgagaagtaaaagacttgaaaaagaaatgcacaagcaatttcttgaaccccaagaagcagaattccaagtccaattctgttcctattatcctggccatcgtgggattgatgctggtcacagttgtagcaggagtgctcattgtgaagaaatatgtctgtggtggaaggttcctggtccaccgatattctgtgctacagcagcacgcagaggccgatggagtggatgctttggacacagcctcccatgctaaaagcggctatcatgatgattcagatgaggacctcctggaatagctcttcagagaagctggggctgagcgtggatggagccacagtacctcctacactcccagcggctctgacttgggaaaataaatttcccattgcgtcggacccagctctgtttctgctgcttccatccaagcccaaaggacctacactaaagaatgcagggtggggggtggggaaccctaactgatctcacagttgactctgagaagaggggggaaattttaaattcttttaactttttagtttcaagttctgtcttttgtaaacgtgtgggctttaggtttctgttggtttgttccctctcaaatccacactcatcagggatgcacaaagattgctaaaataggatggggtgcagcttctcaaattttctatcaccttcctcccagagggaaaagtaatgtgaacttaaatgtcttttaggaacaaaaccaaagtttaagatttgccatatgatttagtgacagggacgcccagagttggcaagcaggtaccaggctgtctgtcctgtcggcctgtgctttgccaggtgcaggttgctgtggagtcactgaagccacaggtgcaggttgattcttggttccatgcatcgtaacagtaagaattggagcactaacttgaaactgtcttcaaggacttgctgcgtgctacttttcacactagtacattcttctgctatctgtttatatggtagtaacacaagctaatctgtacctgtgtgtgtgtgtgtgtgtacgtatatacatgtataaactgtatagtgtacatgttaatgatttatcagtatgggcccagttttagtgcagttctcaccctccatatgccctcgctgtggtctggtgacttcctgtcccctggaggttctgccacttcttggtgttctgagcctccagggatgagggtttgggctgcattctccttatcctcatgcacagaaatgctcagggtccccacgtgcctgttgtcttcccctgttgtcctttgttccttttctgagcatgtggcccctccccggctgtgaggggcagctgccttcctgggaaagtgtaaagcaggatcatgaccaccactgcatgtgcactgaaaactccagatttctgcccacttgggacagaacattgcatgtgaggtgggattatcaagtttcaaaagacctgtgtcaattatacagcaaagccagaccccatatgaaatcccacaaaatggaaataaaacgcaaaaatttcttttaacattgtgtaaataaatctggatgtgtttaaactttggtacctaaaaaaaaaaaaaaaaaaaaaaaaaaaaaaaaaaaaaaaaaaaaaaaaaaa

SEQ ID NO: 341 - DNA, 3041 bp, Cricetulus griseus
agctcggcgggagaggtgcgggccagagcagacagagcctgtcgcaaaggaaggaatctggcagtcgggagctgactccagccggtggaacctgcagccctcgctcactcaggacagcctcactctgggcagacgcctggaacaggaaagctcagcccaatcagcagagtcggcccgcagctccgctcaatccgcaactccgacccgcgcagcccgcggagctcccgccgccggtctgggcagcatgaggcgcgcggcgctctggctctggctctgcgcgctggcgctgcgcctgcagcctgtcctcccgcaaattatggctgtcaatgtgcctcctgaggatcaggatggctctggggatgactctgacaacttctctggctcaggcacaggtgctttgccagacatcactttatcacggcagacttcttccactttgaaggatgtgtggctcctgacagccacacccacagctccagagcccaccagcagggacaccgaggccaccttcacctccatcctgccagctggagagaagcctggggagggagagccagtgctcatagcagaagtggacactagctccaccacttgggacaaggagttggaggtcactaccaggcccagggagaccacacagctcctggtcacccatcgggtctcaacagccagagccaccacagcccaggcacctgtcacatctcatccccacagagatgtgcaacccggcctccatgagaccttggctcccacagcacctggccaacctgaccatcaacctccaagtgtggaggtggaggtacttctgtcatcaaagaggttgccgaggatggagctaccaatcaacttcctacaggggagggctctggagagcaggatttcacctttgagacatctggggagaacacagctgtggctgccatagagcctgaccagaggaaccagcctccagtggatgaaggagccacaggtgcctctcagggccttttggacaggaaagaagtactgggaggtgtcattgctggaggcctggtggggctcatctttgctgtgtgcctggtgggtttcatgctgtaccggatgaagaagaaggatgaaggcagctactccttggaggaacccaaacaagccaatggcggtgcctaccagaaacccaccaagcaggaggagttctacgcctgatggaggaacggttctccccccagcccctgccactcactaggctcccactcgcctcttctgtgaaaaacttcaggccctggcctccctaccactgtgttgcctcctcagcacccagacccttccagctgttcctgcccgagcagtcccagggtgtgctgggaattcattctacttctttgacttctgcctagaagcttgggcgcaaagggtttcttgcatctgacctttctaccacagccacacctgatgtccactattctgacttggtttctccaaatgggaggagacccagctctggagagaaaggggacccaactgctttggacctagatggctgggctggaggaatcgggggacaggagagggtcttcggctgacgtgccatagcacttacccattgagaccgctagggttggccatgctgtgggtaggggatggagtccagggctccttggaattcacttcacattgtggggaattctactttagatatcaacttgtttttgcacatgtttcctctagtttctctgttcagagccccagtagactttacttctggggtaaggcaagtcagttgactggggtccctcacctcgcttccctaatctacatttgggcgacagcatcggggtcacttaagactttctgtttctgtttttgtttttaacctagaagaaccaaatcctgatgccaaaacgtaggcttagtttgtgtgttgtctctaagtttgtcgctcatgcgtgcaacagggtatagactatctgtatggtgccccattttctggtggtccgtaagtaggctggctagtcccagataccatggggtagccacctcttgaccagtcatgcctgtgtgcatgaactcagggccatggctgtggcctgggccactgcgacatcggaagagcctgtgtgagaacttactcttatagcacagtctagggatggaggggagaagactgtgggggtgggggaggggtggcaagggtgcccaagactctcccgcctttggtaccatctctggtcacctttctcttggaagttgacaagatacatcttgagtacggctggcactggctcctccaagaaccaagttcaccttcagctcctgcggccttgccccaggctggagtcagaaatgcttcccaaagagtgagagtcttttgcttttggcaaaacgctacttaatccaatgggttctgtacagtagattttgcagatgtaataaaccttaatataaaggagtcctatgaactctactgctttcgtttcttctctgggctgatggcatagacgtagccggccttctctcaaaccctggtagttcagggaagcttggctcaaggctatgtgcctccagttgtattctccaaggggtaggatcctgggtccaggattcctctgtttgtttgtttgtttttgttttttgttttcttttggccaaacttcttttgaaagttggtaggttcagccaaggttttacagggcctgatgtctgctcttctaaataaatggtttaactgagactctagtgtaacttgacctggggtcactagagtcacgcttggtttgcagagcagacacctgggacagccttcctcccacatgtttgctgggacacttctgaggactccttgcttatttagctcaacgatgttccagctgctggcaagcctgctcagtggcccagctagacaagagactgtgccctgtgttccatcccagaacttgctgccaggacataatggctggatgtgatgtggggagggggtggggtcagatctgagacagcactcggtggagagcttgtgagacggtggccaagcctcaggctgggcccattcgtgtaattgcaataaa

SEQ ID NO: 342 - DNA, 3040 bp, Cricetulus griseus
ctttgttttgtgttgatgtttggaactcaatgttactaacatcttactatgcattcctctttggtaattatttggggtatgctggcaatgaaaccacagttcctaaaaatgaatgtatctgaactgagtttatgggttatccaagggggttgttggttatgtggaactgttacactcaagtatttgacttccagaatctttggcattgcagatgatgctcacattggcaacttattaacatcaaaattcttcagttacaaggattttgatactttactatatactcgtgcagccgagttttgacttttatggaaaaggagactccgctgagatacacaaagacactgctgcttcctgttgttctcgtcgtgttcgctgcaattgttagaaagattattagtgatatgtggggtgtcatagctaaacaacagacacatataagaaaacaccaacttgatcatggagagttggtctaccatgctctgcagctgttagcatacacagccctcggggttctgatcatgagactgaagctcttcctgacaccacacatgtgtgtgatggcatccttgatctgctccagacagctgtttggctggctctttggcaaagtgcatcctggtgctgttgtttttgctgtgttggcagcaatgtcaattcaaggttcagcaaacctacaaacccagtggaacattgtaggggagttcagcaatttaccacaggaagaactcatagaatggatcagatacagcacaaaaccagacgcagtgtttgctggtgccatgcccaccatggcaagtgtgaagctctctgctctccggcccgtggtgaaccacccacattatgaagatgcaggtctgagagccagaacaaaaattgtatattcaatgtatagccgaaaagcagccgaagaagtaaagagggaattgatgaaattaaaagtgaattactacattctagaagagtcatggtgtataagaagatccaagcctgggtgcagcatgcctgaaatctgggatgtggaggatccagccaacgctgggaagacacctttgtgtaacatcttagtgaaggattccaagcctcacttcactacagtgttccagaacagcgtttacaaagtcctagaagttatcaaagaatgactgcggcgtgcaccggctacagagaccgcatcagtaatggctttactgctttgcaactaactcagattgcaaaacctttaagtcttttaaagtaactgttttcaattggaaaacattttatttggtcaatttgtcattctgattgtaaaaatgacttacaccagatcaattagttactgtttcagtgcacctgttaaaatttgctatgcaaatgagtatatgcttgtacttcgttaaaatatttgtgtcacagtgaacaaagccatctgtgtagaaatacatcatggatcgtgacaaagattatatgaaatttttcaaataaatgctatctcgtctttaggttgatacaagtgtttattcttgcttaaaaattagtaaatgtgtatttttctcatttttagtattaatcaaatattatattttaatatctttaatccatttaaaaattttcatgattaattacagttttaagaaaaggctattttagacaaccccaaatatgatgcatctagagcctaatattatatatgaatagagcttttctcttttgctttcaaaattgcctgtctttgataagacaaagccttaaacctttattataattttgcctaaaaaaagtcagtatgaagaataagtatgttcagtcttccccatattttcttctttttttttttttttgaaaatttcccaaacatgatttaaatttcttacacaaattttgtttcttagaagttaatttgtgtgaaatgagattcttcaaaaccatggatcttcagtgttgtaagaaatggttttcaggttttaaattctaagcaaattgtgaccatggctgactacacatttaattacagtcttctctttattaaccacaggctgattaacctcagtgtggattgtccttgagacctgagtcctcagggatggtttccggtgcccactcctggcagccacagaagagctgttctctttctgccttcttaccagagcccaaggacaagcttgtctgggggacattggtcacctgcaaagacagtatggagactgaggagtgtggtctcagtgtcctcagagccagcctcagcagccagggcctccctccctggagcctgcccagggattgtcattcccatgcagccctatatgactggtgtgtgtatacagcagttaggtattttttttttttatcacctttttaaagttcttttctatccttaccctctaacagctcccttcataataagttcatgtgtaatgattggaaattctgtacagagaaacaaaacattaaaatactattagagccagtccacatgctgggaaagattaaaagtagtctaaattagttttttcgcagaaaccttttgtaacagtatttcttaatgtaactccaccagcaagctctgcttgtattttaggcaagtcagcttggaacagaggccttgggggtccactgcgtatttagcctccagcacatctaggagcagtgctctgcggcataaacacttttatggcgacatggagcggtaatagattctgtgtagctgacaatgcagcattaaagctcagtattttgcatatttctagcatttacaaatatttttgctttagtgtgaggaaagtaaggaaagacaggaggagattgaaataattattattgtggcatttaaaaagagctgggtaatacttccataaaaagataagcctctaaaatgcctggcagaaaatgtgtgctgttaaaataggccaatagcattaaggagaaaataaaaggatgtgtccgaaataaagtgataactacataggagtattgtatttttatgaattttatgccccttgtttacatgtactatatatgttaaataaaaaaaaaaaaaatgaaaaaaaaaaaaaaaaaa

SEQ ID NO: 343 - DNA, 3039 bp, Cricetulus griseus
ggacggctgttctcagtgaaggaccgtgtgcccgcccctgagcagcgaccatgggcctgcttgcctacctgaagacccagttcgtggtgcacctgctcattggctttgtctttgtggtgagcgggttggttatcaacttcacccagctgtgcacactggccctctggcccatcagcaagcagctctaccgtcgcatcaactgccgcctggcctactcgctctggagccagctggtcatgctcctggagtggtggtcctgcacggagtgcactctcttcaccgaccaggccaccgtggaccactttgggaaggagcacgcagttatcatccttaaccacaactttgagatcgacttcctttgtgggtggaccatgtgtgagcggtttggcgtgctggggagctccaaggtgctggctaagagggagctgctgtgcgtgcctctcatcggctggacgtggtacttcctagagatcgtcttctgcaaaaggaagtgggaagaagaccgggacattgtcaaggaggggctgcagtgcttgtcagactacccagaatacatgtggtttctcctgtactgcgaaggaacacggttcacagagaccaagcaccgaatcagcatggaggtggctgcctccaaggggctgcccccactcaagtaccacctgctgccccgcaccaagggcttcaccactacagtccagtgcctccgggggacagttgcagctatctacgatgtgaccctgaacttcagagggagtaagaacccatccctgctggggatcctctatggaaagaaatatgaggcagacatgtgtgtgaggaggttccccctggaagacatcccagcagatgagaatgacgcggcccagtggcttcacaagctgtaccaggagaaggacgccctgcaagagatgtacaagcagaagggtgtattcccaggggagccgatcaagcctgcccgcaggccgtggaccctcctgaacttcctgtgctgggccaccatcctcctctctcccctcatcagcttcgtcctgggcgtttttgccagtggatccccgctcctcatcctgacattcttggggtttgtgggagcagcttccttcggagtccgaagactgataggagtgactgaaatagaaaaaggctccagctacggcaaccaagagcttaagaaaaaggaataattaatgctgtgattgaacacccgtaacctgacgcggtatccaattaactcaattaaaaaccgaacacacagagcgagggaaagagacacttagagactatttttcttattaactggtgactaatattaacaaaacttgagccaagagcaaagaactcagctgccaggtgaagatggtcagccagcacccagggtcccatcggccctctgcggggacagaggcgggcttggggaaggtggtggggccatggggctcccccagaactccgcctccaagaggcggccttggctgctctcccttcttaaacttagaatgaggcttttgtttcttatctgttatttttgggaacttaacctggcccctactttgtgccctgcaccccaggacactggctcttcatgggtgccgctgtcctcatgggggcaggtcagctggatccttgtcctacagaactcatttgtcctgccctgcttggcacctctgcttctagcctggggggagaagtcttagagataagcacacactgaatgtagatctggcccctttgtccctcccctgccccactgcctccctgggggctgtgtctaaagcaccttacgtctgttttaaaagtgaacgcccgcccgagaactctgcagaatgtggaatccttgagttcatacagcgcctccatacagctccatggtcccctcatcctctgtagccagcaggctgcagtcctgcaaagggtcagatgggaagaccaccagggccccacacctcagagccatggtgcctggggggctccagcctatgggactcccctgggacactcttcaggaggtggtgtcaccatcaggcctccttgttctcagacacttttagtgcttgttagcattagaatttatttttacaaattggtctgtggctggctcgcagcttgtccctgtcctcatcttctgcctctacccaggcaagtgtcatggctgccctccacacccactgttgcccactgccacctcaatgacataagctgtcctggcagagaacaggggtcctctgcctgcacttggtgccttgccagggtcccctgggctggccctggaggcacatttcccttctcactcagtgaaggaagtcctccctagtttctggaagacgtagttccttgggaaacaccatcatatgcttttaccttctgtctggatccttccacaggcccttttaaagtcatttcatgttttctaacaaggaaaaccgggtattctttctggcatgctgcagccagagttaaaagtaaaggcagagaagattcatagggcacacgctgcctataagggtgaagggttaagtcaagcaaactgagacactgaatctcttccccttcagctgaaagcttgcctgccctggcctctgtcaactgtgagccatcttgggcactcctgagggccagctccctccatgatggggttttctttctgtctgcttgaggtttctgtccttccctaattcactgtcacctcacaaatctgaaggaaacaggccaatgggccctgccatgcatgcacctgaaagcaatctcagagtctttgccatttcactaatgcctctgacttcctgagaagccctgagcctttgggatcagctgagtgttgagtctgtgaatggccggaggagtccaggctgcaggctttgccctcataggcctccccctgcttatcatccaatacagcgcttctgagagcaataaaaactacactaggaatgtgggtgtgggttttgttttgttttttggtggggtcagattttgcttttcatctgcttcagaaggaaagggggaggagagtcccttgatttttctattaaattaataaatctc

SEQ ID NO: 344 - DNA, 3038 bp, Cricetulus griseus
  modified_base (105)..(105): a, c, t, g, unknown or other
ggggagaagagcggttgtatctgcaacaaacgactcaatgacaccgtggaaggaagattgtcatggacttctgggttttaactggaactggattaataagcaacngggaaaacgtggctgggggcagctgacctctaacctgctgctcatcggcatggaaggaaacgtgacacctgctcactatgatgagcagcagaacttctttgcccagataaaaggccataagcgatgcatcttattccctccagatcagtttgagtgcctctatccatatcctgtccatcatccctgtgacaggcaaagccaggtggactttgacaatcctgactacgagagttttcctaatttccaaaatgtggttggttatgaaacagtggttggccctggtgatgttctttacatcccaatgtactggtggcaccacatagagtcattactaaatgggggaattaccatcactgtgaacttctggtataagggggctcctacccctaagagaattgaatatcctctacaaagctcatcagaaagtagccatcatgagaaacattgagaagatgcttggagaggccttggggaatccacaagaggtggggcctttgttgaacaccatgattaaaggccgttacaactaacctgccagaggtcaaggcctcctgccaggtgactgctatctcgtccacatgcttcgttgatgaggacaggacactccaagcactagtattgcacgctgcacttaatggactggactcttgccatggccctggaggcaggtgtttggggcgaggcagggtagatgactccactcccatttggaaagatttctcacccttgccttttgagccccagaaccttccctcttcgcccccctaaagtcctgcattcagtgtgtggagttccagcttctggttgtcatcatgtctgtgttagtctgtcaacctcagggtgtgtgtatgtgtacatgtgtgcatatgcatgtgtatacacacacatgcatgtatctgttccaagttccctcttcctggaccaggatatcattctggatctcagctcctgtctcctgaagcctcagtgcctcagcctgagagaggagatgctcctgtatccctcctacatctgggttgtggtgccagaatgaatctgctcatcagtctgccttctgccagtttttgcagcatagtcaggctacaggccaggtagcaatagctgctgggtcccagtggggacactagaaggaggcttgtctttgggagaccagatagccttctggtggaagaggattagataggggtccggttgagaactacagactcaagccatacatagaaggtaaccttgagaatctaagaacagaggattgtgcatatgttccaaattgcagacacatgcagctattctcttcgttgcatgacagctagagtaggccagctggtagagcatgggtagggtttacttttctgttggtagctatttatgggaaccttctcagggctgcagtgtagagctgggcagctcaacgttacacaacagagtgccatcgttcacatctgttcagagggaatggggcccctgcagtttggcagagtggtggccctgtgtccacttacctcaagtcccttctccatcattctttttctctaaaatctgagtgggaagtctaattttattcgagaatccagcttagatcttccaatatccttgatttacctcaatattcaccctgccccttcaaatgcctaagacaatattaatctgcaccaagtagtcctcatccttagtgtgttccttagatcccaggccccctcaagggttgggatgggtttctgaccctttcaaatgtgaacttctcaaggatggtgctatctcactccttggtaagttccctacctctgttgtctttcatccttcaaacttggtgcagaatttagcaagggctaccagcagtgaccctctgaccagttttgcctagatggggtaggtgtggggatgagagaagtaactcagaggttctggagacccgggcctttccagttcccttcatttctgacctcagggagtctgttgacttttccctggttagtctgttttgtctgctctgtcctcttgccgttcctgtctttacttgctggctcagtttgtctcactctggtggtccttactgcttgtccttcagtcaggtctttaattaaagatacagggggcccagattgaggccagatgaggaccttggggacatttctggaggatcaaaggctcagaaattggtgtcctcaaggcccggggcctgtgagtagtgatgccttggagacaattagaggggcctagagaggtaacggacttggtgagaagagactgctagagagaggccaggcttgggaaccaggctggaaggagtgaactttgtgtttccatctgaatgtgttcttgtgccttagggtccagcagttcagggatgagagacattttctgaatgtctcctaatttctctcaggtctttggctcagtgtcacagcgtctgacagacccctgcgttccagaggttgctagaaggggagcagcttattgagtaggctggtgtcgagagtggaggcctccacgaggaggctgcaatggtaggggaacaagagaaaggaacccagtggtcagctcatcactagatgacactgttcctccaagagaataagtacaagaactggttcaaaaagtcagcttgaagctgccctccctcctccctaaagtctggtttggagaaggaatgtgtgtcctttagctttcaaggggaaatggtctagtgtttaaaagcatgcatttgggggtctgatacctttggtacacattctagcttgctacttaccagctgggtttgaccttggttgattcttttaacctctctgagtctcagtttcctttattataatgatatgtggggtggggtgtgaaaatatctacctcagggttgctggattaactgaaatgatgtctgtaaagctttagcacagtgcctggcaagcacttaataaatggctgtggtggtaggt

SEQ ID NO: 345 - DNA, 3034 bp, Cricetulus griseus
gccgccatggccggctggatccagccacgcctgcagctgctcctggcgcaatgaggagaggagccgccgccgccaccaccgcccgccgctgactcgcgacttcgctgccctccggttcacccggccgccgccgccttcagaccgccggatcccgctgctgccggagccgcagcgttagccgtcgcatctccgagccatctcctccctccttcccatcccccttctcttcaagcgtgaggctcgtgatccttccgccgcttcccttcttcattgactcggaaaaaatccccgaggaaaatataatactcagagtacttattttcaatcaagtatttgccctcgttcacgtgatatatatatatatttttaaggattccactccacccttttaaatagctatacaaaaggagtgaaaagccaagaggacggagtcttttttttcttttctctttcttgcgggagaacttaatgctgcatttatcattaacctagcaaccctaataataaaacaaaaggaagaaaaggattaaggaaggaaaaggtgattcaggaagagccatcatgtcggggcgaccgagaaccacctcctttgcagagagctgcaagccagtgcagcagccttcagcttttggtagcatgaaagttagcagagataaagatggcagcaaggtgaccactgtggtggcaactcctggacagggtcctgacagaccacaggaagtcagctatacagacactaaagtgattggaaatggatcatttggtgtggtatatcaagccaaactttgtgattcaggagaactggttgccatcaaaaagttttgcaggacaagcgatttaagaaccgagagctccagatcatgagaaagctagatcattgtaacatagtccgattgcggtatttcttctactcaagtggtgagaagaaagatgaggtctaccttaatctggtgctggactatgttccggaaacagtgtatagagttgccagacactatagtcgagccaaacagacactccctgtgatctatgtcaagttgtatatgtatcagctgttcagaagtttagcctatatccattcctttggaatctgccatcgagatattaaaccacagaacctcttgttggatcctgatacagctgtattaaaactctgtgactttggaagtgcaaagcagctggtccgaggagaacccaatgtttcctatatctgttctcggtactatagggcaccagagttgatctttggagccactgattatacctctagcatagatgtatggtctgcaggatgtgtattggctgagttgttgctaggacaaccaatatttcctggggacagtggtgtggatcagttggtggaaataatcaaggtcctgggaacaccaacaagggagcaaattagagaaatgaacccaaattatacagaattcaaatttcctcaaatcaaggcacatccttggacaaaggtcttccggccccgaactccaccagaggcaattgcactgtgtagccgtctactggagtatacaccaaccgcccgattaacaccactggaagcttgtgcacattcattttttgatgaattacgggacccaaatgtcaaactaccaaatgggcgagacacacctgcactcttcaactttaccactcaagaactgtcaagtaacccgcctctggccaccatccttattcctccccatgctcggattcaagcagctgcttccacccctacgaacaccacagcatcctcagaatgtcatgaatgacaaacaaaaaaaaaaaaggcgcgtgtgtgtgtgtgtgtgtgtgtgtgtgtgtgtgcgcgcgtgtgcatgtgtgcggtgtgtgcacgtgtgtgcacgtgtgtgcgtatgtgagggctgaggtgcatgatttttctttctcaaggatcatggcaggatcacagaactcttacacaagtgagatccaggtttctgaatatctttttgtaaataataattaaaagctcctcaccaaattcaagcttgtatattatattttctttcaatgtttttaaatttaagttttattgttttgtatgtaaatatgtggacccaggaactgttattaatgagcaaaaagttactgttcagggcagtgattctgtttaataaccagacaaaaatgtagacgagctttttaaagccatatagttttaactctgtacagtaggtaccggcctgtattattgtaacaataactctagcaatgtatagtgtatctatatagtttggagtgccttcgcttccatgtatttggggtttttttgtttgttttgtctttttaattgtattctcttttatccatgtgtccctgttttctttgttttaaattggaaatttgtctggctcctactcacactactgattgttctaatcacagagatgaacatgtttcaccctgtatgcaaaaatctagcatcccttatggtgaagcctgccttttctggtagaaactgaagccactgaaaataaagacacagctagaagcacaggagagtcccagactgatgtctccttggagaggctttggaagtgatccctggggtctggatccttttcactgggttatgccattttattcaagttttgttgttccattgtatatctccacaatacaaacaaaatgacagccagtacataaggggttagcttgacaaagtagactaccttgttgtttaacctttttaatttttttttctttactattatctgtctacaggcacttgggcctgtacacataccaattagcgtgaccacttccatcttaaaaaacaatctaaacaaaatttattatatatatatatatatatactcattctttgaaatgacctttctctgatgtgtagacaggaggtgcagcttccggcttggaaacccctggacttaaaatagaggaagttttgcagacactgctttggaaagaaagaaaataaccctgaaagggacagttgtaaaaacatgtataagctgctgtcttggttactgtgtccattggtttggtgtgactg

SEQ ID NO: 346 - DNA, 3034 bp, Cricetulus griseus
cgtggatccaagatggcggcggcgatggttggtggccaaggttcttgctgcttctctgtctcacatgtaaaacaagcaccttctatgtccctggagtagcgccaatcaacttccaccaaaacgacccagtagagattaaggccgtgaagcttaccagctctcgaacccagcttccttacgagtactactcattgcctttctgccaacccagcaagataacctacaaggcagagaatctgggagaggtgctgagaggggaccggattgtcaacacccctttccaggttctcatgaacagtgagaagaagtgtgaagttctctgcagccagtccagcaagccagtaaccctgacagtggaacagagccggctggtggctgagcgcattacagaagactactacgttcacctcattgctgacaacctgcctgtgccacccgcctggacgctctactccaacaccgtgacaatgatgactattaccaccgggaggacatggaagaggaccaggagcacacataccgtgtcgtccgcttcgaggtgattccccagagcatcaggctggaggacctcaaaacagatgagaagaattcatgcatcctaccagagggtaccaactcctcgccccaagaaattgaccccactaaggagaatcagctgtacttcacctactctgtgcattgggaggaaagtgacatcaaatgggcctctcgatgggacacttacctaaccatgagtgatgtgcagatccactggttttctatcattaactctgtcgtggtggtcttcttcttgtcaggcatcctcagcatgattattattcggaccctgcggaagggacattgccaactacaacaaggaagatgacattgaagacactctggaggagtccgggtggaagcttgtgcatggggatgtcttcaggccgccccagcaccccatgatcctcagctctctgctgggctcaggcattcaactcttctgcatgatcctcatcgtcatctttgtggccatgcttgggatgttgtcgccttccagccggggagctctcatgaccactgcctgcttcctcttcatgttcatgggggtatttggtggattttctgctggccgtctctaccgaactctgaaaggccatcggtggaagaaaggagccttctgtacggcgacgctctatcctggtgtggtgtttggcatttgctttgtgttgaattgcttcatctggggaaagcattcatcaggagcagtgccatttcccaccatggtggctttgctgtgtatgtggttcggaatctccttgccccttgtctacttgggctactacttcggcttccgcaagcagccatatgacaaccctgtacgcacaaaccagattccccggcagatccctgagcaacggtggtacatgaatcgatttgtgggcatcctcatggctggaatcctgcccttcggggccatgttcatcgagctgttcttcatcttcagtgcaatctgggaaaaccagttctattacctcttcggtttcctgttcctcgttttcatcatcctggtggtgtcctgttcacaaatcagcatcgtcatggtgtatttccagctgtgtgcagaggattaccgctggtggtggaggaatttcctcgtctcaggggggtctgcattctacgtcctggtctatgccatcttttattttgttaacaagctggacattgtcgagttcatcccttctctcctctacttcggctacactgccctcatggtcctgtccttctggctgctcacagggaccatcggcttctatgcagcctacatgtttgtccgcaagatctatgctgctgtgaagatagactgagtgggtggaccagcactaggcccactccatcctcggacaggaagctgcctgcagtaggggactgcaggcacaacaaataaaataactcctgctcatttaggaatcttggttactacaaggacatgtcctggttccctaggacagcaggattcccctcatcaaagcagccagagtttgctggccaccaaggaagagatgagacctgcggtgaactgttctcgtgccaagaagccctgggccagggccaagtgtttccagagccaagcacccatgtgtgtgtctgggaagaggtggctaaggccactagggtgctcaccctgcaagattgctccccagtcctttcctcaggggacaccgctctttctgaagggtggatggtggacctcctcttccctcactttcaggttgtggagtcctgagatctcttccttgaggtggccagggagagtctcctcatggcccctgacctcagcatttatactcagttcttttagccagacctatcccctctttctcccatgcaagttcttttggggacacccagaaaacttctctgagaaggaagatggaaggtaagttggattgctcttttcccagtccttaggaataggcaagaagccagtctccccaagttggaaggaggctaatgtacctggcctagctcctccaccctatcccagcccctgtgaaccctgtgcaagtcacagactttgctcttaagtagcaagagaccaaacccaccctgggtgtaggggtcaataacagccactcgcccttgctccagtcctttgggaccctgctgggagacaaagctcaggatgctgcttatgctaggaacacaccctgcctctcactgccccagtctcctggggacctgccaccaccatcagtcaaatcaatgaacctctcaatcttgcctcacagtgactccgcagcaccaagcggcatccaccaagaatcaggctggagaaaagggagcccaaagaatagaaagtgtttgggagttacttgttcattcaaatcttgcattttaccccctaaggttctcatttggggtgggtgggggaagggttcaaacattgtcaatttttctgactttttaaatcatcgtcattatttttaattaaaaaaatgcctgtatgcctttttctggtccagttgtaaaataaaaaatgccattgtacctagtt

SEQ ID NO: 347 - DNA, 3032 bp, Cricetulus griseus
  modified_base (19)..(19): a, c, t, g, unknown or other
gcagcagtttttttttttnttttcaggcgacgcttaagggagcccggcgcgcccggtgcattgtgggagcgccgcggcccgttttcgggaggaggcggagggcgcaaagcgagccggtggatcacaaccagaaaacctggtggataaagagagggaggggaggggctgaactgtgaagattgtggccccagaaccatgtctactcgggagtcctttaacccggaaagttatgaattggacaagagcttccgcctaaccaggtttactgaactgaaaggcacaggctgcaaagtgccccaagatgtcctacagaaattgctggagtctttacaagagaaccacttccaagaagatgagcagtttctgggagctgttatgccacggcttggcattgggatggatacttgcgtcattcctttgaggcatggtggtctttccttggttcaaaccacagattacatttatcctatcgtcgatgacccttacatgatgggcaggatagcatgtgctaatgttctcagtgacctctatgcaatgggcgtcacagaatgtgacaatatgctgatgctccttggagtcagtaataaaatgactgacagggaaagggataaagtgataccgctaattatacagggttttaaagatgcggcagaagaagccggaacctctgtaacgggtggccaaacagtgttaaacccctggattgttctgggaggagttgccacaactgtctgccagcccaatgaatttatcatgccagataatgcagtaccaggggatgtgctggtgttgacaaaacccctggggacacaagttgcagttgctgtgcaccagtggctggacattcctgaaaaatggaataaaattaagctagtggtcacccaagaagatgtagagttggcataccaagaagcaatgatgaacatggcacggctcaacaggacagctgcaggccttatgcacacgttcaatgctcatgcagccactgacatcacaggcttcgggattctgggccatgcacagaacctggccaagcaacagaggaacgaggtgtcatttgtgattcacaaccttcctgtgctggccaagatggcagccgtgagcaaagcctgtggaaacatgttcggccttatgcatgggacctgtccggaaacatcaggaggcctgctaatctgtttaccacgtgagcaagcagctcggttctgtgcagagataaagtcccccaaatacggcgaaggccaccaagcatggattattgggattgtagagaagggcaaccgaacagccagaatcatcgacaaacctcggattatcgaagttgcacctcaagtagccacgcaaaacgtgaatcccacacctggtgccacctcctaatctagacagaaatagctattggattttgtttttaaatagatctatttcctttatcatcacttcaattaaagactctaagaacaaaaaaatctcattgtgtctacacatctggtgaccctaggtcagtttgtgagtggatgcaattaataaaatgaaatccatggccttcttttcctgttacattaactgaagatgcacccaacctcgaggcagcttctgagttgagaatgatattgttatccaatactgttgattcattttgaatctttagatgcgtatctcttgccgcataggctttctaaaggtgcttcccaccccaagacattactgagagcagtgtcacctggcagtctgtgtcttctcattttgtcccagttggcattctagaaagacagaattggtaagtgacatgatggtctcccagtagtcaggagggttgcatgattccttcgagtctgtgatttgtaaagctgagtctaacaactcgagggcatttctttccagtagctcaactcagttcaggtaaggcaggtgctttactctgcatgggaaaagcacttggagtaaaaaaaaaaaaacaactttttttttttttaagctttcctgatacttgcagtaataccattaacggttcttcaccaataggaaaaaggatacttttgcaatgtaattagatgttctatagtgtgacaaggaattgccttccgatgggggttcatgtataatactcatttataattcagtatctaatttacttggcaaataatttttaaatataatcaataataaagactgttctgtggatggtagcgtttaatacattttatattttgtatagtgatttcaggcctcttgtttaaaatcagcagctctttagcctaattcttagcatcattttgtctctacgcccatacttttctgtgcgcgcattttgtgatctttgttaaaaacctgcattgccaacattgcagctcaaacataaaagttgttattcaaataaatatttaatttttttaattgctcttgtataatcaaatgccctttttagtattattttagaagcatttgggagggttttgcctaaagtacaatttattgggaaaaactagattttagttttataaaacttttaagtctttcatgggacctatattttcttgaattaaattttgtagttctagaacaaataggcaatctacaaaggtgttatctgtgtttcttgaaaacaggggcttccttatcttttaacctctgaggcagctgggggttcccattgttaagcacaagggcactggttcctcgagcgcctgtcttcagtagaggaaaagcatcacatcctcaggtctttctcacaatgcttcctgctaacaggccccaaagctgcactttgtaaactcgcccatcctcctcaacacagaaaaccaggaacccgccactgggcaaatggaattccctgaaaggaagaggctgcagcgtggttgtgtccttcaggagccactgtgtccacctagagctggaactgatgccatcaaacctggctccgggcagaggaagatgtcagagaaggacattaactggacactttataggaatctctataatgttggtcctcgaaagtacacaccagtggtctgcaaaataaacatgttaggaatcct

SEQ ID NO: 348 - DNA, 3031 bp, Cricetulus griseus
gggatgtcggtgcctgcgctgtggagtgaggtgaaccgttatggccagaacggcgacttcacccgtgccctcaagaccgtcaacaagatattgcagattaacaaggatgatgtaactgccctgcactgtaaagttgtttgccttatccagaatggaagtttcaaagaagccttgaatgtcatcaacactcacaccaaagtgttagccaataactctctctcctttgagaaggcatattgcgagtacaggctgaacagaattgaaaatgccttgaagacaatagaaagtgccaaccagcagacagacaaactaaaggagctttatggacaagtgctgtaccgcttggaacgatatgacgagtgcttggctgtgtacagagatcttgtccggaactcccaggatgattatgatgaggagaggaaaacaaacctttctgcagttgttgcagcacaaagcaattgggaaaaagtggttccagagaacttgggtctccaggaaggcacacatgagctctgctacaatgctgcctgtgcgttaatagggcaaggccagctgaaccaggccatgaaaatcctacaaaaggctgaagatctttgtcgccgttcattttcagaagattctgatgggactgaggaagacccacaggcagaactggccatcattcatggtcagatggcgtacatcctgcagcttcagggtcgtacggaggaagctctgcagctttacaatcagataataaaactcaagccaacagatgtggcactgcttgctgtaatcgcaaataacatcattaccattaataaggaccaaaatgtctttgactctaagaagaaagtgaaattaaccaatgcagaaggagtagaattcaagctttcaaagagacaactgcaagccatagagtttaacaaagctttgctggctatgtatacaaaccaggcagaacaatgccgaaaaatatctgccagcttgcagtcccagagccctgagcgcctcttgcctgtgttaatccaagctgcccagctctgccgtgaaaagcaacatacaaaagcaatagagctacttcaggaattttctgatcaacatccagaaaatgcagccgaaatcaagcttaccatggcacaattgaaaatttcccaaggtaatatttccaaagcttgtctaatattgagaagcatagaggagttaaagcataaaccgggcatggtatctgcattagtgaccatgtacagccacgaggaagacattgatagtgccattgaggtcttcacacaagctatccagtggtatcagagccatcagcccaaatcccctgctcatttgtcattgataagagaagctgcaaacttcaagctcaagtatggacggaagaaggaggcagttagtgacctagaacagctgtggaagcaaaattcaaaagatattcacaccctcgcccagcttatttctgcttactcgcttgtggatccagagaaagctaaggctcttagtaaacacttgccctcatcggatagcatgtctctaaaagtggatgtcgaggctcttgaaaattctcctggtgctacatatattcggaagaagggtggaaaagtcactggagataatcaaccaaaggaacaaggacagggagatttgaaaaagaagaagaaaaaaaagaaaggaaaactgcctaagaattatgacccaaaagttaccccagatccagaaagatggctacctatgcgagaacgttcttactacagaggaagaaagaagggtaaaaagaaggaccagattggaaaagggacacagggagcaactgcaggagcctcctccgaactggacgccagtaaaactatgagcagcccacccacctccccaagacctggcagtgcagcaacgatatcttcctctacaagtaacattgtgcccccaagacaccagaaacctgcaggggccccagcaacaaaaaagaaacagcaacagaagaagaagaaaggaggcaaaagtggctggtgaagacagtgtacttgttgcaggctattgttatccagtgtcagtgacattgggaacataataaaggtaacacagcaagaagcacagagctccctcctccatccccatagtccagaaatgattccttatacttcaaatgggaaaacatcctcctcaaactgcctaatcagatttggcctacttgtaccaaatagctttacgaagactgaagatgactgagcattaaggcacgttatctaaggtttaccaggatttaaatggaaagtgtttctcctgtttcaactagtgaagatatgtgttcctattcaagtctcaccttaaattatgtcttacgaggctaaaggtggcaccttctgagcattccacgtatttgtttagaactatcatgtgatgaaaagggatcttagtaatgagtggctgtcctgtgatgctggaattgggacttgttcacgtgtttgtgtgtggacaccttgactcctttgtacccctgtcactttcattctcagattatgttaacatgctgatttagttccactgaagacctcaagaaaatagatcaatgttacaagtagttgatgcttagacccagtgttctgagggcaaatgggtttgggcttcttaatcagaacacttaatggccattatcaagaacataaactctgacttctttattttaagagggaacagtaccaggcggtattgaaattcacaagagcatttggcccagttagcactcagatggtgcccctttctggttatgggacatgaccttccattacatttttcaaagtaatgtggtttgcagtcactttgtggtataaatgttgctcttgtctttcattgctagcaggccactttcttactcaaacagttgtgagacacacctggggtgtctccccatgtttagtattcgtttatgccacccgagctatcatttatttcacacatctatttcctcatgatcagattactctgtccttattaataaaagtgctgctgtgtttgagcatttacctattgaaacttcttcagtgagttc

SEQ ID NO: 349 - DNA, 3031 bp, Cricetulus griseus
cagaggaggagcgtgtggtccgaagtcgagagatctttgactcctatatcatgaaagaactcctggcctgctcacatcccttttcaaagaatgctaccgagcatgtccagggccacctggtgaagaagcaggtgcctccagatctcttccagccatacattgaggagatttgtcagaacctccaaggggatgtgttccagaagttcattgagagtgacaagttcacacgattttgccagtggaagaatgtagagctcaacatccacctgaccatgaacgacttcagtgtgcatcgcatcatcgggcgtgggggcttcggtgaggtgtagtgggtgccggaaagcaagacacgaggcaagatgtatgccatgaagtgtctggacaagaaacgcatcaagatgaagcagggagagaccctggctctgaacgagaggatcatgctttccctcgtcagcaccggggactgccccttcatcgtgtgcatgtcatatgcattccacacaccagacaagctcagtttcatcctggatctcatgaacggtggggacctgcactaccacctatctcagcatggagtcttctcggaggccgacatgcgcttctacgcagctgagataatcctggggcttgaacacatgcacaaccgttttgtagtctacagggacctgaagccagccaacattctcctggacgagcatggccacgtgagaatctcggacctgggcctagcttgtgacttctccaagaagaagccccatgccagtgtgggcacgcacggttacatggcccccgaagtcctacagaagggtgtggcctatgacagcagcgctgactggttctccctgggttgcatgctcttcaagttgttgcggggacacagcccctttcggcagcacaagaccaaagacaagcatgagattgatcgcatgacattgacaatggctgttgagctgcctgactccttctcccctgaactgcggtccctgctggaaggtctgttgcagagggatgtcaatcggaggctaggctgtctgggtcgtggggctcaggaagtaaaagaaagcccctttttccgttcactggactggcagatggtcttcttacagaagtacccgcccccactgatccccccacgtggggaggtgaatgcagctgatgcttttgacattggctccttcgatgaggaggacacaaaaggaatcaagttactggacagtgaccaggaactgtaccgaaatttccctctcaccatctcggagcggtggcagcaggaggtggcagagactgtttttgataccatcaatgctgagacagatcggctggaggcacgaaagaaagccaaaaacaagcagctgggccatgaggaggactatgctctgggaaaggactgcattatgcacggctacatgtccaagatgggcaatcccttcctgactcagtggcagcggcggtacttctacctcttccccaaccgacttgagtggcggggtgaaggcgaggctccgcagagcctcctgaccatggaagagatccagtcggtggaagagacacagatcaaagagcgcaaatgtctcctgcttaaaatccgcggtggcaagcagtttgtcctgcagtgtgatagtgatcctgagctggtgcaatggaaaaaagagctgcgcgatgcctatcgtgaggcccagcagctggtgcagcgagtgcccaagatgaagaacaagccacgctcacctgtggtggagctgagcaaagtgccactgatccagcgtggcagtgccaacggcctctgacccacccatctgctgcccgcctgcccacccgccttttataaacctctaatttattttgtcgaatttttattatttgttttcccgcaaagcggaaaaggttttattttgtaattattgtgatttcctgtggccccagcctggcccagcccccagggaggggcctgcttgcctcagctcctgctgccaccaaccaacccagccattgtctaacacccctgccctgacccccaactccccagggtccttgctgccagtgtcttcctgtagggaagaggagcgaccctcagcagcccccttgcccctccatggggtgaagccccatgaggtggtgtgccacttgaggctctgtgggctgtgctcagcctgtggcccagcacccccaccctaggaaggaaggtgcaacacagggatactacttgaactttcctaccacagccctcatgccacagggggacagacccccctgctgttctgtcctcttgccactggtgagagaaggcccttgtctccccagacctggaggtctcccacagtgactggctcctaggtccttgttcagggaaagcctctgtgtcactactgcctcagaagtctggcaatggcagtggctgctgctggcctccatacaagtcccctcttcttcccattgtgtgcccggactcagaggagcacagaaaaggcaattgtggattgggccacactggcctagcctgaacctggtcccccaaccctgggctgggtgaagctcacctgcccaggaccacagtgggacagcctgggcaggtgggtggcacagcagaggagcccagctggggccagtcctccttgtcccggctggccagtgtgtccccacccacactgtccagcccccaacccccgtcctgtcagtgccgccacccacaggtgccaccttgcccaccgcatgcccccttgtgccagtcgcgcagccatgtgtggtgtcgcaccctctccccctggggctgggccagcgcacccccctgtctactcactcccagggcgtttctttgacgatttttgaatgtgattttaaagagtggaaaatgagaatatgcgtttttataaaaaatggtgcctgaaaaaaaaaaaaaaaaaaaaaaaaaaaaaaaaaaaaaaaaaaaaaaaaaaaaaaaaaaaaaaaaaaaaaaaaaaaaaaaaaaaaaaaaaaaaaaaaaaaaaaaaaaaaaaaaaaaaaaaaaaaaaaaaaaaaaaaaaaaaaaaaaaaaaaa

SEQ ID NO: 350 - DNA, 3031 bp, Cricetulus griseus
  modified_base (285)..(285): a, c, t, g, unknown or other
gcaggagaaaagctgagtggagtccagttgagtcccagcaaccagcaagagatgaagaacaatgtggagagagtgctacagttcgtagcttccaaaaagatccgcatgcatcagacttcagctaaagatatcgtggaaggaaacctgaagtccatcatgaggctggtccttgccttggcagctcattttaaacctggctctagcaggacagtgagccaggggcgtgactccagagctcccgtgcagagtcatcaaccacactgtgctactgctgtggcccaaggngctgctgctgctcgagacagactctccattatcccgagactggaggcctgggagcccaggaacgtacctggaaaccacatgggaagaacagctattggagcaacaagaacatttagaaaaagaaatggaggaagcaaagaaaatagatttctggactacaggccttactactcaatggatccttacctgaagatgaacaggaaaggaacccttggccctctgtgaaccaggagtcaatcctgaggaacaactgatcataattcgaagccgtctggatcagagtatggaggagaatcaagacctcaagaaagagctgctgaaatgcaaacaagaagccagaaacttgcagggaataaaggatgccttgcagcagaggttgactcagcaggacacatctgttcttcagctcaagcaagagcttctgagggcaaatatggacaaggatgagctgcacaaccagaacatctctagcctcatggagcgtctgcatgtcatggagtcacagaagaaacaagaaaggaaggttcggggcaggtcactcagaactcaagcaagtagtgaataccgggcatcctggccccctaattcaacgctgcctcactcccagagttctccagccgtaagcagtacctgtactaaagtgctctatttcactgaccggtcactcacgcccttcatggtcaatataccaaagaggttgggggaggtgacactgaaggatttcaaagcagctattgatcgagaagggaatcaccggtaccacttcaaagcactggatcccgagtttggcaccgtcaaagaagaggttttccatgatgacgatgccatccctggatgggaagggaaaattgtagcctgggtggaagaagaccacagagagaattaactggaccctggacactccctggctgcttctctcaggaaagaggacggacaccagagtatgagaagttcctaatccatgctgccaaaaggaagcttcttcaagtatgatggtcgagggccagtcctgtttgtgtgcctggcatatcttagcacttaaaaatctctgtccagacacagagcatgggttcatctggagctccttgtccatgggaacagtgttcttttctactctgaggacaccaaaccgaaggccttaaccaccagggatggatgagccctctcttgtaggggcatggctgctattatctgggacccacaagtggatgcatcttggcctcaatggttgcagccatcacagtcccaacatctctgcctacagacaaggcaaaggtaccaagggcttttcgtgcttctctgcagacattgcaaaccaggaggaacttgtgaagtggtaccaaagatgaaagcccacttgtgtctgttgacctggacatggatgatgctgacttattgactgggtggggaaagggttgcccatatcctatgccaaatccatagttaagaccttgggctgcctcttctggttttaactgcttctgcagcttgtccttagcccattgcaggcatttttacaaactgctggttttctctggggactcattaactttagagccatttatttttctccaaacagatgaattttgtgtttgaaaagaataagaggcgagaggatgcggaaaggtgctgctgcccatttctctgtgactcaaaactcatggcatctcctttaatttcttgtttgtgatttgagtactgagcacgatgtactggtctgcctctcatttcaaggctggagttattttctgttacacatttagcctgggctgctcctttagggcacagtggaacccacagggcatggagcatgagttgtgaatggcagggtcaattcgaggtgaagagtcatttctcattgcaacattgtccagtgtagaagctaaaaagttcaacttccagaggttactcaataacttgggttttctcattcacacacctagcaccatccaccaaccaaccatgatatttctatagtccctcaaagcggtctccaaccaccgctgtacactgccaaacagaagaatgggacagatgggtcagtcttgggatctgcctgtctctgtcgtctcccattttcagccattttaacagactactctttggaactctgaggtaacatcttattgttttatatagacatgtcttttaaaaatagttcatgtttgagaattgttttgtactcgtttgcttttgtctgagaaccatgtctatttttgtaagtcacgtgtgacttcagtgtaatcccacatcccctgtactctgtccattttctagtgcccagtggcttttctacagtctcttcttaccacctcttgtggtttcagaacaagctttattttgttatgagtatactaatggcagtcaattcctgtccaagtctccctgctgttttagtgctggaggttttttttttaatttttagtttgattgctcttctaaagacatgagatcaaaaagccctttcaaaaagaaagcctttcatgcacgctaccctggtcttctattgaagaacaattttccatcagctgtaactaggaaagttcaggaaagtcagccataagcaagaacaactcattgggaaagccaacagaagaaaacagtattatttccattttttttttctcaagatgactggacggaataaaagtccgtatgtcaccaatttctctgttgcatgaattttgatgtttttgctatttgacagcatgaaggtgaccaggctaaactttgttactgtagtcca

SEQ ID NO: 351 - DNA, 3031 bp, Cricetulus griseus
aggaaagaatatccacctcatgtccaaaaagctgaaaacaaccctgtaatgttaagtcatgtccaaggtgtagaccatataatgaagggaacagaagagtcggaatcctatgtagagcctgaaattaagaggaaattacagcagaaacggcattgtagtacttatcagctatctccactgtcccctgcctcaaagaagtgtttgacccatttagaggtatctgaacagcgtgaatattgcccaaaatgtaggaaaaaaaaaaaaaaaatgaatccactggaccattactaagaacatcaattcatcagaattctggaggacagaagtcacaaaccacaggattaacagctaagaagttttatggtaacaatgtggaaagattccagttgatattttggtgacttgtgatgctagtagacataattacatacagactaatggaaaagtgattttacctgggggaaaaaataccctaaaattacaaacccgaaagaacgaaagacaagcgtgtcagatctaaatgatccaataattttgtcaagtgatgatgacgacgatgacaggactaacagaagagaaagcatatccccacagcctgccgactcggcatgttcttccccagcaccatctactggaaaagtggaagctgcactaaatgcaaatatttgcagagcagagcaggaatctagaagcaatccagcagaatcggagttaaatacagttgtcataccaagaaaagcaagaatgaaggaccagcttgagcatgcagctgcaaatgaaataaagaagagaaagtttggaatgattgtaaaggaatgaacaggttaacaagtttagaagaacagtacattattttaatttttcaaactggccttgatcctcaggcaaatgtggtctttgaaagtatcattactgacattggtataaagaataatgtttccaacttttttgcgaaaattccttttgaagaagccaatagcagacttgttgcctgtacaagaagctatgaagagagcatcaaaggaaattgtgtgcaaaaagagaacaaagtgaaaactgtgtcctttgaatctaagatacaacttagaagcaaaaaagaattgcagttttttgatgatgaggaagaagctggagagagccacaccatcttcattggccctgtagaaaaattgatagtgtatccaccacctccagctaagggaggcatctctgttaccaatgaggacctgcactgtctaagtgaaggagagtttttaaatgatgttattatcgacttttatttgaagtacttggtgcttgaaaaactgaggaaagaagatgctgatcgaattcatatattcagttcttttttctataaacgccttaatcagagagagaggagaaatgctgagacaactaacctgtcaatacaacaaaaacgacatgggagagtaaaaacatggacccgacatgtagatatttttgagaaggattttatttttgtaccccttaatgaagctgcacactggtttttggctgttgtttgttttcctggtttggaaaaaccaaaatatgaacctaaccctcattaccacgaaaatgcagtcatacaaaaaagttcaactgcacaggacagttgtgtttcttctgccagtgaaatggacagttgttcaccaaactcttctgccaagcccgtgattaagaagatgctaaacagaaagcattgcttgactgtcactgcgtccagtgctggacaggaagaaagtgagccttgttatcggagaaacacatacagtgtgaaatgcagtgtgaaaaaaaaaaatcatgctataagtgaaaacgaagaatcaaataacagagaatctgcatgccacgaagttactgatagaactaaaagtgagaatgacctacaggatgaatgtttaaattctgtacatcatccagatgccttaagcaaaatcagactaaactacggggatcagtcagctgaaggtggcaaaatgcttgaagatgaactcattgacttctcagaggatcaggatgacccggatgatagcagcgatgatggactccttgctgatgaaaactacacttcagaaataggacagtggcatttaaagcctactgtctgtaaacaaccttgtatcctacttatggactcactcagaggcccgtctcggtcaaatgttgtcaaaattctaagagagtatttagaagtagaatgggaggttaaaaaaggaagcaaaagaagtttttccaaagatgttatgagaggttccaacccaaaagttccacaacagaacaacttcagcgactgtggcgtatacatactgcaatatgtagagagcttttttgagaacccaatactaaattttgagctacctatgaacttgatgaactggtttcctccacccagaatgaaaacaaaaagagaagagatccgaaacataattctgcagctgcaggaagagcagagtaaagagaagaggctgctgaaggacacttcttcagcagaagcatccttaggagatggagcagagcagtatgccggcagtgtgtcagagtgactaagaggctggggcttgtagctccagaaatcacatggcgttcaccatgggttatagacagtacagagctgaagtgctcactgctcagagatttggggaattttaatgctgtaaaaatgtcacataagtaatttccaaaggagtatgtattaagtaaaagtctgtaaatatgttaatgaggccaatttttccaacatttataattattttttcacttttagggaacctttgttatgtattttctgttaatagtactgaaactgcaacttctaaacacaaataaataaactatttataggaggaaatgattaatttcatattctttagtgaacttgtataattcctcagagtgtgattttatttcatgggaatatatataagtatctatgttttttaaacctctgttctaaaatactcaaaaatgtgaaaatataattgttagagacattttaaactaagtatacaggactttttgcttgagtttt

SEQ ID NO: 352 - DNA, 3030 bp, Cricetulus griseus
catcgccagtacaactatgttggtggagaaatctctgagtgttattttgcttgtcgtcgctttagccatgctcattatagacctgagaatgaagtcctttctagctattctaaacttaataattttttttctagtattgttatttggtctcttcattggaaactcccaagaatccaattgcctttgtcgtgcttttttattttgcttagtaactgatccttttcttgacatttattttagtggactgtcagtaactgaaaggtggaaaccttttctgtatcgtggaagaatttgccggagactttcagtggttttcattggaatgatagaacttacattcttcatttctttcagcatttaaactcagagacactcatctctggtattttgtgatacctggcttttcctatttttggtaattttttggatcagccacagggcagataacaatagccttgatagaattatggcatccaaagggatgcgtcatttttgcttaatttcagagcagttagtttttttagtcttcttgcaacagcaattttgggagcagtgtcctggcagcccacaaatggaatcttcttgagcatgtttctcattgttttgccactggagtccctggctcatggtctcttccatgaactgggtaactgttgggaagaacctctgttggctatgctattgtgatccctaccaacttctgcagtcctgatggtcagccaacactgcttccaccagaacatgtccaggagttaaattgaggtctactggtatgctcaatggcatccaaagattctttgcatatcacatgattgagacctatggatgtgactattccacaagtgggctgtcttttgatactctacattccaaactgaaagctttcctttgaacttcggacggtggatggacctagacatgattacattatgtttttgtattatagtggggcacacccatggctcaggagagtggggctctggcaggtggagacatacttcgccttgatactcttttagaatggtggagagaaaagaatggttcgttttgttcccggcttattatcatattagacagcgagaattcaaccccatgggtgaaggaagtgagaaagattaatgaccagtatattgcagttcagggagctgagctggcgaagacagtagatattgaagaagctgacctgccacagctgggcgactttacaaaagactgggtagagtacaactgcaaccccagtaacaacatctgctggactgagaagggacgcacagtgaaagccatgtatggtgtgtcgaagcggtggagtgactacacccttcacttgcccacaggaagcgatgtggctaagcactggatgttacacttccctcgtattacctatccattagtgcatttggcaaattggttatgtggtctgaaccttttttggatctgcaaaacttgttttcggtgcttgaaaagattaaaaatgagttggtttcttcctacagtgctggacacaggacaaggcttcaaacttgtcaaatcttaatttggacaccaaggaaagatattactgagagttcatgttaccattcatcactaacttgccattttttgttatactgtatttttatttgtggaaaatatcttgctacttttgtagctgttctcactttgtcctttcttaagtaattatgggatatgtaagatactgggagtaagcatgattttatactaaaagtatacaaagggtcataaaaatgctgaatgtaaatgtgtaagagatgttaaaaatagcaaagcactttcaagtatgtttccatttctctgcattgaaaggaaaaagttgtctatgctctgcagtggccaatgaagaactaactcttaatgccttattttctaggcatacattagagaatatagaccatcaaatgtgtttactattttaagaaaactaccagtttacttaatagaagattccgtcatgtgtgtgattcataggtttgaccccaggactatctgcagaaaaataaactcttggagcacaaagagacctgctcatatgactgcaaaatgtccttcaccatcacacccaaatgtcttggctatgacctttaccagtacagcagagaagcccaaaatgcctttgtgatgaaaacattgttcatgtaggtaacaataagagtttagagcctacaaactgtttctttatgcattagtaagggactctgaaaatactggtaattttaagagtctttctcagggtaacttttatgttttcttaatgagtagtatttccagctacaattccttccaagtaaattgccattctttttgcaaagtactctttaaaaataaatgtagccatttctcattgaccagttcattcttttttaagtatctctgtggaattagtgctctgccatgaaaattatttttcagatcctattgtaaacttttttctgctgaaggtcaaaggatgggaacagatcatttttgttgttattgtatacctgtattgtattatgtgaaaaagtattcatgttggcaattttaggtaagcataatggtgtggttataatttttaaactttaattcagtgttttgttggagtaaagtaggcactgatcaagatatcacctaagaggtaattcagttcttgttcccttccaataatacttgcattccaaattttcatctttgaaagagggaaatataattacattgggagattagtttctgttaaagtgatatggcttcttaccactgaagccatttttccatccccagagagaagaggtaatgcatctaccatcttctaccaacctgaacactgaaagttttatttaggaagaagtcacagcatcagggaactcgtataccactatctatgcagcattgctacagcctgactatttctatgtttggaatattgtattcctaatactttgaataaaattttgttaaagattaaattttcatttaatgtgaaattaagagttactgtaatattttactatattaaaagtggtaggttaatagaaa

SEQ ID NO: 353 - DNA, 3027 bp, Cricetulus griseus
  modified_base (1044)..(1044): a, c, t, g, unknown or other
agaagatatcagagctacctctgtggcactgacatggagccgtggttcagacaatcacagtcctatctctaaatacactatccagaccaagaccatcctctcagatgactggaaagatgcaaagacagatcccccaatcattgaaggaaacatggaggcagcaaaagcagtggatttgatcccatggatggagtatgaatttcgagtggtagcaaccaatactttaggtacaggagaacccagtataccctcaaacaggatcaaaacagatggtgctgcaccaaatgtggctccctcagatgtaggaggtggggggtggaagcaacagagagctgacaataacatgggcgcctttgtcaagagaataccattatggtaacaattttggtacatagtggcctttaagccatttgatggagaagaatggaagaaagtgacagttactaagcctcattgctgtcatcaactcagcacaagacgctcccagtgaagcccccacagaagtaggggtgaaagtgctatcctcgtctgagatatctgttcattggaagcatgttctagagaaaattgtggaaagctatcagattcggtactgggctgcacatgacaaagagcagctgcacaccgagttcaagtaaccagtcaggaatactcagccaggctagagaaccttctgcccgacacccagtacttcattgaagtgggagcctgcaacagtgccggctgtggaccttcaagtgacgtgatcgaggccttcaccagaaaacgcccctcccagccaaccaccacgtatcatcagttcagtgaggtctggctcccgctatataatcacatgggatcatgttgttgccctctcgaatgaatccacagtgacaggatacaagatactctacagacctgatgggcagcatgatggcaagttgttctcaacccataaacactccatagaagtcccaatccccagacgatggagaatatgtggtcgaggtgcgagcacacagtgatgggggagatggagtagtgtctcaagttaaaattcaggtntgtccatgctgtcttggagtctcctcagcgttgcatgattcaattcaatggacaagttacagtgttcaatttaataccataggctgtagagtgaaagtaaaatcaccatacatggtgctttacatttaatgacaagttgtgaaatttaatagaggttgaaatgttgattgtatgtggtatgtgtaaagtaatgtagtctcttatattagcctatctgtttgggtactgcatattttcaacccctgccattcatcattattttgagttttccataaaattaaaaacaaaaaaaatagaaaaaaaaacgttttgacataaacaccgttaccaaatcaccttactgaatgagttgaaagtttttgactgtgaaaaccaaattatagaacttactatcagtattcttatttttgaagtaattttctacatatttgcttttcagaatctgtaagcctcttccgttagttttctaatgctgaagttcccatgccatgtgactaattttttttttttttttactttttctattctaatctgaagtttgtttttgtgctttttcctctcatcactgtcaagccacagaactttgcagctcatcctggagcactggctactgcttcgtgtgtccatatgtggagtggcaggttttgggggtagtgtgcttccatttttattcaacatgatagtctttatacagttagaaataagtgacagtacagtatcagaatcttggaatgttctcgttgctccagttttgtgtttcatgcctaactataagctctctttatagaaggtgtagaatcaagaaatcatatgcaggttgaaaaagttacagaattccatttaaagaaatttaaagctcatttcctattccaatgcaatactgaaaactggctaaaaataccaaatcagaatgttgctagtggtcctaggaagaatatgcaaagctgggaggcaggagaggtagacagtgtcctatccagggatgtctcccaagtgtttatgtggaggattttgtgagatgtgaaagggaaatctgtgtttcctcatttattcacagtgtgcacggagatgtgtctgagtgtgggtgcgaaagaactcgggtaataaaaaattagctggctcctggaatagtgcaatgtttggttccttgagaagtctaatcctattttattagcacaaatttgctggctaattagagacagagtttatctttttagaaaggataccctataggtccataaagaatatttacaggaagcaaaaatagatctattaatatgttacccctatctttaatttgtataatttttgtactatatgtgtaaatgttaaagtcctcattatgaaaatatcaataaatatttcattgatttacacttaacactttgttatacaaatgaagctttttaaaatcagtaaaacagatgctttcccagtagaagtatgtcaacaaatcattgacagatttcataaaatatttaaagatttgaaaacagaagaaaatgacttcatactttagggagatgaacactctgtaagctttctgtacaaatgttgtgttttccttgttacatttggggttttcctcttgcgatgtgacccatgttgggcatttttatatcatcaataatgactacatcttttgccaaatgcatgcctgcctttttattttctaatatatggtaataaagaccaaaactggctagattttgcatgaaatggttctgaaagataagaaaacagacttgaaggttgtttagttttaagtatgtggtggatagactcaactctcatgcactaatgacgtctgcttttcattttctcatataattgtacagaagtgactgggaccatcagttttaaatggttatcaagctaaccaatgtatcatatgctttaagatgcaagattctttaattaaactttatatagatatagacacatctgttgtttctttgttatttcagaaggtaatagtagttt

SEQ ID NO: 354 - DNA, 3025 bp, Cricetulus griseus
gtggatctgcacgtggatggtgtcagtgacatctgcacgcagggtggagacatcaactttgtcttcactggcttctctgtgaatggaaaggtcctcagcaaagggcagccactgggccctgcaggagttcaggtgtccatgagaagcacaggcactgatgcgaagatccagtccacagtcacacagcctggtggaaagtttgcattttttaaagttcttcctggagattatgaaatccttgcaactcatccaacctgggcgctgaaggaggcaagtaccacggtacgggtgacaaattccaacgctaacgcagctggtcccctaatagtggctggctataatgtatctggctctgtccgcagtgacggggagcccatgaaaggggtgaagcttcctctattttcttctttagtgaacaaagaggatgtcctgggctgcaatgtgtccccagtgtccgggttccagccccagatgagagcctggtctttctattccttgccgagcgggggctacactgtggtgccgttctacagaggggagaggatcacctttgatgtggcaccttccaggcttgacttcaccgtggagcatgacagcctgagaatcgagcccgtgttccacgtcatgggtttctctgtcactgggagggtcttgaatggacctgaaggagaaggtgttccggaggctgtggtcactctgaacaaccagattaaagtcaaaacgaaaggtgatggctccttccgcctagagaacataacaacagggacatacaccatccatgctcagaaggagcatctctactttgagatggtcaccatcaaaattgcacccaacaccccgcagctggctgacctcgttgctacaggggaactatcatcacagacaaatgatggatgtcacagtgactatcaagtcttccattgacagtgagccagccttggtcctgggccctctaaagtctgcacaggagcttcggagggaacagcagctggcagagattgagacccgcaggcaggagagggagaagaacgggcgaaagaaaaagggtgaggaagggagggccaggcctcctggacaagagatggtggacgagttacagggccccttctcttacgacttctcctactgggctcggtctggagagaaaatcaccgttacaccctcgtccaaagagctcctcttttaccccccatccatggaagccactgtcagtggagaaagctgcccagggaagttgattgagatccacgggaaggcaggcttgttcctagaaggccagatccacccagagctggagggagtcgagattgtcatcagtgagaagggggcaagttcacccttgatcactgtcttcactgatgataagggtgcctacagtgttggcccactgcacagtgacctggagtacactgtgacctcacagaaggagggctacgtgctgaccgctgtggaaggaactgtgggagacttcaaggcttatgccttggctggcgtgagcttcgagataaaagctgaggatgatcagcccctccctggggtcctcttatccctcagtggaggtgtgtttcgttctaacctcctgacccaggacaacggcgttctgacattctcaaacttgagccctggccagtactacttcaaacccatgatgaaggagttccgctttgagccctcctcacagatgatagaagtacaggaggggcagaacctgaggatcaccatcactggcttccggactgcctacagctgctatggcacagtgtcgtctttaaatggagaaccggagcagggtgtcgcggtggaagctgtgggacagaaggactgtagcatatatggagaagacactgtgacagatgaggaggggaagttccggttacgcggactgctgccagggtgcatgtaccatgtgcagctgaaggcagaaggcaatgaccacatcgagcgggccctgccccaccatcgggtgattgaggttgggaacaatgacgtggatgatgtgaacatcatagttttccggcagatcaaccagtttgacctgagtggaaatgtgattacttcttcggagtatctttccactttgtgggtgaagttgtacagaagcgagaatcttgacaaccccatccagacagtgtcgctcggccagtctctcttcttccacttcccaccgctgctccgagacggcgagaactatgttgtgcttctggactccacgctctccagatcccagtatgactacgtcctgccgcaagtctctttcactgcagtgggctaccacaagcacatcactctggttttcagtcccacgagaaagctacctgagcaagacattgcacaaggttcctacatcgccctgcccctgacattgctgctcctgttggcaggctacaaccatgacaagctcattcctttgctgctgcaactgacgagtcgtcttcagggagtcagagccctcggccaggtggcctctgatagcagtggcccagaggacatgaagagacagaccaagaaacagaagaccagacgcacgtgaggaagaaaggctcgtcccctgcagatggcacaaccagggctgccacctgcctgggacaaaagcacatactcactcacttcaggcaggccctgggccctgtgacccttcttttggtgtcctgcctgtctgtcctctcctgtgtagccctgtggtgcaatgcgacgaatggactctcctgtcaccctgctgaacacaatttattttctgagttgaagataatttattattattatttttgtcagagaagtatttaagctgagctggtggcgtgagaacgtaattcatatcttccacattcgtttgcaagaagagtccagtaaacacggcatttgtcttcatggtgaatacctgctggacttcccccaactcccctctgcacttggccccctggaagctgcagcagcatctgttcacaccagaaggacctgtcaagagctggaatgaataaagtcacccactcatttgtgttgtaaaaaaaaaaaaaaaaaaaaaaaa

SEQ ID NO: 355 - DNA, 3024 bp, Cricetulus griseus
tgctgtgactgagcgacctgtcctgggctgtgtcccagtgtcatcgcggccctcaacagtctctgcgacctgaaggcggaggccagacacaggcaggctgggtggaggtagtggcctcagaagccccaggcccggttgcagcctcgggtgcagcttatttttaagacacaatgaaagccttctatgctttctgtgttgtgcttttggtgtttgggagtgtctctgaagccaagtttgatgatttcgaggatgaggaagacatagtagagtatgatgataatgatttcgctgagtttgaggatgtcatggaagattctgttacggaatctcctcagcgagtgataactactgaagatgatgaagatgagaccactgtggagttggaagggcaggatgaaaaccaagaaggcgattttgaagatgcagatacccaggagggagatactgaaagtgagccgtatgatgatgaagaatttgagggttatgaagacaagccagagacctcttctagcaaaaataaagaccccataacaatcgttgatgttcctgcacacctccagaacagctgggagagttattatctagagatcctgatggtgactggtctgctcgcctatatcatgaactacatcattgggaagaataagaacagccgactggctcaggcctggtttaattctcatagagagcttttggagagcaatttcaccttagtgggggatgatgggactaacaaagaagccacaagcacaggaaagctgaatcaggagaatgagcacatctataacctgtggtgttctggccgagtgtgctgcgaaggcatgcttatccagctgaggttccttaagaggcaagacttgcttaatgtcctggcccggatgatgaggcccgtgagtgatcaagtgcaaataaaagtaaccatgaatgatgaggatatggatacatatgtgtttgctgttggcacgcgcaaagccttggtgcgacttcagaaggagatgcaggatctgagtgagttttgtagtgataaacctaagtctggagccaagtatggattgccagactctttggccatcctgtcagaaatgggagaagttacggagggaatgatggatacgaagatggttcactttcttacacactatgctgacaagattgaatctgtccatttttcagaccagttctctggtccaaagattatgcaagaggagggtcagcctttaaagctgcctgacactaagaggacactactgtttacatttaatgtgcctggctcaggtaacacgtacccaaaggatatggaggctttgctacccctgatgaacatggtgatttattctattgacaaagccaaaaagttccgactcaacagagaaggtaaacagaaagcagataagaaccgtgcgagagtggaagagaacttcttgaagctgacacacgtgcagagacaggaggctgcacagtctcggcgtgaggagaagaaaagggccgagaaggagcggatcatgaatgaggaagaccctgagaagcagcgcaggctggaggaagctgctttgaggagagaacaaaagaagttggagaagaagcaaatgaaaatgaaacaaatcaaagtgaaagccatgtaaagtcaccccagaggtctccgtccatgtcacctgtaagatctgcgtccacaggaaacgggaaaagcacgaaccttttctcccttaaagtccacatagtcctggtgactgagagtccttatttcaccccctcctcttggtttggagttctacagaggttgtagatatattgaaagggctttcagttatttccttccaggtaatcaaatcagtttgttttataaaagaatggtatataaagtatgtgtagttttaaaatatttttaaattataacgtggatcatcagtgctttactttggtgtttgaagaacaatcatgaaatttctagataggttgttgctttttgtttaaactgggcaattggagactgactctaaaccaagatccccagagtttctattggaattgcacaataaacattgcttgttgttgtttctgtgtccacattagactcgtgaaaaagtggaacttagaaccctgtatgtggagatggatttcagagacttagaacatagtacagtgaatatttcgtatgtgggtggtgctgatgacagtattacaggaggaaatctttaggtgttaggatactgttaagttcatggaagattctagaggtaggtagtacaggagcagtttctccttgcctgatactatgagttaatgacagggtgagtgttgaatttgaggtagttgtgtgtttatttttcctgagtaagaaatgcatgaggtatgtactttcttgaaaacaaaaaaagtagccattggtatgcatacatatgcttttaaaaagtgagctttcttaaatggttcagagttttgtctgcctcagaggaagctcttgtggggagagccccccacccccatctgcataagcatttggctttagatctctgcattttataaatgcttcctactgagaaagcattttttaagtcactgtttgtaccaggtaatttttgctgggatgggacagagttgttttttgtttttgggagctgggtggtgggttgatgctttttgtgttctgaggcagtaaccatgagttgcagtgaaaactgtgtgctgttgtcttgagaattagatggggttttcatgtggttttgtctaggttaatagaaatgtgtgcactgggatatgcaggtgtatgctttttaacagttcacaagttttaagttattaagaataacacaaaattgaatcactttaaggccatatgattctaggcttaacattgttttacaaatctttaaatacattttagaatcaaaacttatgtgcttagttttcttttgagtaatataagctttcttaaagtcccatacattcggactgtggcagctaattttgtaatttaagcattcatatgaactacctatgacataattaaaaaatgattgaacaaaa

SEQ ID NO: 356 - DNA, 3022 bp, Cricetulus griseus
tcctgtgtgtacatatcttcctctcctgatgaggttgcactggttgaaggtgtgcagaggcttggtttcacatacctgagactgaaggacaattacatggaaatactgaacagggagaatgacattgagagatttgaactgctagaagttctgagttttgactctgtgcggagaagaatgagtgtaattgtaaaatctactacaggagaaatctatctgttttgcaaaggagcagattcttcaatatttccccgagtgatagaaggcaaagtggaccaggtccggtccagagtcgagcgcaatgcagtggaggggcttcgaaccctgtgtgttgcctacaaacggctcgagccagaagagtatgaagatgtttgcaaactgctgcaggctgccaaagtggcacttcaagatcgggagaagaagttagcagaagcctacgagcacattgagaaggacctgattctgcttggtgctacagctgttgaggaccggctccaggagaaagctgctgacacgatcgaggcactgcagaaggcgggcatcaaggtctgggtgctcactggagacaagatggagacggcctcagccacctgctatgcctgcaagctgttccgcaggagcacccagctgctggagctgaccaccaaaaggctagaggagcagagcctgcacgatgttctgttcgagctgagcaagactgtgctgcgctgcagtggaagcctgtccagggactccttctcaggactttcgacagatatgcatgactatggtttgatcatcgatggagctgccctgtccttgatcatgaagccccgggaggacggaagctcctcaggcaactacagagagctcttcctggagatctgcaggaactgcagtgcagtgctgtgctgccgcatggcgcccttgcagaaggcccagattgttaagctaatcaagttttcaaaggagcatcctatcaccctagcgattggtgacggtgcaaatgatgtcagtatgatcctagaggcccacgtgggcataggtgtcattgggaaggagggtcgccaagctgccaggaacagcgactatgcaatacccaagttcaagcacttgaagaagatgcttcttgttcatgggcatttttattatatcaggatatctgagcttgtgcaatacttcttttataagaatgtctgcttcattttccctcagtttttgtaccagtttttctgcggattttcacagcagactttgtatgatactgcgtatctgaccctctacaacatcagcttcacttccctcccgattctcctgtacagccttatggagcagcacgtgggcatggaagtgctcaagagagacccatccctgtacagagacatcgccaagaacgcgctgctccgctggcgggtgttcatttactggacgtttctcggcgtatttgacgctttggtattttttttggtgcttatttcatgttcgaaaacacgaccgtgaccagcaacggacagatttatcagcggatgtactatgtattcatacacatgctgtccagcgggcctgcctggctgggcatcacactgcttgtcactgtcagcctgctccctgatgtcctcaagaaggtcttgtgcaggcagctgtggcccacggcgacggagaggactcccagccagagcttaggagaaagccatccccatccccgtggagtcatgtgtgggcctgggaccatagtgagggtcacagacacttgagagcctataacctgggaagcacaaattttgtaacatgattacccaatatgtgctcaaactaggggaccagccgacagtaggagcaactattggacctggcagctgggggagggcgggtgaacataaacaccacaccaaagatggggaggatggccttgagctgtgaatagacagaagaatgtacagctccgctaagggctgtccctggctccacaccctcatgcccgttcacccacctgcgtcaccatgtgtcagcccagggttggagccccagtccgcactaagcccttaaatagtggtgtgtgcatttttacagccctttttaagaacccaaaatgggtacaaacatgatacctacagggaggggcaggttctctgtatgtttagttaacaaattatttgtaatgtatttttttagggatcttaaaattgcctttgcactgaagtattttcatagctgtttctatgtctcttattcatttgttgatgtaccttctgatttttaagtatgctgttaaagctttcactttttaatttaagtactgagcactttttctaggagcagctgccgaatgtcttgagtgtgccatcttggtcacccaggtcactgagcatcagccaagtctctggtggtctagagaaagctccagcctggtctctgaaccccaagttcaaggtgtacctgcactgattggtactggactccccatccacacttatctcgtcctaatgtaatttattggcaatgccacacaacagcaggccctgatgttatacatttttttggaagtttcccatttatgctaaaaacggggaaaaattcacttggcgaatgcaatctttttgttttaaatgctagaagacaggtgaacagaaagtggttctgatactgtgtctaaacaaagctttaatgaagatgtgtatgttggaagtattatgaaagtgtgattctaattttgcagaaaaaatgtctatcaatttatatagctttattttaccttatcaaaagatacagaattttaatatacagatattgtctgacttaaaatcatgtgtgtctacattaccacttaaaatgtccatttacaatgtaatgtatgaacaagagagaatctaagatgtatttaacatgaatggttacctgtagctatcatcgtcataagtactgaatttgttttaaattatcaaatatagtaagtacactaaacatgtcattctccaacactaatgtttaaccgatagcccagtaacctgctttgaaaaatgtaaattaaaccagatcaaacgtc

SEQ ID NO: 357 - DNA, 3018 bp, Cricetulus griseus
catcagttgtggaactgaaacagagttcagtgatgcagcgattgctcacaggctggatgcccacagctataaggggtgaccaagggccttcggatcgtgccctcagtcttgccgttcattgtgttgaacacgatgctttccttttgccctgtgtcaggatcataaactacggatgtggtcttataaggaccaaatgtgcttgatggtggctgacatgttggaatatgtccctgtgaacaaagacctccggctcactgcaggaacaggacataaattacgacttgcatattcaccttccatgggcctctacctaggaatatatatgcatgctccaaaacgaggacagtttcccagctctatggtagtagcacagcagggtatattgtgtgcagaggtgtgtataaaattgccagcactcgtttcctgatctgccgagacctcttaatcttacagcagctgttaacaaggctaggagatgcagtgatcttgggagctggtcaactctttcaagctcagcaagacctactgcatcgcacagctcccctgctcttgtcttactacctcattaagtgggcaagtcagtgcttggcaactgacgttccagttgacacactggaatctaatctgcaacattgtcagtactggaagtcaatgttggatcctgtcgatttatgctgggacggtgttacctggtttacaggagaagtacagaaggctctggaatgtttctgttcaggcagcatctgaagtgggcaaagaagaattcttagatcgcttgatccgctcagaggatggggagattgtgtccactcccaagctgcagtattatgataaggttttacgtctactcgatgttgttggactgcctgaactggttattcagctggctacatcagcgattactgaagccggtgatgactggaaaagtcaggctactttaagaacatgcattttcaagcatcatttggacttgggtcacaatagccaagcatatgaagccttaacccagattcctgattccagcaggcagttactgcaggatcttgtagagtttccctatgtgaatctgcataatgaggttgtgggaataattgaatcacgtgctagggctgtggaccttatgactcacaattactacgaacttctctatgcttttcacatctaccgccacaattaccgaaaagctggtacagtgatgtttgaatatggcatgcgtcttggcagagaggttcgaactctccggggattggagaagcaaggcaactgttacctggctgctattaactgtttacgccttattcgtccagagtatgcatggattgtacagccagcctctggggcagtgtctgatcgccctggagcatctcctaagaggaattatgatggcgagtgcacagttgccccaaccaatcggcaaattgaaattctggaactggaagatctggaaaaagaatgctctttagctcgaattcgcctcacgttggcacggcatgatccatcagcgattgccattgcaggaagttcatcagcaaaagagatggtcactctcttagttcaagctggcctctttgacactgccatatcactctgtcagacttttaagcttcccttaacaccagtctttgagggacttgcttttaagtgcatcaagttacagtttggaggagaagcagcacaagcagaagcctgggcctggctagcagccaatcaattgtcttctgtcatcactactaaggagtccagtgctacagatgaagcatggaggctattgtcaacttatttggaaagatacaaagtccagaataacttgtatcatcactgtgtaattaacaagttgttgtctcatggagttcctttgcctaactggcttataaacagttacaagaaagttgatgctgctgaattgcttcgtctgtacctgaactatgaccttttagaagaagctgtggaattggtctccgaatatgtagatgctgtgttagggaaaggacatcagtactttggaattgagtttccactgtctgcaacagcccccatggtatggctcccatactcctctattgatcagcttctccaggctcttggagaaaacagtaccaacagtcacaacattgtactatcccagaaaattcttgacaaactagaagactaccagcaaaaagttgacaaggcaacacgggatttattataccgtcgggacttgtgatctagatagctactcagcctttgtaaccgattggtgcctcttagggcttaagactactccatagaaaccctgtgttcaaggccattttttataactgtaaatgatgtatatggcccttgagcctgcattctgcacaagataagagaacaggagagtcgggaccggccccgtgcttgctggtggtgctgtcatggtttctggttttcaaccttcttctccaacggctgcttttgtatattattctcaagctttttcagagtttatatttttttaaactaccgaagacatcctatatctgtaaatgaaagctcagcttcactttccataatacctaatggttgttggcttgttataactggccaccaaatagtcactgcatatcttttaattttttcttatctttttttgtatttcagtgggattgttttggtccagaactaacatgtattttctgtattacaaacaaaggctagtggttttgcatactcttttcattatttattgtagagtttttcatatgaccatcaataaagtattaagtaatttgcctagattaagtataaattatgaccaactttttaaggaaaatatattttgagtctggctctaaggctaaacgtgagaaaaaaaataatgtccatcatctataaaagaaacagattttcattttcaaagtgtactaatttatgtgatttataataatcaagctggacttgatcgtacagttagtctgataacatattggaccaaaatagaatttactactgaaatcagaaacatttatgcatacaaactttgggaaaggtaaaaaa

SEQ ID NO: 358 - DNA, 3017 bp, Cricetulus griseus
cggctgcgggcctcagcctcctgctcgcactggcgcgagtgcctcttctacccggcgctgtggccccagctccgcatctgcctccgcgtctcgcccgcggagcagccgcggctggagttcctcatgcgcaagtgcggctggttcgtgcgggagctgcgtgtcgagttcgccgcggagaattccctgagcggaggcggcggcccgggcgacggcggcggcgggggcggcgccgacatgggcaccgagggcgaggacggcgaggccctgcggctctcctctcgctggctggaagtgctgcgcgtctacttggagctggtgttgtgcgtgctgctcagcatccgcaacaacaggggtttatgctggaaatagtgaccccaacatccttgtcgtctctgtctaactcaattgccaatactatggaacacctgagtttactggacaacaatattcctggcaacagcaacgcttatcactgcagttgaactagagcggtttgtaaatctgcgttcacttgccctggatttctgtgactttacagcctgagatggcaagagtcttaactgatagcaaccatgtgcctttgcagcgactgtctctcctggtccacaatgtttcagtgatgaacaagtcattagacaacatgccaaacgatgagcactggaaagccctatcacgaaagagctccagccttcgggtctatctaatggcttttgatgtcaaaggggaagacatgctaaagattctgaagcctagtataccacttgagtagggttcactttgacagctacatcacttgtgtctcgaggggctattgttgatcttatatccaggcagtacgactaagttcctcaccctattttatattgatgaatgatgtcattgacacgtctggttttccagatcttagtgacaacaggaatgaagatccgttggtttaattagcatggaggtgcacaaagctcactcttttggcaattcatggttacaccggtgtgggcacacaacctcattgccattgctcgtcttcgtggctctgatctaaaagtgcttgaagtcaccgaagaaagcattgattttgaccaaggtgaactagccgaccaggatgtggatccagtgaataaccttgttgagcaggtatccctgggccttggtcaaccttggcatgcagtcttggacattgaatcactcagtgtcttcactgaaccaaatcgtcatttttacagagagatgcaaagcttcagcgaagacatttagcttttttaaaaatgtataattcctgtggccagatatgcaagtagggtcccattatggttttctgttttgttcagtagtgtaaactaatcccttttgtgctgtgtttaatcagtattagctttatagaactatatatgtatattctacttcttgatcaaagaacgtagtcgggtattggtttttgaagttcaaagtgacaatgtacagggctttcacggttaatgagattgttaccaaaccttaagggcaaatagccaatgattatctgaggttgctggctaactttgtttttcactgagttattctgccttgttgacatttttattctttctttgtcagaatccagagctcaggagcctaatatttttatacatatatatatatgatatccatagctgggtggatttgtatgcaatgcactgcatctatgtcttctgatagcatctcattgactttggtttgaaatagaagggaaaacagtgtcccaaatgagttatctgtaacagaaagctgagtttaactttcattccctatataataattcatattgccaattaccattctgaatttcatatagcataagttagacattgcttaatccctttttagatgcatttacataaactgaacactcaaatagctggactttttagactatatctgacatcaatttttttcacctgttacattcaagttagcttcattagcccagatgtcacacagtgaggaaggaagaaaagaaccatattccagggaaacctctgaggctaagtcaaagcacagaactgtagacacacaggtttgcaaaccaacattagtcgtgaaatccctaacaagtcactggattctctctgtcagcgcgagtgtcagctgccaaagaatagatttacatgaagaagtgcccacatgctggcagggcctggcttgctttggccagccagatactgctagattgtaatatttaaggtcgaatttcgacctgtggtacacagctgtgctgtggctcagtcagcaacctcagaactatgaaaaaaaaaaaaataaaaaaaaaaaaaaaaaaaaagaaaaaaaatagcacctgtttcactgtgaatagtgaatgtaaaggaaaggaaggaaaaaccaaaagcttgttccatcacaggtatgagctgctatgatacatgaagaacattccatgaagtatgttttaaaaccttgttatatctgagcggctttaaaagccagtttaactgtttcagggcaaccgcggtacagacgtggtctctgtgagacttccacctgacccaagttttaagaggtacgaatgttgtgcatttaatgttaaggacagtctgcaataataaagtaagtagccaacatgggtgcccagcagtgctgagacctggctgctctattgtaagctttggaaacacaatttatgcaacagatgtccagatatgattctatttatggaaaaagtttatatgttttacaaatggttttaccatcttatattaaatgaccttttgacaggtgtgcacagttttgtccagtgagcacctaccttgaggattttatatgtacatcagtagtatgaatccactggcacagtgtgtgtaaatgccagatgtggtgagattttaccttgtatatgtgatcagataaaataactcctgacagaatctgtaaggaaaccagctgaatgtttgacctgatgactgatgttgtatggtttatgttaaatgtatattcttttaatcaatgaataaagcaattaaaaa

SEQ ID NO: 359 - DNA, 3016 bp, Cricetulus griseus
  modified_base (2257)..(2257): a, c, t, g, unknown or other
ccgggcgcggaggtgattctacactgagggggaacgcggcggcaagggtggcagtggcagcgttcgtgtgctcgggtccgaatcactgagggaggaggcggtggaggaagaggtggcggcggtggcggtggtcgtagcggtggcggaggaggcgggtacgaatcagctgcgggcagagacatggccaacatcgcggtgcagcgaatcaagcgggagttcaaggaggtgctgaagagcgaggagacgagcaaaaatcaaattaaagtagatcttgtagatgagaattttacagaattaagaggagaaatagcaggacctccagacacaccatatgaaggtggacgctatcaactagagataaaaataccagaaacatatccatttaatccccctaaggtccggtttatcactaaaatatggcatcctaatattagttccgtcacaggcgctatttgtttggatatcctgaaagatcaatgggcagcagcaatgactctgcgcacggtattattgtcattgcaagcactgttggcagctgcagaaccagatgacccccaagatgcagtagtagcaaatcagtacaaacaaaatcctgaaatgttcaagcagacagctcgactttgggcacatgtgtatgctggagcaccagtttctagtccagaatacaccaaaaaaatagaaaacctgtgtgctatgggctttgataggaatgcagtaatagtggccttgtcttcaaaatcatgggatgtagagactgcaacagaactgcttctgagtaactgaggcctgggagctgccaccagccacgctcgcctcttgaggagcaccaacatctgttattttaggattctgcataaatttcttttaaactggcattcttgcctaatgatgttatctaggcaccattggagactgacaaaaaaaaaatattacctgttagtgtttagcagtataacaagactagcgagtttgcttcagggttctgttgaataactaggattaacactgagtgtctcctgctcacattgtcctgttgcatcacagctaccttaagcgtttgaacatggatcctctgtgcctgtgaatttacttgcatgcttgtacttgacttcttaggatgggtagctgaaatgaccacccttttaagtgttagagattcttgaattttgagatttattcagattttgttaccatccagagctaagattctcatggtgaatttctctgtgtttggtgggaaacgtgctgaggaagtgtcccttgttccattttaggtcataggtttgaaatgttttgtccgagttcttcactatgtaagtaataatgtaaaaatggggctgcaaattttatttctcttacaaaagaattaacacttgatgttgcagtattcccagatttaataaaaggaccctacttagtttttcagtgaatttgacatttttaaactgatcaatctttggaaacttgaaggatgcagactcttcttgctccccatattgacacataaaagctgttgtgtctcactgtacatacttcagatgcacataggaataggggtgtgttataaatctagctttctttatgatgtttctaataatgtgagaattgaaactttcccttctcttgtacatagacttcctgttcttattgaccgtcacatctaagttccaaagtttgaaaactctttgttttgaaaattcaaacacataatttaaccatcttaataaggttcaagtgaatttatgtaggcagttattacataggagatacaattatgaattttgaggaccaatgcataaataacagaaatgtaaatggaatcagactataacattaaagatgtgaaggttcttcgagcaatttgtaaggctttcacagttaacagtgactcttagggttgctgtcctgcacactaaactcaagctgctatgttgttctccatgtttgcggatgcacacatttcctgttgcagccacatcctttttttttgctgtagtttattttctaaagatgccaaggaaacaagtttttctttatttattttaaatagctaaaactttgtacttttctttatattctgagattagatggaattgtgtgaagtcatgggcagttgtgctccattattgactagatttttttttagtggaggtggcttggtaatactaatatttggatatttaaaagtatgaaatactctaggggtttaccctttgcctgtattatcagggaatattatctcttttttttttttttntttttttgtttttttgtttttttgaagtaagatgttcttgaaatccagtgtagcaacaccagaaatgaagttttggtggtataaggatttaagatgaattcgggcagaaaatagtagtcaggtatattgtatacatagatggaaccagtgtttagataggaaaaaggaaaaggaaggtgtctgtttacattttattttatggactttgacaaaatgattctgtattaatcactttttctagttccaaggagtaagatgtttaaaagctgaatttccatccttcagcccctgttgaaatgaaaaaatgcatacccatcagcctgttggtgtcactgaggtaaggtaggggaatgatggtgtctcccttgcctatcaagctctgttactgctttatttactgctaggacctcagaagcctcaatcatcaccacaaggtgtcatgattgtgtcacctttggcttggttcgtccaccaagctgctgtctgatcaggtgtggcacaggtttgtttagttcagaggcaagcacttccagtccttgcactgtgcggtagctctgatcatgtctgctttctgtcatctactttttacaggcatcataataaaagctagacaatttcttttggagaaaagagacttatttaatgtaatttaaagacttttccaatagaaaatgaaatattattattgaaaatatctattttttagctttcagcaattgatggtgctttgttgtggtgtgtgctggaagttactgccat

SEQ ID NO: 360 - DNA, 3012 bp, Cricetulus griseus
atggagaggcagacctcggagcaggcgggcgagcgacatccagacctgagcgagtgtggcctgatggggtcatcccctttgttatcggagggaatttcactggcagccagagggcagtcttccggcaggccatgagacactgggagaagcatacctgcgtcaccttcttggagcgcaccgatgaggacagctatattgtatttacctaccgaccctgcgggtgctgctcctacgtgggtcgccgaggtgggggcccccaggccatctccatcggcaagaactgtgacaagtttggcatcgtggtccatgagctgggccatgtcattggcttctggcacgagcacacgcggcccgaccgggaccgccatgtctctattgtacgggagaacatacagccagggcaggagtataacttcctgaagatggaggttgtatcatgcactatgctcggaacacgttctccaggggtatcttcctggacaccattgtccccaagtatgaggtgaaccggggtgaagccgtccatcggtcaaaggaccagactcaggcaagggggacatcgctcaggcccggaaactctacaaatgcccagcctgtggcgagaccctccaagacagcaccggcaacttctcctcccccgagttccccaacggctactctgcccacatgcactgtgtatggcgcatctcagtcacgcccggggagaagatcattctgaacttcacatccatggacctgtaccgtagccgcctatgctggtatgactatgtggaggtgcgtgacggcttctggaggaaggcgcccctccgaggccggttctgtgggggcaaactccccgagcccattgtgtccactgacagccgcctctgggtggaattccgaagcagcagcaactgggttggcaagggcttctttgccgtctatgaagccatctgcggaggtgatgtgaaaaaggataatggccatatccagtcgcccaattacccagacgattaccggcccagcaaagtctgcatctggcggatccaggtgtctgaaggtttccacgtgggcctcacgttccagtcctttgagattgagcgtcatgacagttgtgcctatgactacctggaagtacgagatgggcacagtgagagcagcaacctcattgggcgctactgtggctatgagaagcctgatgacatcaaaagcacatctagccggctctggctcaagtttgtctccgacgggtccattaacaaagctggcttcgctgtcaactttttcaaagaggtggacgagtgctcgaggcccaaccgagggggctgtgagcaacggtgcctgaacaccctgggcagctacaagtgtagctgtgaccccgggtatgagctggccccagacaagcgtcgatgtgaggctgcctgtggtgggttccttaccaagctcaatggctccatcaccagtcccggctggcccaaagagtaccctcccaacaagaactgcatctggcagttggtggcccccacccagtaccgcatctccctacaatttgacttcttcgagactgagggcaatgatgtttgcaagtatgacttcgtggaggtgcgcagtggactcacggctgactctaagctgcatggcaagttctgtggctccgagaagccggaggtcatcacttcccagtacaacaatatgcgcgtggagttcaagtctgacaatactgtgtccaaaaagggcttcaaggcccacttcttctcagacaaggacgagtgctccaaggacaatggtggctgccagcaagactgtgtgaacacctttggcagctatgagtgtcagtgtcgaagtggcttcgtccttcatgacaataagcatgactgtaaagaagctggctgtgaacacaaggtgacatccaccagtggtaccatcaccagtcccaactggcctgacaagtaccccagcaagaaggagtgtacgtgggctatctccagcacccctgggcatcgggtaaagctgaccttcatggagatggatattgagtctcagcccgagtgtgcttatgaccacctggaggtgttcgatggccgtgatgccaaggctccggtccttgcccgattctgtggcagtaagaagcctgagcccgtcctggctaccggcagccgcatgttcttgcgtttctactcagacaactcagtgcagaggaaaggcttccaggcatcccactccacagagtgtgggggccaagtgcgggcagacgtgaagaccaaagacctttactcccatgcccagtttggtgataacaactaccctggaggagtggactgcgagtgggtcattgtggctgaggaaggctatggtgtggagttggtgttccagaccttcgaggtggaggaggagaccgattgtggctatgactacatggaactcttcgatggttatgacagcacagctcctagactgggtcgatactgcggctctgggcctcctgaggaagtgtactcggccggagattctgtcctggtgaaattccactctgatgacaccatctccaagaaaggcttccacctgcgctacacgagcaccaagttccaggacacactccatagcaggaagtgactacccctgcatggtagcaggaactggagtcctgctttccttgatcacccagactggacaatgggggtgacaggcagatggtgacacactgtcccacacccccaggcaccagggccaatgggccaggtgtcattgggaggtagggggatcggactccttataagccagttccccacagcctcccaccagagaggccagggaaccagagctttcaccaagacacttgaagtgaccattcctccttggggccctgcctggggcaagacagtgtctgtgcaggaccctgctgccttccctgccgtctctacacactatattgtgtatagccggtggccctaatcttcattgtaacgtacatttcttgccccttctccagcctcaatttggtttatttgactcccctcttccaggtttcctggg

SEQ ID NO: 361 - DNA, 3009 bp, Cricetulus griseus
tcccaattccattcctgctcattgcaaaattataattaaggttgtggatgtcaatgacaataaacctgaaattagcataaaccttatgtcccctggaaaagaagaagtatcttacgtttttgaaggggatcccattgatacatttgttgctattgtcagggttcaagacaaggattctggactgaatggggaaataatatgtaagcttcatgggcatggacattttaaacttcagaagacatatgaaaacaactacttaatcttgaccaatgccacgttggatagagaaaagagatctgagtatagtttgactgtgattgctgaggacaaggggacacccagcctctcttcagtaaaacattttactgttcaaatcaatgacataaatgacaatccacctcgcttccagaggagccgatatgaattcgtcatctctgagaataactcgccaggggcatatatcactacagtgacagccacagatccagatcttggaatctatcccctccactgaatggggactctctcagttatcatccaggacaaaggcaatcctcctctgcataccaaagtccttctgaaagtgcatgatctttgactatgcagaatccgtgacaagcacagccatgacttctgtcagccatgcatctttggatgtgtccatgatcataatcatttccttaggagcaatttgtgcagtgttattggttatcatggtactctttgcaacgaggtgcaatcgagaaaagaaagacaccagatcctacaactgcagggtggcagagtccacttaccaacatcaccccaaaagaccatccaggcagattcacaaaggggacattacactggtgccaaccattaatggcacactgcccatcagatctcatcaccgatcctctccatcttcatctccaactttggaaagggacaaatgggcagccgccagagtcacaacagtcatcagtctctcaacagtttggtgaccatctcaatccaaccacgtgccagagaatttctcattagaactcacccacgccactcctgctgttgagcaggtctcccagcttctctccatgcttcatcaggggcaatatcagccaaggccaagttttcgaggaaacaaatattccaggagctatcgatatgcccttcaagatatggataaatttagcttgaaagacagtggccgtggagacagtgaagcaggagacagtgattatgatttgggacgagattctccaatagataggctgctgggggaaggattcagtgacctctttctcactgatggaagaattccagcagcaatgaggctgtgcacagaggagtgcagagtcctgggccactctgaccagtgctggatgcccccgctgccctcaccatcctctgactacagaagcaacatgttcatcccgggagaagaattcccagcacagccccagcagcaactctcccatcagggccttgatgatgacagccagcctgctgaatccggggagaaaaaaagagcttttccacctttgggaaggactctcccagcgatgaggactcgggggactccagtacatcatctctgctatcagaaatgagcagtgttttccaacgcctcctccctgcctccctagacacctattctgaatgcagcgaaggggaccgctccaactccctggaacgtcggaagggtccagtgcaggcaaaaactgggggctacccacaaggggttgcggcctgggcagctagcacacattttcagaaccccaccaacagctctgggactcctctggggactcactccagtgtgcagccttcttccaaatggctgccagccatggaggagatccctgaaaactatgaggaagatgattttgacaatgtgctcaaccatcttagtgatgggaaacatgaactaatggatgccagcgagctggtggctgagataaacaaactgcttcaagacgtccgccagagctaggggactttggctgacctcttgggtttctgtgtgtcgaattaggggacagggaaaaccccgaaaaaactggcgttgccaaatagttgcatttatcataaatgtgtctgtgtatattgaatattaaatactgtattttcgtatgtacacgatgcaagtgtgattattttaatctgtattttaaaaatacatttgtaccttatatttatgtgtaatttaacagacaaattttattttttactcccatgacaaacatgttttcctaatcatgcagaactagccactatttgaatctatatccttttcaaccaaaggtactgcttagattagttaagctggggcataattaggctctatgaacaaccctattaatgcattaggtaattcttagtttcattaaacaatgcagctcccttttcaatatttacagaaatttatttccagtagcaatatatctacttataatttaaactaaacagtgaatctgatttgatccttgccatatgaaatgtgatctaatgaagtggaatctgtactctgaatgaataacattatgtattctaccagcatggagtgttaatagacaaagacagatatgtcagtactccatcccccatccccacggggagtaaatagaattgatttatctgaaactcctatttgaatttctccttctcttttcataatacttgaacatttgtagcaacagcattgtctcttttggctgtaatcattcactgtaagcttttgtctcttgtgcatgctttcatggttttgcttgtattcttagcatatgaacatttataaagtcgttttttgttactgcaattttgtttgacttatcgtgtggcaagtggaaactttatttattgtgctgttatcttccgtgtggaatgccttggtactcaagatctttattatggctattatcatttatgttcaagcttctatgaatgttatttctattagtacactatcttaattgtactctcctgaaaattttgctgtcagtgaaaataaaaaggaaaaattaaagacaa

SEQ ID NO: 362 - DNA, 3008 bp, Cricetulus griseus
  modified_base (2406)..(2406): a, c, t, g, unknown or other
  modified_base (2999)..(2999): a, c, t, g, unknown or other
tggtgacccagctaatttaaatagactgaggcctcatttagaacttcttgcaaatatagatcctaatccagatgctgtttcaccaacttgggaacagctagaaaatgcaatggtagctgttaaaacagtggttcatggtcttgtggacttcatacaaaattacagtagaaaaggccatgagacaccccagcctcagccaaacagcaagtataaaactagcatgtgccgagacttacgacaacaggggggttgtccacgaggaacaaattgtacatttgcccattctcaggaagagcttgaaaagtaccgattaaggaacaaaaagatgagtgcaactgtaagaacgttccctcttctgaataaagttggtgtaaacagcactgttacatccacagctggaaatggcattcctgtcataggaagtactgaaacatctgggaaaattgttccaagtacaaatggaatttcaaatgcagaaaacagtgtttcccagctaattccacgaagcactgacagtgcattaaggactctggagactgtgaagaaagtcgggaaagttggcactaatggccaaagtactgctgggccctctgcagagtctgtatctgaaaataaaattagttctccacccaagactcctgtaagtaatgcagcagctacctccgctgggccctctaattttggaacagagctgagctccgtgcctcccaaatccagcccatttctaactagagttccagtatatcctcagcattctgaaagcattcagtattttcaagatccaaggactcagataccctttgaagtcccacaatacccacaagcagggtactacccaccacctccaacggtaccaactggtgtgactccttgtgttcctcgatttgtgaggtccaataatgttccagagtcctcccttccacctgcttccatgccatatgctgatcattacagtacattttcccctcgagacagaatgaattcttctccttaccagcctcctccgcagcagtatggaccagtacctattattagaagcaattctttacctccaatggatgtgatgcactcatctgtctatcagacatctttacgggaaagatacaactcattagatggatattactcagtggcttgtcagccaccaaatgagccaaggacgactgtgcctttaccaagggagccttgtggtcatttgaagactggttgtgaggaacagataagaagaaagccagatcagtgggcacagtaccatacccagaaagcacctgtctcttcaactctgcctgtggctacacaatcaccaacaccaccttctcctctattcagtgtagacttccgaacagatttctctgagagtgtgagtggcacaaaatttgaggaagaccatctttcccattactctccctggtcttgtggcaccataggctcgtgtataaatgccattgattcagagcccaaagatgtgattgctaattcaaatgctgtgctaatggacctggacagtggggatgttaagagaagagtgcatttatttgaaacgcagagaaggacaaaagaagaagacccaattattccctttagtgatggacccattatctcaaaatggggtgcaatttcccgatcctcccgaacaggttaccatacaacagatcccatccaagccactgcttcccaaggaagtgcaactaagcccatcagtgtatcagattatgtcccttatgtcaatgctgttgattcaaggtggagttcatatggcaatgaggccacatcatcagcacactatattgaacgggacagattcattgttactgatttatctggtcatagaaagcattccagtactggagaccttttgagcattgaacttcagcaggccaagagtaactcattacttcttcagagggaagctaatgctctggccatgcagcagaagtggaattccctggatgaaggccgacaccttactttaaatcttctaagcaaggaaattgaactaagaaatggagagagtgattatacagaagacacagtagatacgaagcccgatagagatattgagttagagctttcagcactcgatactgatgaacctgatggacaaagtgaacaaattgaagaaatcctggacctacaacttgatatcagttctcaaagtgatcagttgctgaatggaacagcaatggaaaatggccatccaggtcaacatcaccagaaagacacagtaaagcagaagagacagagcttaggtgaagaccatgtgattctggaggagcaaaaaacagttctgccagtaacgtcttgctttagccagccactcccagtatctattagcagtgcaggctgcctccccatccgccacatctgtcagtcgttggcaacctcattcctgaaaactcacgttangtctgaagataaaaacgttaattaacttttttttattttatgtttaagagtactgatgggatcacttactgtaactccttctgcagaagagccccttctgtaaacagaacacaaatgacatgctcaaggagtatcccggtttttagagattaagtttgctagtaactcctttacactagctgtttctttgtatccctttgctggcaaggggagtacaaggagtcaaaccacagatcagaacaccccacatttgagtggagacttatttttactctaaggggagttattcccccaagtctgaaactggcaaatttttttttctcttatataaaaatttaaaaatatcccctaaaccagtggaaaaaagacactggctgcacttagtactgccaaaagccaaggtcatttgcacatattccatcaacctgtcaagaattaggcctcactttataacccacggcatggaagtgcatgcattctcttagctgggcaaacaattatactgtagttgtgatacaacacatgtggtcttttatttgtactgcacatacccatgtacagccacttgggagtatcggtccaccataaaaaanaaaaaaaaa

SEQ ID NO: 363 - DNA, 3008 bp, Cricetulus griseus
accctgcctcacagctgcttcagaatccagcattacgctggcaaggtgctgtaccaggtggaaggatttgttgacaagaacaatgacctcctgtaccgagacctgtcccaagccatgtggaaggccggccatgccctcatcaaatctctgttccctgaagggaaccctgtgaaagtcaacctgaaaagacctcctacagcagggtcacagttcaaggcatccgtggccactttgatgaaaaacctgcagaccaagaatccaaactacatcaggtgcatcaagccgaatgacaaaaaggctgcacacattttcaatgagagtctggtatgccatcagatcaggtacctgggtcttctggagaatgtccgcgtgaggcgtgcaggctacgccttccgccaggcctatgaaccttgcctggaaagatacaagatgctttgcaaacagacatggcctcactggaaagggccagcaaggtctggtgtggagattctgtttaatgagctagagatccctacagaagaatactcctttggtagatccaagatattcatccgaaacccaagaacattattccaattggaagacctaaggaagcagcggctagaggacctggccactctcattcaaaaaaatttatcggggatggaaatgtcgtacccatttcctgctcatgaaaaaaagccaaagttgtgattgctgcctggtgcaggagatacgcgcaacagaagcggtaccagcagataaagagctcaaccctggtagttcagtcttacatccggggctggaaggctcgaaaactcctgcgggagctgaagcatcagaagcgctgtaaggaggcagccaccaccatcgcagcctattggcatggaacccaggctcgaagggaattgaaacgcttgaaggaggaggctaggcgtaagcatgcagttgctgtcatttgggcttactggcttggactgaaggtacgccgggaatacaggaagttctttagagcgaatgctggaaagaaaatctatgagtttacacttcaaagaattgtgcaaaaatacttcttggaaatgaaaaataagatgccttccttgtcaccaatagacaaaaattggccatcaagaccttacctgttcttggactcgactcacaaggagctgaaaaggatcttccacttgtggaggtgtaaaaaatacagggaccagttcacagaccagcagaaactcatttatgaggagaagctagaggccagtgaactcttcaaagacaagaaagctttgtatccttctagtgttgggcaacctttccaaggagcttacctggaaatcaacaagaacccaaagtataagaaactcaaagacgccattgaagagaagatcattatcgctgaagttgtgaataaaattaaccgtgctaatgggaagagtacatcccggattttcctcttgacaaacaataaccttctcctcgctgaccaaaagtctgggcagatcaagtccgaggtgcccctggtggatgtgaccaaggtctccatgagttcgcaaaacgatggcttctttgcagtccacctcaaggagggctcagaagcagctagtaaaggagactttctcttcagcagtgatcacctcattgaaatggccaccaagctttatcgcacgactctcagccaaaccaatcagaagctcaacattgagatctccgatgagttcctggtgcagttcagacaagacaaagtgtgtgtgaagtttattcaaggcaaccagaaaaatgggagcgtgccaacctgcaaacgaaagaacaaccggctcctggaagttgccgtcccttaagtgacgcctcctctctgccctcatggacttgtttcttcatactagtgcaatttgattttgttttatttggggctcgccgtatgtttgggaattgccaaaggctagcggttagagtcctttggcgaaattgaaagtatttgactaatcagttttaattattggagtagttaaccctgacgtccacaatctgtcctgcgcagaattctagaaattaacagtgtctgtttccatgtcttatgtgttttctcctcagttaccattttagacttgtgtaccgtaaacccacatattacccataaatcattagtacatgtaagcataggaggggcttacattcatttatcggatatttattgaatgcctactttttgctgggcactgtgctgaacttactaagaacctttttatttgaaagctgttgccttctggctgatttgtgctggcaaaacagaagctaagaaggtggtagagatcgaggccaaaagatactactaatgatcactttagggaaagtgactgaagcagggtagcacaatgcttcgttgcggttccagagaagcatgagatggaccctagatgcccacagtgctttcacccggagtcagtagccatcgaaatggcaagtaagaaaaggccaagagccgttcagagtggccgatcttctctttgatgtgcaataaaacatccaaggcgcctttgaaagttttatttataatatacattttttttgtatgagagaggtgattgattggtacagggtgtgtattttagtgaaagatcaaagttaagatagaattagttttcagggctttttgtttttgttttctttaaaattaagaattttaaagaaattggaaaccacattttaaactatggaattaaattgtttcttatttgggaggataatgtatatacattgggattctgataaataataaaattgttctaatttggtgccatttgctgaatcacaactgtatttttgtatctcgagctattttcatatgttacatgtctaatgtgtcacagaaaggttttccatccagacattacatggtctctgtgttaacggctttccactaatctttttgtaccagtatcagccaatgaaaatattccctggggattttcttttgatttttgtacttaaaaaaaaaaaaaaaaagttctgataaagaagaaaaaaaaaaa

SEQ ID NO: 364 - DNA, 3007 bp, Cricetulus griseus
agtaccttcgaggagaagatatttcttcagtggagagagccaacacaaacatatggtgtcatcactctatatgagatcacctacaaagcagtcagctcctttgacccagaaatagatttatccaaccaaagtggaagagtttcaaaactaggaaatgaaacccattttctgttctttggcctgtatcctggaactacatactccttcaccatcagagccagcacagcaaaggggtttggacctccagcaacaaaccagttcaccaccaagatatcagcaccatccatgccagcgtatgaatttgagacacctttgaatcagactgacaatacggtgacagtgatgtggctactggaacactccccttctccccccacaaaagctacagaatttattaccaagcggctagtagagccaacggggaaaccaaaattgactgtgtccgagtggccacaaaaggagctgttactcccaagccagtccctgaacctgagaaacaaacagaccacactgttaaaattgccggagtgatcgcgggcatcttgctgtttgttatcatatttcttggagttgtgctggtcatgaagaagaggaagaagcgagaggctaccgacgtgccttaccagactgggcagcttcacccggccatccgcgtggcagatctcctccaacacataactcagatgaaatgtgctgagggctatggcttcaaggaggagtatgagagcttctttgaaggacagtctgcaccatgggactctgctaaagaaagacgagaacaggatgaagaacagatacgggaacatcattgcatatgaccactcaaagggtaaggctgcagatgctggaaaggtgacaacaaactccgactatatcaggacccatgcaggagaccatctatgacttctggaggatggtgtggcatgagaacactgcgagcatcatcatggtgaccaatctcgtggaagtgggaagggtcaagtgctgcaaatattggcctgacgacactgagatctataaggacattaaagtcactctaatagatacagagctgctggccgaatatgtgataagaacgttcgccgtggaaagagaggcattcatgaaatccgggagatcagacagtttcacttcactggctggccggatcacggggtcccctaccacgccactggtctgcttggatttgtccggcaggtgaaatccaagagcccacctaatgcaggtccactggtggtgcactgcagcgctggtgcaggcaggaccggctgcttcatagtcattgatatcatgctggacatggcagagagggaaggcgtggtggacatctacaactgtgtcagagagcttcggtccaggagagtcaacatggtgcagacggaggaacagtatgtattcatccatgacgccatcctggaagcctgtctttgtggagacacctccatccctgcctcccaaatcaggtctctgtattatgacatgaacaaattggacccacagacaaactcaagccaaattaaagaagaattccggactctcaacatggtgacgcccaccctgcgagtggaggactgtagcatcgcactcctgccccggaaccacgagaaaaaccgctgcatggacatccttcccccggaccgctgcctgcccttcctcatcaccatcgatggagagagcagcaactacgtcaacgcagccctgatggacagctataaacagccttcagcgttcattgtcacccagcatcctttgccaaacactgtcaaagacttctggcgactggtcttggattatcactgcacgtcggtagttatgctcaatgatgtggatcctgcccagttgtgtccacagtactggccagaaaatggagtgcacagacatggccccatccaggtggaatttgtgtctgcggatttagaggaagacatcatcagtaggatcttcaggatttacaatgcctccagaccgcaggatggtcatcgcatggttcagcagttccagttcctgggatggccgatgtacagggacacacccgtgtccaagcgctccttcctgaagctcatccgccaagtggacaagtggcaggaggactacaatggcggtgaaggccgcacagttgtgcactgcttgaatggagggggccgtagcggcgcgttctgtgccatcagcattgtctgtgagatgctccgacaccagagaactgtggatgtctttcatgctgtcaagacactgaggaacaacaagcccaacatggtggacctcctggatcagtacaagttctgctatgaggtggccctggagtacttgaactctggctgactgcatccacagctctgcgggggaatgccttcctaccacaaagtcaagacgtcctctggcgtctgtgatgatgagatgaagaattgtcagtatgcttattttgctttgcataattggctctttttaagagcccaagaaagtgtttctaaaactgcttgcactgcccagttccctgtaatgctgctgcgtgaccaaaacacagcagacagtcaccagagactgtcctcctcgccaccggccatgttagagcagcgcagatatctggtcaaccgaagagcacaattatattcttatgaaggaatttgtacttttggggttattttttttgtggctgtgaccctttgtcattgttacaactgagtgtatgttttgttctgtggagaatgctacctggcattatgataatatattcttttagttaatatttgtattttaacatgttgcataatataagattatatagctttcaaggactaacagataaagatgtaatgaacaaagacgcagtgtgtgagttctttctagcagatttgtatggttcaaagaggaaagctggggaggcctccgctcagaaatgtaacgtggttggagtcacagatccaaagcttttccatttgtttatattgtaaatattttttgatttcatcaaattatttattcattaaaagaaattttgtgatgcacagtg

SEQ ID NO: 365 - DNA, 3005 bp, Cricetulus griseus
atgagcctgctgtctgccatcgacacgagcgccgcctcggtgtacccagcccgcccagctgctcaactgggtctacctgtcgcttcaggacacacaccaagctagtgctttcgatgccttccggcccgagccgcccgccggcgccgcgcccccggagctggccttcggcaagggccgcccggagcagctgggctctcccctgcactccagctatcttaacagcgtcttccagctgcagcgcggagaggcgctgagcagcagtgtgtacaggaatgcttcaccctatggctccctcaacaacatcgctgatggcctcagttcccttactgaacatttctcagacctgacgcttacctctgaggcccgcaagcccagacctatgccacctgtgtttcaacaaaggacactacattaaggattgccctcaggcacgccccaaaaggtgagggcctgacaccgtaccaaggcaagaagcgctgctttggagagtacaagtgtcccaagtgcaagagaaaatggatgagcgggaactcctgggccaacatggggcaggagtgcatcaagtgccatatcaacgtgtacccgcacaagcagagacccctggagaagcctgatggcttggatgtatctgaccagagcaaggagcacccgcagcacctctgtgagaagtgcaaggtcctgggctactactgtcgccgtgtgcagtgaccttggccaccaccacagcacccctcagctgccacctccctgtgctgcccaaagggctgaatggcctcatatttgaggaggcctcacagacctgtggacttaagcagaggagtttcatgtcctcgtcttatgttctgaccatgtggctgacatgctccagacagggtgcagagactggaggctcagggggacagaggccagcagaagccgtggtgtacccgcaggctctctccctgagtgtctttgaggccaaatggctttgtatctgccacaagtacactaagtgaactgtgaatcctgaggcctgagggaagtcttccctctaagaccagccaggacctatccctctcagaaccttgcagcttgcctcctatgaaaagccactctggggaagtcctgttccattcctaatctatatccacagagggcagtcgcttgttctagcagcccggggggagtagtcctctgttgtggccacattgagtcccaaatctgaccacccctgatatcactgcattgcacctggtagctaagtacagtcccctctgccaatgggacgtcctctcctacagccctcctagcctgattgatatccctatcccctgagaagatggaagatgacccctccccaggtcttcttagctcctcacagtgggcaaacctaaaatgagccacagaacctctcctttggaaactggggataatgatttcctacttttctaggaaggcagagagatctcctggcatgtcacatggcccaagagggccactgtcctggccagggtcatcagtgcacccccctccccccatgacaagccacagttctctgtctttttcctcttcaccagcttccaggaatgagtagcttgactgctgaatttgtgatcttttgaggcaagcaaaagatagcactatctaggctgggtgctggaagagttaatgctcagaaggcatgggagcccaggggacaagaaagtgtgtggttttagtacatacaaaagggacaatcgcttgcagtcagtagatctagcgatctagttgagagagaatggtgtttaccccatatgaagtattcaatagctctacttgtgaatttgtatttattttgagttatacttgacacagaactctttttttaaacaatgctatgtgtgtattttgggaaaaaattcatagatgttaaaatttctgcatggttaccagtttttcttatgacactgaacttggtagccttttccccccaaattcttcatagtgattttgtttgtatatacttgagggtcttttttttaaaagaaagaaaagtaggattgcttgatattattgaaattgaaaacaacaaaaaagaaggcattaaaaaaaataagtgctttgagagggcaatccatatctaacagattcctagacccagttttgcaagtctggttgatctgtaagagagtatttatagtgagaacttttctttttttgtgtgttattttttctatgctttggtctgtaaaaagtatgcaactgaactacattaagaaggaaatattatctacatagaattattatatgaagttggtacataattctaacgaggaaaaaatctttgtaatcctttatgctatgttggtttttgttttttttctattttgtttccttggatgaaaatatcagtattaagcagccagtatattattcatctgtttagacttattaataagctcttgtcctgtatttatatatttgtgtatttgggaagtattgcttttttaaggggagttatcagtggacaacatgataaaaagggaacagagatcctttggacctcttcctctgaggttggcaggtggcacccaagctctttgaacttggatctgtccacctgagccctatacctgccttttagcatctaatggacttgaatctactctaaacaaaagtttaatccaacctcactacattgtagccagtgcaacaactaacagtgatgtaagggatgttgcggccttctgggaggtggcaatgaggtccattgcttgctctcacggccaccttacctgtaccaacccctgcacccccatgtggtgatcctgtccatgtctgtgtctgttcatgtgtgtacattcagctaagaagacaaacagaacccgtgagccccgcctggagggtacctggagaaggctcctgacttccctgaagggccggcctcggggtggcattccgttgtgtgccttattcctggagactctgtatacggcttgcctatgaaatatagcctttctgtgctgtattaaaaggactttaggaaa

SEQ ID NO: 366 - DNA, 3003 bp, Cricetulus griseus
  modified_base (39)..(39): a, c, t, g, unknown or other
cgcgagcactgcacgccgtcgcccgagcgtcggggggcnccccggagatgcgggtttgcctgcaatgagaacttaaagaacatttctgagctgctgtgaatagatttggaatgatactgtctattttcaactaatggagaattagctgtgtctttacaagggttgctgtactggacaacttcagaacatccctcataatgtcatccaacaggagtcagaatccccacggactgaagcagatcggtcttgaccagatctgggatgacctcagagctggcattcagcaagtgtacaccagacaaagcatggcgaagtccagatacatggagctctacactcatgtttataattactgtactagtgtgcatcagtccaaccaagctcggggaactggaatccctccttccaagtcaaaaagggcagactcctgggggagctcagtttgtcggcttggagttatacaagcgactaaaagagttttgaagaattacttgacaaatcttctcaaggatggagaagatttaatggatgagagtgtactgaagttctacactcagcagtgggaagactaccgattctccagcaaagtgctgaatggaatctgtgcctacctcaatagacattgggttcgccgagaatgtgatgaaggccgaaaaggaatatatgaaatctattcacttgcattggtgacatggagagattgtttattcaggccattgaataaacaggtaacaaatgctgttttaaaactgattgaaaaggaaagaaatggcgaaaccatcaacacaagactgattagtggagttgtacaatcttatgtggaattggggctgaatgaagatgacgcatttgcaaagggccctacgttaacagtgtataaagaatcctttgaatctcaatttttggctgacacagagagattttataccagagaaagtactgaattcttgcagcagaacccagttactgaatatatgaaaaaggctgaggctcgtttgcttgaggagcagcggagagtgcaggtttacctccacgagagcacacaagacgaactagcgcggaaatgtgagcaggtcctcatcgaaaagcacttggaaattttccacacagagtttcagaatttgttggatgctgacaagaatgaagatttgggccgcatgtataatcttgtatctagaattcaggatggcctaggagaattgaaaaaactgctagagacacatattcataatcagggccttgcggcaattgagaagtgtggagaagctgctttaaatgacccgaaaatgtatgtgcagacggttctggatgttcataaaaaatacaatgccctggtgatgtcagcattcaacaatgatgctggcttcgtggctgcactagataaggcttgtggtcgcttcataaacaacaatgcagttaccaaaatggcccagtcatccagtaaatcccctgagctgcttgctcggtactgtgactccttgttgaagaaaagttccaagaacccagaagaggcagaactagaagacaccctcaatcaagtgatggtggtcttcaagtacatcgaggacaaagatgtgtttcagaagttctatgcaaagatgcttgctaagagactggtccatcagaacagtgcgagtgacgatgcggaagcaagcatgatctccaagttaaagcaagcttgcggttttgagtatacctccaaacttcaacgaatgtttcaagacattggtgtaagcaaagatctgaatgaacagttcaaaaagcacctaacaaattcagaacccctggacttggacttcagtattcaggtcctcagttccggatcgtggccctttcagcagtcttgcacgtttgccttgccatcagagctggagcgcagttatcagcggtttacagccttctacgccagtcgccacagcggcagaaaactgacatggttgtatcagctgtccaaaggggaactagtcactaattgcttcaaaaacagatacactctgcaggcatccacattccagatggcaatcctgcttcagtataacacagaagatgcctacactgtgcagcagttgactgacagcactcaaattaaaatggacattttggcacaagtcctacagattttactgaagtcaaagttgctggtcttggaagatgaaaatgcaaatgttgatgaggtggaattgaagccagacaccttaataaagttatatcttggttataaaaataagaaattaagagttaatatcaatgtaccaatgaaaaccgaacagaagcaggaacaagaaaccacacacaaaaatatagaggaagaccgcaaactactgattcaggcggccatcgtgagaatcatgaaaatgaggaaggtcctgaaacaccagcagttgcttggtgaagtcctcactcagctgtcctccaggttcaaacctcgggtcccagtgatcaagaaatgcattgatattctcatcgaaaaagaatatctggaacgagtcgatggtgaaaaggacacctacagttacttggcctaacccttctaaaagggtctgtgacccacagcaaatagttctggacacaactcgagttcatagcagccagcctgccaccatttggacctccctttttaaagctgagaccacagttctcaccacctggtctcagactacagccggactgctcaggactgacacatttcagtctgtaaacagacgccaatgccatttaccctaacttacggaccgaggggaaccgaacctttccatgctggggctgcatgctactgcacttaaatcaatacattggctccctggttaacagctgtcatctgaggcagcacaagagcgagtctgaatggacccacgtgtaatctgctatgaaaaccatttgtatagtgtgtttcatttttttaatgtgtgaaaataaagaaaattaaaggatttctgtacaagttgctatttggttttgttttaagttttgtcttaatttctatatgtaaataaagatttaatg

SEQ ID NO: 367 - DNA, 3002 bp, Cricetulus griseus
gatgaatctgaggtcgaattattcatgttacatcccccatgtttaggaaacaagaagggcagattcattccgctatcctaaaacaggcacagcaaacccaaaggtcactttcaagatgtcagagatacttgttgatgctgaaggagggattatagatgtcatagataaagaactggttcaacctttttgagatttctgtttgaaggagtcgaatatattgccagagctggatggactccagagggaaaatatgcctggtccatcctactagatcgttcccagactcacctacagatagttctgatctcccctgagttattcatcccagtggaagatgatgccatggacagacagagactcatagagtcagtgcctgactctgtgacaccactgatcatctatgaagaaacaacagacatctggcaaatataaacgatccagcggtggactacctgccccaagtgatttcaagtgtcctatcaaagaagaaatagcaattaccagtggtgaatgggaagttcttggccggcatggatctaatatctggattgatgaagtcagaaagctggtatactttgaaggcaccaaggactctcccttggagcatcacctgtatgtgaccagttatgcaaaccctggcgaagtggtgaggctgactgaccgaggctactcacactcctgctgcctcagccagcattgtgacttcttcataagtaagtatagcaaccagaagaatccacactgtgtgtccctctacaaactctcaagtcctgaagatgacccagttcataaaacaaggaattttgggccaccattttggattcagcaggtcctcttcctgactatacccctccagaaatattttcttttgaaagtactactggatttacactgtatgggatgttatataagcctcatgacctacaacctggaaagaaatatcccactgtgctcttcatatatggtggtccccaggtacagctggtgaacaatcgatttaaaggagtcaagtatttccgcctgaacaccctggcctccctcggttatgtggttgtggtgatagacaacaggggatcctgtcaccgaggtcttaaatttgaaggcgcctttaaatataaaatgggtcaaatagaaatcgatgatcaagtggaaggactccagtacctagcgtctcagtatgacttcattgacttggatcgtgtgggcatccatggctggtcttatggaggctatctttccctgatggcattaatgcagagatcggatatcttcagggttgctattgctggggccccagtcactctgtggatcttctatgatacaggatacacggaacgttatatgggccacccagatcagaatgaacagggctattacttagggtctgtggccatgcaagcggagaagttcccctcagaaccaaatcgcttactcctcttacacgggttcttggatgagaatgttcattttgcacacaccagtatattgctgagttttttagtgagggctggaaagccctatgacttacagatctaccctcaggagaggcacagcatcagagtccctgagtctggagaacattatgaactgcatctgttgcactaccttcaggagaaccttggatcacgcattgctgctctcaaagtgatataactctgatttgtgagaactcgggtgtacactgtctaaccaaatgaggagggttagtcaatagagaaaccagagttgatgattgtactttggtacccgccatgtaagatctacttctgaaagtaaatttggtgccatgcagaaatctgcagttaatggatagtaatctaataccttaaccatgtacacagaactgagtgacatattttcaagagattcaacaataccacgaggatactgaaagaagcaaggcatcagcaccacatattcacactagcctattttcacatatactagcagtataagcctcttggacttaattagtggattttacagtatatttctgagtttgttaaaatatgatgatagtagtgattggtttggttcaattccaggatctctgactagttatggatttgatagcacttacgtctaactgaatagcttatgcttcgtcacttggggtgtatccagcatgtcatgaactaattactattaagcttatgactttcccagtcattaatgatttttcaaggataacttagtggcctcctaaagatacttacttgggctctgacaagtttttaaccaatttaaacagcatctagtataagtacttctttttctttgatgatctgatggactggggtttcctttcacataaaggcaagtaactatgtagcatgagtttaatcacaagtctcaagatgttgacaattacaggcaaaaaaaaaatttatcaaattatttaagagtttgaaaattagcaggcaaggttttttaacttttttttatttgaatgtaacttagatattgctagcttaaaatgaaaagtttccagaccacttctttgccgtaaactaatccctgacaaaccaaggcacactcagtgttgaaggcctatcaacagttttttaatcggcattctcctggtttagccttcctgcttaactatgaagggaatacatgagctttcaagtgctggttggtgtgtgcccttaaaatcactccaagaaacttactctgttctttctccctgccacagccggtcccttcccaagagcagtctgtgttagtgaggatgatagcagtcggatcagaggtgggcagctcaggaagccagggaatgacaggtgaccatgggcttctgtccttggggagggagggctggtatctgctggctgtgtatttatgctgtatgatagagtccgcatttttcttattgattgtctattttgactttcatgcttatgacattttctcgtgccaaaatttgtttatatttttcaaagttaaattaaactgatttgggtaactttccttcccaaaaaaaaaaaaaaaaaaaaaaaaaa

SEQ ID NO: 368 - DNA, 3000 bp, Cricetulus griseus
caaaaatgcagatggaaaaattaacatctctggatgcaaaattgaacttggaaaacaaagactacaagaaaacaaccaagatcacttggcttgctgagactacacacgctcttcctattccagcaatctgcgtcacatatgagcacttgattacaaagccagtgcttgggaaagacgaagactttaagcagtacgtcaacaaggactagtaagcatgaagaactaatgctaggggatccctgccttaaggatttgaaaaagggtgacatcatacaactgcagagaagagggttcttcatatgcgaccaaccatatgaaccagttagcccatatagttgcaaagaagccccgtgtatcttgatctatatacctgatgggcacacaaaggaaatgccaacgtctggatcaaaggaaaagaccaaagcagaacccttgaaaaggagacaagctctgctcctaaagaaggaccagtgcctgctgtgagtccttgtgctgcctctgaggagtcctccgtcctttacaacagagtggcggctcagggggatgtggttcgtgaactgaaagccaagaaagcggcaaaggaagatgtagatgcagctgtgaagcagcttctggctttaaaagctgaatataaacagaagactgggcaggagtataaacctgggaaccctccctctgcagcagcgcagagcgcctccactaagtcactgcccagcgctggggaagatagatctctgtatgataaaattgctgcccaaggggaggtggttcgaaagctgaaagctgaaaaagctcctaaggctaaagtaactgaagctgtagaatgcttactgtccctgaaagctgagtataaagaaaaaactgggaaggaatatgtacctggtcagcccccagcatcccagaagtcacagccaagtcctgccagcaaagctgagcctgctggtccagagacaacagaagccaaagcgctgtttgacagagtggcttgtcaaggagaagtagttcgaaaacttaaagctgaaaaggcctctaaggatcaagtggatccagctgtgcaagaactccttcagctgaaggcacagtacaagtccctgacaggaatcgagtataagcctgtgtctgctactgggtctgaagacaaagataagaagaagaaagaaaaagagaataagtctgaaaagcagaataagcctcagaaacaaaatgatggcccagggaaagactcttctaaaagccagggcggtgggctgtcatcgagtggagcaggggaagggcaggggcctaagaagcagaccagattgggtcttgaagcaaaaaaggaagaaaatctggccgaatggtactcccaagtcatcacaaagtcagagatgattgaatactacgatgtgagtggctgctatatcctccggccctggtcgtactccatttgggaatccattaaggacttctttgatactgagatcaagaaactcggtgttgagaactgctacttccccatatttgtgtctcaggctgctttagagaaagaaaagagtcacattgaggactttgcccccgaggttgcttgggttacaagatctggtaagacagagctggcagagccaattgccatccgacctactagtgaaacagtaatgtatcctgcatatgcaaaatgggtgcagtcccacagagacctgcccatcaggctcaaccagtggtgcaatgtggtgcgctgggagtttaagcacccacagcctttcctccgcactcgggagttcctgtggcaggagggacacagtgcctttgctaccttcgaggaggcagctgacgaggtcatgcaaatccttgagttatatgctcgagtgtatgaagagctcttggcaatccctgttgtgagaggaagaaagactgaaaaggagaagtttgcaggaggagactatacaaccacagtagaagccttcatatctgccagtgggcgtgctatccagggagcaacatcacaccacttaggccagaatttttccaaaatgtgtgaaattgtttttgaagatccaaagaccccaggagagaagcagtttgcattccagtgctcttggggcctgacgactcggactattggtgtgatgatcatggtccatggggacaatatgggcttagtgttaccgccccgtgtagcctgtgttcaggtggtagtaattccctgtggaatcacaaatgccctgtctgaagaagacagagaggctctgatggcaaaatgcaatgagtatcgaaagcggctacttggcgtgaacatccgagtccgagttgatctacgtgataactactctccaggctggaaattcaatcactgggagctcaagggggttccagtcagacttgaggtggggccacgtgatatgaagagctgtcagtttgtagctgtcagacgagacactggagagaagttgacaattgctgaaaaagaggctgagtctaaacttcaagagattttggaagacatccagcttaaccttttcacaagggcttctgaagaccttaaaactcatatggttgtatccaatacattggaagactttcagaaggtactagattctggaaagattgcacaaattcctttctgtggggaaattgactgtgaggactggatcaaaaagacaactgccagggatcaggatgtggaacctggcgctccgtccatgggagccaaaagcctctgtattcctttcacccctctgtgtgagctgcagccaggagccatgtgtgtctgtggcaagaaccctgccaagttctacaccttgtttggtcggagttactgatggacgacacagaagacttgcccatcctattttttttttaaaccaatgataataccttcagatgcagtttttctttttctttttcattttttaaaacttaaaaaaaaaataatgagataaaaacagctattcttatgcctaaattaacagtgggaaatacttttctgtaaacatcctgggtaataaataccatgaactaatt

SEQ ID NO: 369 - DNA, 2996 bp, Cricetulus griseus
cacgtcttcagggtctgagcgagctggtttggtgcgcactgcgcggtggctgtttggatgtggaggtcgcgttcctgctccggaactagacatggatctggaggctgtttctaagcgctcagcattccatgccaagccccaggggctcattctccagtatgggactgctgggtttcggacaaatgcccaacatctcgatcatatcatgtttcgaatgggattgctagctgtcctgaggtcaaagcagacaagatccaccattggagtcatggttacagcctcacacaatcccgaggaagacaatggtgtgaagctgattgatcctttgggggaaatgttggccccttcctgggaggagcacgccacctgtctagccagtgctgaggagcaggatatgcctggagtgctcactgccatcatggagaaagaggccgtggatccacagcaggcagcctttgtggtgattggtagagacaccaggcccagtagtgagaaactttcacagtctgtaatagatggtgtgactgttttaggaggtcaatttcatgattatggcctgttgaccacacctcagctgcactacatggtgtattgtcggaattctgggggccggtacggaaaggcaaccatagaaggctactgccagaaactctccaaggcttttgtagaacttaccaaacaggcttcctgcagtggagatgaaaacagatcagttaaagtcgactgtgcaaatggcataggagccttgaagctgaaggaaatgaaacactatttctcccagggactgtcggttcaactgtttaatgatggcactgacgggaggctcaatcacctgtgcggtgctgactttgtgaaaagtcatcagaaacccccacaggggatagaaatgaagtctgacgaaagatgctgctcctttgatggggatgcagacaggattgtgtattactacagtgatgcagacggtcactttcatctcatagatggagataagatagccacattaattagcagtttccttaaagagctcctgttggagattggagaaagtctgaatattggtgtcgtacagactgcatatgctaatggaagttccacaagataccttgaagacgttatgaaggtacctgtttattgcaccaaaactggtgtcaaacatttgcatcacaaggctcaagagtttgacattggagtttattttgaagcaaatgggcatggcacagcactattcagtgaagcagttgaagtgaagataaaaagactagcacaagaactagaagacgagaaaggaaaagctgccaagatgcttgcaagcatcattgacttgttcaaccaggcggctggagatgctatttctgatatgctggtgattgaggccatcctggctctgaagggactgactgtgcagcagtgggatgctatttatgttgatcttcctaacagacaactcaaagttaaggttgcagacaggagagttattagcaccactgatgctgaaagacaagcactcactccaccaggactccaagaagcaatcaatgacctggtgaagaagtataagcttgcccgagcttttgtccgaccctctggtactgaagacattgtccgagtatatgcagaagcagactcacaagaaagtgcagataggcttgcatatgaagtgagtttggtggtgtttcagctggctggaggcattggagaaaagccaccaccatctttctgaagataactttgatattcttgaaaaatggatttctaaaatgtttttataaaactattgacaatactggcagaactaaggtatttgtaatcataacattacaaatgcactctaatggatttagatctgtatttttaaaacactaccagaaaaaactgtttagaagctggtaaatcttagacttggtaatgatgctcgcctctgattttaatctgtgttaagttttaatggtttgagtgtaattaattttacagtgtatgcagggtgttgggaaattaaattttattactaacttcttgcaatggctttgtgattacttacctaaaccaagatgttttgcagcattgggctacctgattcagatgggagagtggagactttctataaaccaattttccatgggcagaccttaaagtaagaaatgactgacttgtttgtttgtgtagcagcatcagaactggcaggtggcccatctttcttgcactgacagagtcctgtgctgtacccactagagtatgagccaactatatttaaacttgattcaggccacgttcagacataagctcttatttacaaatatttaaattaaatacaacctgaagagtgttttgttacatacatatatataaaagaaaaagaaactatacaactcagagcagtgtgtttgaaataattacatttccagtgaggctctggggaagcactggtggtggtcaagtttttatgactccttccagaaaatccttctctatcatctcttcaatttttttgcctggctttgctggagaatgctttgtggttctccagtttcatgtctttgtttgggaaggagtttgagtagaggacagggctccctgagtggcctccgcaccggcttgtgactttgctgttgaagacttggctgaggatgttgaagaaaggcagaagctgctccatgcttcgcattgtgcagagggtgagtaacaaagtagccccggctcccagcccagtgtcctccccgccatcctaaataaccaaacatctccagacaaacactttctcctttgactgcacaagtctataaatggagtgcagcttccttcctgtttacctctcttgtagcttttgctgccatattacaagcaccaatagccaccctcacctgatgcttggccatctccattccctccaaaatcttaaagtcctcctcgtcctgtggaaggaaagagaactcatagcctttgttccagtgaaaagtctgcttggccatgaaggccttgtttaaagaatctggatggga

SEQ ID NO: 370 - DNA, 2995 bp, Cricetulus griseus
ggcagcagcagcaggaggaggaggagcaggaggaggaggcagagttggagttgggcagacgctgctgagagctacaggacgcggcggagtttcagggctccgcgcggctccattcattaagtagttgcggaggaccgtggcgggacgccgacgctgcccactcgcaaacttcagcacgcagacgcacgccagccgtgcgcgtcccgggcagcacagctctgcaaaagttcctgctcgggatttggctctcttccccttggactagcgagcagtttgggcttgagaggaaagcagaggcgcccagaggggaaacctatccgcgcctgcagttggaactactcggctgggcttcactctcgtcgccgcgtcccgagcccgcagacccgctcctgagcagcggcggcccgcagcgtcccgggaggctctccgctgccagcgccatgcaaaactacaagtacgacaaggcgatcgtcccggagagtaagaacggcggcagccccgcgctcaacaacaacccgaggaagggaggcagcaagcgggtgttgctcatctgcctagacctcttctgcctcttcatggcggctctgcccttcctcatcatcgagacaagcaccattaagccttatcgtcgagggttttattgcaatgacgagagcatcaagtacccctgaaagtcagcgagactataaacgatgccgtgctctgtgcagtggggattgttattgccatcctggcgatcatcacaggggaattctaccggatctattacctcaaggagaagtcccgatccaccgttcagaacccttatgtggctgctctctataagcaagtgggctgcttcctcttcggctgtgccattagccagtccttcacagacatcgccaaagtgtccatcgggcgcctgcggcctcacttcctgagcgtctgtgacccggatttcagtcagatcaactgctccgagggctacattcagaactacaaatgcagaggagaagacagcaaagtacaggaggccaggaagtccttcttctcaggccacgcctccttctccatgtttaccatgctgtatctggtgctataccttcaggcccgcttcacctggcgaggggcccgcctgctccggcccctcctgcagttcactttgctcatgatggccttctacacgggattgtcacgtgtatctgaccacaaacaccatcccagcgatgtcctggcaggatttgcccaaggagctctggtggcctgctgcatagtgttcttcgtgtccgatctcttcaagactaagacgaccctctctctgcctgcccctgcaatccggaaggagatcctgtcacctgtggacattatcgacaggaacaaccatcataacatggtgtaggtctgcggctgcagagcgtttgctctgaagtgactgctgacagcatgttcctgctgctctccaatctcatcagacagtagaatgtagggaaaagctttttgcccaatggattttgaaaacatttagagaaaaaaaaaaaaaaagccttatcttgtggccttccaaaataggtcgtttgcctgtgtggagacaacagcgccggagtcccgagtcctggctgtgcggctggctaagtgttcatggtgtagtgagcacagtctttgtcaggagaaaaacactagaataattgagcagaggctgtggccaccttttgtgacctgagaaatcgcaggccagtgagaacagcttgagctcctctgtagcacacaaggcttgaaccgatcagatcctgaatccaaatcccaggccctgaggcctctgtcatctctcccatacccaggctgacaaccacaggccatcacttttagagattaggagaccctttgtggaagagtgaacttcacaaatagcacaatttcagaagacagggagggtgtcttcttctgactcaacacactgtgacgcggaactgccattgcaggatcaatcacgggcactgcacgtgtgttagacttcggttactgctgtccctcttgagatctttgttgtgtgcctaccgggattgcaggtgagggccagggatgagcacaggcatggtcagcctttggctgatcttaagagccaagggagagggagagggcagaatagaaaaaaaaaatgaaccaactttttggctccttgggattgaagagagccagagtagcacacagtctcttgcctgaaaggctgcccttccagataagggagcccagagggtctttgcaggagttgatcttgctgtattaagcactatggcctcagggttgatccctgggacagtcctttggtgggttctgctgggcagaacacatgggttaaatttgcatagagtttttccttatcctcatctatccacaagtgtccttccaagcaaggtcccattctagacagtagacagaggcccgtctactgaacctccaaggaaaggaagaaggaagaaaaaagtgcttttcaaatctttcaaagggctacatgtaaccatatgggtcaaccacatgcacacccttccacagactccgtcctttcatttcaacatatagcaagctatgattttatatataaatattatataaataatgtataaaacattaaaagttaactatgtaagatattatttctgaaacaattttagctatatccactatgaatataaactgtgtctcgacctgtgttatttactttagctgcttaaaggagcgttgagttttttggttttttttttttttgtttttttttaatctcaactaaaaatgtcatagttctgtggtagccattgttttaccaggagagaaataactgcaactagagaaaaactgtataaaaacattaaattgtcagtatttttgtaaggttccgttttgtaaagagaataatattcaaagtatttttttgtggcatacaaagtgaaaatgtgtatctcgaaactaaacgtgtattaaatgtgctttttaaataaaagctcataacatgactaaccaa

SEQ ID NO: 371 - DNA, 2992 bp, Cricetulus griseus
  modified_base (2986)..(2986): a, c, t, g, unknown or other
ggctgacaaaagggaagtttgttgccctggagaacatcagctgcaagattaagtcagggtgtgaggggcacctcccgtggccgaacggcatctgcaccaaatgccagcccagtgccatcacgctcaacagacagaaatacagacatgtggacaatattatgtttgagaatcacactgttgctgaccgcttccttgacttctggagaaagacaggaaatcagcatttcggatatttgtatggacggtacacagaacacaaggacattccccttggcatcagggctgaagtggctgccatctatgagcctcctcagattggtacacagaacagcctggagcttctggaagatccgaaagctgaggtggttgatgagattgctgccaaacttggcctgaggaaggttggatggatattcacggaccttgtctcagaagatacccgaaagggtactgtccgatacagtcggaataaggacacctatttcctgagttcagaagaatgcatcactgcaggagactttcaaaacaagcaccccaacatttgccggctctctcccgatggtcattttggatccaagtttgttactgcagtggccacaggtggtccagacaaccaggttcactttgaagggtaccaggtatctaatcagtgcatggcactggtccgagatgagtgtcttctaccttgtaaggatgctcctgagctcggctatgccaaggagtccagcagtgagcagtatgttcctgatgtattttataaggacatagacaagtttggcaatgagatcacccagctggccccgcccccctgcctgtggagtacctgatcatagagactttcatagtttggccacctacttgtcccagaataactcatctgtgttcttggacaccatctctgacttccacctcctgctgtttctggtcaccaatgaagtcatgccactgcaggacagcatcagcctgctgctagaagccgtgagaaccagaaatgaggagctcgcacagacatggaagaaatctgagcagtgggccaccattgagcagctctgcagcactgttggtgtgcagctcccaggccttcatgaatatggtgcagttgggggctctgcacgagctgctccgtctgccatgtgggcctgtcagcactgcaccttcatgaaccaacccggcaccggccactgcgagatgtgcagcctccccaggacctagggctctggccctctactgagcgggactgggccagaccagccctctctgaagcctggagcgccacatatttgctataaggcctgaagcccacagccctgaagcagtggggccagctgccctggtatcccagatcactgaggcctctcagtgcggatcttgaagagaaagagcccagctgctatgctggggttgaacagaacctcccaactggaagggcagagcagccctgcccaagagcaccccacaagcctcacttggaaggactgggcacctccaaacaaccctctgaaacgggggtgcacagagaggttgctgctgtcaccccgctctccttccttcctctgctttttgttttctgcctccaaccttctccccagttttggatggatgctcctggctgtctctgttcccttgctgtggggctgtgtccctcctgttgggagcatgtgtggctaggtggtccttggtctgacctgcagtgtagtgcgaccctgcccttcttgcctgaaatcagcagttatcagtaattcctgcccagaaaacttttatttattgtttttaagataaaacagcacagatgggagtgagagcgacttaattctgctttctttcctccttcagtgcagcccttcttgggtgttcagggtggttattgggcaggggccgccatcagttctctgaagcaaacctcagtgcctgagactttcctgtcatgccacagaatggtggcagctggtagcctgggtggtttagcaaagcagtggtggctcttgcttggcagtcagcccccgagtctgtgggcagccctgggaatctggtccccctttcccagcactgctcctttacccaaggtctccctacattgtggccttcttacacagtgctgtggcagttgagacagcctaggaaaggtgcccatgtgaccaccatgaggctgtggctgtgttgtgacagcccttacccaggtaagacgtggatatcgtgatgcctctttgccttaatgagagctcagtcagctgtccttcaccctgggaaaggctgtgccaaccgcagaccatcagaggccgtatgtgacacttacagagtgcacccatgctgcctgccccatccttggccctgtggacagtgacttagctgtgctcctgataccaattgtactagcaccattattcatgctgggcaggtactgcacagcacactctggagagcttttgccaccacgtaccccccccatctttgtctacaaagttaattactttttctcatgttttggaatccacatcattcttgttttcttgtctttagctaaagaaattgttgtgatttctctgcttatggttttgaattactctttgttcagtaatgcactttattttattgtccaaagagagtcaagctaatgctaccagcttggggtgagccctacagaaggttcaggcctgagcagctcagctacctcctcctccatggaggtggccctagtcccacctctaatccctcctgccatcaggcactataacccagaaaggggtgcctgtgggtatacctacccacgtgaacccagtggctgccatggtcctcttcaggcccagagatggggcctcgccctggccttgctctgaccagcctgctcctgggacatgggtgctcccgcttcggctctgatttgggctcaggtgtgcactggctgggtgtggactagtattcctttgaccctagccctgcagtggaacctaataaaagcgcctgaagcgaacaaaaaaaaaaaaaaaanaaaaaa

SEQ ID NO: 372 - DNA, 2992 bp, Cricetulus griseus
ggcaaagagaataaaagctaagcccacttcagacaaacctggaagtccatatcgttctgtcacgcacttcgactcactagctgtcatagacatccctggagctgatactctggataaattatttgaccatgctgtagccaagtttggaaagaaggacagccttgggaccagggaaatcctaagtgaaagaaaacgaaatgcagcccaatggaaaagtttttaagaagttaattctcgggaattataaatggataaactatcttgacgtgaaccgcagagtgaataacttcggaagtggactcactgcattgggactgaaaccaaagaacaccattgccattttctgtgagaccagggctgagtggatgattgcagcacagacctgcttcaagtacaactttccccttgtgactttatatgccacacttggcaaagaagctgtagttcatgggttgaatgaatccgaagcttcctatctgattactagtgttgaacttctggaaagcaaattgaaggcggcattattagatatcagttgtgtcaaacatatcatttatgtggataataagactatctgcatcatagcaatttgatagctggaatgacaggccagtgtgaaagaatacctggacttggaccaaaggacacgtatattggttacttacccttggctcatgtgctggaattgacagcagagatatcttgctttacctatggctgtaggattggatattcttctccacttactttatctgaccagtccagcaaaatcaagaagggaagcaaaggtgattgtactgtgctgaaacccactcttatggctgctgttccggcacaccgattcatgaatgtctgcttctgctgccccattggtcagggctatggactgacagagtcatgtggtggctgggacagtcactgaagttactgactatactactggaagagttggcgctcctcttatttgctgtgaaattaagctaaaagactggcaggaaggtggatatacagttcatgataagcaaacccagaggtgaaatcgtgattggtgggcagaatatctccatgggatattttaaaaatgaagagaaaacagcagaagattattctgtggatgaaaatggacagaggtggtttttgcactggtgatattggagaattccatcctgatggttgcttgcagattatagatcgtaagaaagatcttgtgaagttacaagcaggagaatatgtgtctcttggaaaagtagaagcagcactgaagaattgtccactgattgacaacatctgtgctttggcacaacagaagggatagaaggatcttgggttgatatttgcaataaccctgccatggaagctgaaatactgaaagaaatccgagaagctgcaaatgctatgaaattggagcgatttgaaattccaatcaaggttcgattaagcccggagccatggacccctgaaactggcttggtaacagatgccttcaagctgaaaaggaaggaattgaagaaccattatctcaaggacattgagcgaatgtatgggggcaaataaaatgtcactcttatttacatttgcacaggaggtggcctgatggttttcagttctagactttaagcctttgttgacctgttagaatgcaaggtatatcttctaaagacataaaaaaaaaaaaaaaaaaagtgggtgattaattgtcttggatgagcctggggaagttaaagggaagaaaacactgttacaacttttcctgtttacggagagttagagactggaaatgctagatttgggagaagggcagggttacttgattaaggactgtctgtgcagtaacttggggtgtgggtttctttttaaatcttcagttaaagtctgggattatattttcttgatagatattcgcacttgaaccatagttactgtaaaaagcaaaaattcttaatactgttattctttgcactttttcgtaatcattttatacacacacaacacacacatgtgtatatatatatacatatatatatatatatatgttgcttacattgtgttgtacagatgtgggccaccactgcaacaaaatgaattctttgcgctctaaaatatttataaagaaattatttaaatgttctgtatatggtggtaatagagaaaaaaatcatctggtatcataagcaacagcgaaggttttgtaaaaagttcttttcagtgttccacagaataaaattactaggtccttaagaatcacgtaattaacacttaaggttgggtgctgctaattaattcttcatgaaaatccaaacatgttaagggaccagggagatgccactgcccccccctgacttttcatcagaaatatacatgtttatgtaaacagaaatattttccatattcatagtgactttttaagtatttgagcctacagattttgatctccatttttatacctatttaaattgttcacaattattacatgtcagccatcaagtaaagctgtacttaatattgattataagtgtatacatttctaagttgaacactcatgatttttgctttaattacatgaaagggtcttgtttccttgctgtttgtacttttttatgttgactgaaggtatgattatatgacctttaagaaatgaaatactggggaacgattcatatagtctgaagtgagagagagtcctatttctttgttcatagagactgagtagtaatctttgcctatactttcccggtagcatacgacaaatgtttctacagtgacaagctgagaacaggttaaagattgtgtgacatttgggaactggagagtaataattttaattttgaatgtagttacaaattttgtattcatatttgtactttcttttaaaatgcacgattgtatgattgttctttagatttttttgtgttttctcttgaaaagctttgtctgttcttatttttaagttttgcacttgaatcttatgaaataaatccacccatgttatcaa

SEQ ID NO: 373 - DNA, 2991 bp, Cricetulus griseus
cctccttgccccagctccctgcgaccctctttaagaggcgactagattcctgggttctatcccgcacaccatggacaagttttggtggcacgcagcttggggactctgcctcttgccgctgagcctggcgcaacagcagatcgatttgaacataacctgccgctatgcaggtgtattccatgtggagaaaaatggccgctacagcatctcacggactgaggcagctgacctctgccaagctttcaacagcaccctgcccaccatggaacagatgcagaaggccctgcacaagggctttgaaacatgcaggtatggattcatagaaggccaggtagtgatcccgaggatccaccccaatgccatctgtgccgccaatcacactggggtgtatgtcctcacatccaatgcctcccactacgacacatattgcttcaatgcctcagcaccccttgaagaagactgtacatctgtcacagacctgcccaattccttcgaaggaccagttaccataactattgtcaaccgtgatggtacccgctacagcaagaagggcgagtacagaacacacccagaagacatcaatgccacaagtaccatagatgatgatgtcagcagcggatcctccagtgaaaagagcacctcagatggctatgtttttcacaccaaccttcccactgtacactcaactggagaccaggatgatccctacttcatcaggagcaccccagccaccagaatggatggcaggggaagtactcccccacaccaactgaagactcccatgtgacagcaggggcaactgcatcaacccacaaccatccaagtcaaagaatgacaacccagagtcaagagaacgtctcctggactgagttcctcgacccaatttcacatccaatgggacaagatcatcaaacagaaaggaaggatacggacgccagtcatagtacaacctttcggcctactacagctccaaatacccatttggtggaagacttggacaggacaggaccactttcagtgacaactccgcagagtcattctcaggaacttctttacatcacatggaagaaatggaagaagagaaataccactcaacaacttctgttctgccatctagcactaggagaagaagaggtccaagccttcccaaagatgcaactacttctctggaaggctacacctctcattacccagacacaatggaaaatgggactctcaccctagtgactcctgctaagactggggtcttttggagaaactgaagcgactgttgctgcagactccgactttaatgttgatggctccttaccagaagaccaagattcattcgtggaccccagtgggaatccccacactgtgaccgaattagctggacactcaagtgggagtcaagatggtggggtgaacacaacttcttctccagggaggaaacctcagattccagattggctcatcatcctggcatctctcctggcgctggctctgattcttgctgtttgcattgctgtcaacagtaggagaaggtgtgggcagaagaaaaagctggtgatcaacagtggcaatggaaaggtggaggacaggaagccaagtgagctcaacggggaggccagcaagtctcaggaaatggtgcatttggtgaacaaggaaccctcagagactccagaccagtttatgacagcggatgaaacccggaatctgcagaacgtagacatgaagattggggtgtagtgcctataccagtaacttggaaagacaccaaaatcgcaaacatgtcaatactgggagctgggacccttaacagatgcaatgtgctactgattatttttattgggggtagtttctgcacaaaattttctattccttttgcattttgcattttgttaaaagtctgttccaatttatgaaaacagcattgctttctgaaatgagggcccaaagaatactccattaagaatttgactcttccagctccttcctagaggtcttgcattcccaagggatgctatggatggcttctatcaaatgcaaattcctggtccctattgaaccttttccctaacctaagtcccaggtaacagccaccagccagggacttaccccagggcttagagggattggtctctgggaggaaatttgggaggaaattttgcctctccagcagcccaatcttgggcattgctttccagtggggtgggagatcaggtgtacttgttacataccttttttttatagactcccctctctgctggaaaattttcagatgcttctgaaagaatcccaaagggtgaagctatttatctgtagtaagctatttatctttgtttttgaaaaatcaaaccctggaggtcctttgttcagaatgtacttttttttttattttattttattttgtttttttttttttagtttattttgtcagaagcataacagggtataagttgattcataataaacacctgtccatcttccatattgacctgttgtgctgtgatccttcagtttctaaaccagcaaggtttgagtcttcatagcatatcaggatgactttagaatggtcctcctaaacctgtgccagagcatctatgcccaaatcaggttcaccaggctgaatttcctaaaagatcaaacaaagaaacactgtttggaatctagggctatcaaaagggtttctctcctattctggaatctgaattgtgtgtaggaaagctttaatcaacctttgtgctttgggccacccttttctctcccttaaagggcacattaagttctttgtgaaaatctcctgtgttgacttttcaagtgcagccaattgttatgtatgtacaatgacttttgttatcgttcctttgattttttttcagagaccaccctccctttctctggtttttgtatatttattgattgaccaataataatgaggaaagcgtgatgtatatatcgcccaattgaaagtgtgtattggaaaacattaaaaagccataagaaatggaa

SEQ ID NO: 374 - DNA, 2990 bp, Cricetulus griseus
ggagtcgcgccgctgtcggtgtcccctccctccggtgggcccggtagctagtgaaagtcagtgccacagcccaacctcgctgctctgggaagccccttggagacgtggcccgggagggagcctacgggctagggacgtctatgagggaagggaacagccgctagagcctgggtcggagagaccggactggggccgcggccggctccgggcaggggtctgggagaaggtggcgctgggcagagcctgggaagcagccggaacgttctcctccgaggcccgcgctggaggcgcctgaagcggttcctggaagagggtgttcccctttgagaaatcttgactggaggaggtcctggggtcacccttccgaggagactgtatgaaaacagcactcggaaaattgaaaactatctaaatgattgtctttggttgggctgtgttcttagcaagcagaagccttggtcagggtctgctggtgactctcgaggagcacatagcccaccttttggggactacaggtgccactactactatgggtaattcctgtatctgccgagatgacagtggagcagaagacagtgttgacacccaccagcaacaggctgaaaacagtgcagtcccaactgctgacactaggagccaacctcgggaccctgttcggcctccaaggagaggccgaggacctcatgaaccaaggagaaagaaacaaaatgtggatgggttagtgctggacacactggcggtaatacggactcttgtagataatgatcaggaacctccctattcaatgattacattacatgaaatggcagaaacagatgaaggatggttggatgttgtccagtcttttaatcagagttattccattggaagatccattgggaccagctgttataaccttgttactagacgaatgtccattgcccactaaagatgcactccagaaattgacagaaattctcaatttaaaatggagaagtagcatgccaggactcaggccacccggccaaacataggaacacatccgcagtcctgggctgcttggctgagaaactagcaggtcctgcaagcataggtttacttagcccaggaatactggaatatttgctacagtgtctgaagttacagtcccaccccacagtcatgctttttgcactgattgcactggaaaagtttgcccagacaagtgaaaataaattgactatctctgaatccagtattagtgaccgactggtcaccttagagttgtgggctgatgatcctgattatctgaagcgtcaagttggcttttgtgcccagtggagcttagacaatctctttttaaaagaaggcagacaactaacctacgagaaagtggacttgaataatattagggccatgctgaacagcaatgatgtcagcgagtacttgaagatctcacctcatggcctggaggctcgctgtgatgcctcctcctttgagagtgtacgctgcactttttgtgtagatactggggtgtggtactacgaagtaacagtggtcacttctggtgtcatgcagattggctgggctactcgagacagcaagtttctcaaccacgaaggatacggcattggggatgatgagtactcctgtgcctatgatggctgccggcagctgatttggtacaatgccagaagtaagcctcatgtgcacccgtgctggaaggaaggagacacagtaggttttctgttagacttgaatgaaaagcaaatgatcttctttttaaatggcaaccagctgcctcctgagaagcaagtcttttcatctaccgtatcaggattttttgctgcagctagtttcatgtcatatcaacagtgtgagttcaattttggagcaaaaccattcaaatacccaccatctatgaaatttagcacttttaatgattacgccttcctgacagctgaagaaaagatcattttgccaaggcacagcggcctggctctgctgaagcaggtcagtattcgagagaactgctgttcgctctgttgtgatgaggtagcagacacacagctgaagccatgtggacacagcgacctgtgcatggattgtgccttgcaactggagacctgcccattgtgtcgtaaagaaatagtgtctagaatcagacagatttctcatatttcatgacacatgttgaagagatatcatggacatatttctactcaattccagcaatgttgaaaagaaaaaaaaaaccacacaaacatctctaaccagttgtactcacattgaaacttatagccatggccagattttatgctaaaattggtagtttgtcagagacaaattctcttagaatctaatccaacttgccagccctgaattccttttgaggccaaggaaggctggatgtcagcagctgggcctgtggtacttccatgaaaaacaccaagtgacaagggtctcctgaatgccgagaccaccctggaattcttcatattgggttcatttgattgtttaacacaaggtgttttgtgtcttagtctacagtttttattttggagtgaagtcattttggagaagtaattgacagcgtgtgtgggttaagcatcattggtcagagaaaccggtgtgttaagcatggatattgcactgcaagacttgaatctattaacgtagcatcacacaggtcattactgcaagtgacttggagatcctgaaagaaggtgtacagattgtaggggccgggggggaaacccaattttttttttttatatatttcagtgactccaaagaacattctagtttttttaaacttacagaaaattggtgttattttcacattcatggtgtttctatcgagttttagtacccacgttttgtgcacttgttactcacaaaaaaaaaaaaatatatatatatatatatattaaagtatatatacagatagagttatgtgttctcttcaagcttgtgggtgaatgcagtaatttgcattgaagaataaaataatctgttgcattttttactct

SEQ ID NO: 375 - DNA, 2989 bp, Cricetulus griseus
tacctgaagaattccatgattttgaccagccactgccagacttagatgacatcgatgtcgcccagcagttcagcctgaaccagagcagagtggaggagataaccatgagagaagaagttgggaacatcagtatcctgcaggagaatgatttcggtgactttgggatggatgaccgtgagataatgagagaaggcagtgcctttgaggacgacgacatgctagtgagcaccagtgcctccaacctgctcttagagcccgagcagagcaccagccatctgaacgagaagatcaacctacttagaatatgaagaccagtacaaagacgacaacttcggggaaggcaatgacggcggtatcctggatgacaaactgataagtaataatgatggtggcatctttgatgatccccctgctttgtctgagacgggggtcatgttgccagagcagcccacacacgacgatatggacgaggatgacaacgtgtcaatgggtgggcccgatagccccgactcagtggatcctgttgagccaatgccaacgatgactgaccagacaacacttgtcccaaacgaggaagaagcctttgcattggagcccattgatataactgtcaaagaaacaaaagccaagaggaagaggaagctgattgtcgacagtgtcaaagaattggacagtaagaccattagagcccagctcagtgattattcggatattgtgacaactttggacctggccccgcccaccaagaagctgatgatgtggaaggagacggggggagtggagaagctgttctccttgccggcacagcctctgtggaacaacaggctactgaagctcttcacgcgctgcctgacaccccttgtaccggaagaccttcggaaaaggaggaaaggagggaagcggacaatttggatgagttcctcaaggagtttgagaaccccgaggtccctcgagaggagcagcagcagcagcagcaacagcagcagcagcgtgatatcatcgatgagcccattttggaggagcccagccgcctccaggagtcagtgatggaggccagcagaacaagcatagaagagtccgccatgcccccaccaccacctcagggagttaagcgaaaagctggacaaattgacccggagccccccgtgatccctcctcagcaggtcgagcagatggagattccaccagtagagctgcccccagaagagcctccaaatatctgtcagctgatcccagagctggagctcctgccggagaaggagaaggagaaagagaaggaaaaggaggaggaagaagaggaggaggatgaagatgcttcagggggtgatcaggatcaggaagaaaggaggtggaacaaaaggacccagcagatgctccacggtcttcagcgagctcttgctaaaactggagctgagtcgatcagtttgcttgagctgtgtcgaaacacaaacagaaagcaggctgcagcaaagttctacagctttttggttctgaaaaagcagcaagccatcgagctcacacaggaagagccatacagtgacatcattgcaacgccgggaccaaggttccatattatctgaggagctggaagcattagttctagtgtttgctcactagtacatacaaattgcccccgtgtgtagggcaccaaaaccctataaggaagtttttagatttttgtttgtacaaaatctttgccttttctttcttcatctccccccccccccccagtgtttctaatttgtccaccatcttttaagggaaactgcttatttgggttgggattgtattcctggagagaacagtacccccaagaacccagaagacttttaaccagtcagaacagatgtgtgcaatattggtgcatgagataatatggagtgataacagtcagaagtccccatttttatgttagttttccattgctgtgttgaaaggaaaacctgcctaggaaaatgcctgacactcttaagagctgtggtttgagtcccttgacgggaagagaaaatgtcttcccagcagtctggttaaccactgtgcccagggatagatagcacaggaagcatcatgatgtcttcttgatcatgttttaaagtaatgccatgatgagcaggaatttgtgacttgtgttgtgactgacccgcttggactgttgtgtcgtgaaatcattccgtgagggctgccgatcactttttaaagttgtttgggtatgtttgcttgagtaatgcgatcatgaaaatagaaagtctgctgaagggcaggctgatgagaaactacaccaggtagactttgctttacgcaaacagtgctgtaaaaactaacggcttctccgatatttattataaatgttagtactgatctctttacaatgctgcacactcctgtattggaagcttattttaatcgtttcgcaactgtaatcctgtatcagtttcctataatttaaatggagaaaaacatcaagataaaggctttattattaacagaccagatagcaccagaaattatgtgactatatatgaatatcgaaatacgtcttcacttgtcggaaaaaattatgttgaaagttctagcttaagtgttggcacttttatgggggggaaatcaattttaaaactaagacttccatgtataaccagtaattttaaattatgtgaaatattttaaatttgtgaactcgtaattactattttaaatgattcagtttcttgagaatggtaattgtataaaattgctcttgcagttttattttcaatacaccgtgcctgtaaaccatggatatcccctttgtaaaaagacattgtagataattgaatgcttgattctagaaaggtcattagtttcttgttacacattttgttagtctggtttttgtcgcttattgggtttaatattgttcttgaaaatagttgatgatatgttatgtataacttttctaataaaagttgtgtttcaagctgtaaaaaaaaaaaaaaaaaaaaaaaaaaaa

SEQ ID NO: 376 - DNA, 2989 bp, Cricetulus griseus
gagaaggcagaggatagcaacatgccgatacgtcgagctgtgaattccacccgggaaactccacccaaaagcaagcttgctgaaggggaggaaaaaagccagaaccagatggaagttcagaggaatccatctccacagtagaagagcaggagaatgaaacaccacccgctacagctagtgaggcggagcaacccaagggggaacctgagagtgaagacaaggaagagaacaagactgctgaggagaccaaaaaggatgagaaagatcagtctaaagaaaaggagaagaaagtgaaaaaaacgataccttcctgggctactctttctgccagccagctagccagggcccagaaacaaacaccaactaggcttcctccccacggcccaagatggatgcaatcctaactgaggccattaaggcatgcttccagaagagtggtgcttcggtggttgctattcgaaagtacatcatccataagtacccttctctggatctggagagaaggggctatctccttaagcaagcactgaaaagagagttaaacagaggagtcatcaaacaggtaaaaggaaaaggtgcatctggcagttttgttgtagtccagaaatcaagaaaaccacctcagaaatccagaaacagaaagaagggctcagcagtggatccagaaccacaagtaaagctggaagatattctcccattggcctttactcgactctgtgagcctaaagaagcatcctacagcctcatcaggaaatacgtgtctcagtattaccctaagcttagagtggacatcagaccccagttgttgaagaatgctctgcagagagcagtggagagaggccagttagagcagataactggcaaaggtgcttcggggacattccagctgaagaaatcaggggagaaacccctgcttggtggaagcctgatggaatatgcaatcttgtctgccattgctgccatgaatgaaccgaagacctgctccaccactgctctgaagaagtatgtcttggagaaccacccagggaccaattctaactatcaaatgcatttgctgaaaaagactctgcagaagtgtgagaagaacggttggatggagcagatctctgggaaggggttcagtggcaccttccagctgtgcttcccgtattaccccagcccaggagtcctgtttccaaagaaagagccagatggttctaaagataaggatgaggatgaagatgaggatgaatcatcagaggactctgaggatgaagaacccccacccaagagaagcttacagaagaaaaccccagccaagtcccaaatgaaggctacatccatgaagcagagagggtccaagcctgtgcgtaaagttcctgctgcccagagagggaaagcgaggccactgcccaagaaagcccccccgaaggccaagacccctgccaagaaagccagaccctcaccctcaatcatcaagaagtctagtgggagctcctcaaaaaagcccacagccaatgcaagaaaagaagtgaaactgtccagcaagggcaaatctaccatgaaaaagtctttcaaggcaaaaaagtaaattttataggaaaaaagggtatcatgatagaattcaaaatcttattttataaggtcagtgtgcatttgttttagttatgatgcttttaaatttttattttcttcccgtgtgagcatttcgggaaggaatataaacaaaccaatgtagacatttgttagctttaggtactgttcccagtgcctacctcttcatcattttaatttctgcaataatcctggactttgctgaactatgtaatctaccctgttccttttgctcctcttaactgcaatcctcattcttcctctttttatggtccgatttgggtttttccccgttaagttaatctaaacaattgcaaagacttatatttgtagtgagcaccaacaggtaggtgctggaagtcaagaggaggcagatgcacttgataaggcattgcgcctgcctggagccttgctagagctgtggtgattaaccctggctgtaaaatcactccactctccattctctccagcttgagctggagatattttagctttgaaaagaagccctagtctctgtggtcccctagattcttaagatctccgctcctttggtctctctgaccaattgccaagcacgctttgcttcccagagcattgttcccttaacagcaagcacaagttgtctgcaccacttggtttttgactgaagggaagtacaggaatatgtggaatctgatttctggtgttgcttatattaccaaaaatgacagagtattctcgatcaaatgtctagatatatttttaatatttggggcatgagttgacagtccctgtttgagaatgactaatgtagaaatgttacgtggtagaacataatttgctaaaataaccagatttcagattcacctgttgcgaggtccccttcccccctcccctttccatagcagttttgctatcaggcaaatggtttcctttttgagatattttaacagaagagaggaaggggaaagcaaacgaagctgtactacctaaccctctttttgtttgtatttgttttaggatattgtgaggttgtgtaaaatagcactagcttccctcttaagaaatagtttctgcttatcatttatcccttccctgtggcacttgatattttaattgtcttaaactttttgatgtatatcctctggccccttacatactgccagaggagaaggtgtttgtttgagattcattccacttgcagtgtctcctgggatccccacagccttacgtatggctggaaaacggacttgagaaaatgggcttgaattggatcataacctgtgagatcccatcatgagtcattgggatttgtgttgcatgtaaggcaatctttcctgttgtaaatcttccttttttatgtacatatattttgagaaatatgaataaacatgaaattttaaaatctgctgaacta

SEQ ID NO: 377 - DNA, 2985 bp, Cricetulus griseus
  modified_base (2941)..(2941): a, c, t, g, unknown or other
gcggcggtggctcctggttcttaggcgctcgctgagctggaccggcaacgggaggcgcgtcgccatgccggcgtgacgggcgcccgcggctgcccgcgccgggcccccgcgctgccccacgccggcgctccgcgtcggcgccgggcggcaggatgggctgtatccaaagcatcacctgcaaggcgcggatccgggcgcgagaacatcgtggtgtacgatgtgtgcgccaccatcgaccagtgccccacgcgcatcgaggagacctcgcccatcgtcctgcgctacaagaccccttacttcaaagcctcggcccgcgtggtcatgccccccatcccccgccacgagacctgggtggtgggctggatccaggcgtgcaaccagatggagttcttcaacacctacagcgacctgggcatgtcaagctgggaactgcctgacttgagggaagggagagtaaaagccatcagtgactcagatggggtgagctacccctggtacgggaacactacagaaactgtgaccctggttggccccaccaacaagatctccaggttctccgtcagcatgaatgataacttttaccccagtgtgacatgggcagtgccagtgagtgacagcaacgtgccacttctcacaagaatcaagagggaccaaagttttaccacctggctggtggccatgaacaccaccacaaaggagaagatcattctgcagaccatcaagtggaggatgagagtggacattgaagtggaccccctgcagctgttggggcagcgggcccggctcgtgggcaggactcagcaggagcagccccggattctgagccggatggaacccatcccccctaacgcactagtgaagcccaatgccaacgatgcccaggtcctcatgtggaggcccaagcgggggccacctctggttgtgatacctcctaagtagaagcagactgcccaactgtgtgtggaacacatgccattgagacacgcagtggggttgccaggggtggcaggagccaaactgagtttctgagccaaagcagacctcttggtttgccagcctctgcagctacttgtgaagagtacagctgctccttgggtggtagaaccatatcccttaggaaaagccccttcttcttaggaataaagaaatcactgatttgacagacttgctgtgattaccatgcaagtagccatattttgcagctgaccgggatgattcttttatttgaactattgaccatttctttcctgtgagatgcaggggatgtaaatgaaactaaacagtgcctgtggcggatgctgcttcccaaccaattagaagcccgagtggaaacatccacaccaggtgtctcctagtaggacaaagcaaagctcagcaagcagaaccacatggcaagacattgaggaggagaatatgagcaatggctggtggctctagaagctgacaccctggacagctgatttccctattttaaaaaagagtgccatcttgcctgtctcctcgccaccctcccatcctgtgaccagtacctcctctccccactgctgtgtccagccaggccagctggttggctcatgggggagctttgttgaagtggaagttgcacctgctgcaccttttgggtgtggaaagattgagttcacccacacctccagctcatcccctccctccacatgaagcctcccaaggacaaggctggtcatcctggactgaagggaccccacacggcccaaccctggctcccaagcctgccaccccaccccacacttttgggtgggaaacaggggagaatatctcacctccccctccctctctctatgtggatagccaatgtcaatcatcccctgaggtttctctaaggtctttggaaggcagcttttgccctaccgtggacaggcttggtgccttcagatgtccaagagcagcatttatgtcaccaggatcagtggaatgagagcagaacttccccaacagggcaaaagtggtatatgttgttttactgatattgttttatttattggtatactcatttatttaattatttatttatttatggaattctgttatttattatacaccagaaaaatctacttccattgaaggtgtgtgtgtgtgtgtgtgtgtgtgtgtgtgtgtgtgtgtgtgtgtctccagcatcttagcaggttcccagagcaagtagattttctcctgcattttatagcaccactgccttcttgccccattcatcagactgtcctgcaccaagtcccatctctcagggtcctgctctctgataggcaatggttcagtcagtgggtgctaaagaattgagtgttacacttcgtaggtgacatttaccttttaattggagctatagacaatgccttaatttgaaggaatagcttgaatgctggaatttcaggtgcagaagtgggccagtaagagagattatttttttcttccttcaggagggcattttagagcctcttctcccccatacctattttcaaagtcagctcataagtacatgagcataagcaagcacacttacctatatccacatcccataattttggaatacctcccttgcattggccccatctttaaaataaaataaaaaaatttaaaaggaaccagctaaattaatttaaacctcattgagaaatgtagcctattttttcaccggccaccagccatctggtctaccccaccctgttccatttccttcctgctccttctcttttcagctactggcctatcagttaatttatgtgtacatgtcctctctgctctctccttgcttccctcaaatgtattttcctctcttaaaattgtcttgtttttggtattgtccaaggacagaagtggaggctaagagcatgagcatgtatgtgtgtcactgaagacagagaagccaggtattctgctacagtttgaagaataaatgccacaagaaganatgaagactggcgtctgcagagtggattaaaaaaaaaaagttaa

SEQ ID NO: 378 - DNA, 2983 bp, Cricetulus griseus
gtggaaatggctcaagtccagttaagaggcatacctcctgcaatccgttctccgcaaaactcacactcacattccactccttcctcatctgttcgaccgaacgccttgggcacttttacaactagtcagacatggcgcttctttttactgaacagtggacagatggttttgcatttcaaaatcttgttgaaacaacaagaatgggtgaatcaacaaagggaagatattgaacggcaaaggaaacttctagctaaacgcaaacctcccacagctaataattctcaggcacctgctaccaattctgaaccaaaacaaagaaaaacaaggcagtcaatggagcagaaaatgatccctttgttaggccaaatttaccacaactgctcactctggcagaatatcatgaacaagaggaaattttcaaacttagactaggacatctcaaaaaggaagaggccgaaatccaggcagaattggagcgtttggaaagagtcaggaatcttcacatacgagagctcaagagaataaacaatgaggataattcacagttcaaagatcatccaacgttaaatgaaagatatttattacttcatctgcttggaagaggtggctttagtgaggtgtataaggcttttgacttgtatgagcaaagatacgctgctgtgaagatccaccagcttaataaaagctggagagaacgaaaaaaaaaaaaactaaccacaaacatgcctgcagagagtatacgaatacacaaggaactggatcacccagaatagttaaactctatgattacttctccttggatacagatacgttttgtacagtgctggagttctgtgaaggcaatgacttggacttctacctaaagcagcacaagttgatgtctgagaaagaagctcggtctattgtgatgcagatagtgaatgccctacgatatctcaatgagatcaaacctcctattatacattatgatcttaagccaggaaatatccttttggtagatggaacggcatgtggagaaatcaaaatcactgattttggtctgtctaagattatggatgatgatagctatggtgtagacggaatggatctgacttcccaaggggcaggcacttactggtatttacctcctgaatgctttgtagttggaaaagagccaccaaagatttccaacaaggttgatgtgtggtcagttggagtcatcttctttcagtgtctctatggtagaaaaccatttggtcacaatcaatctcaacaagatattctccaggaaaacacaatactaaaagccacagaagtccagttccctgtaaaaccagttgtaagcagtgaagccaaggccttcataagacgctgtttggcttaccgaaaagaagatcgatttgacgtgcaccagctggcaaatgacccttaccttctgccacacatgagaagatccaattcttcaggaaacctacacatgtctgggctgacagcacctcctgcacctccttcttcaagcgtgatcacttactgaccctcctccaggattggcatgacatcatcaaaagcaatacttgaatttgagtgcatttgagtgttttgggtcccccccacacacacacacacaggacatggataggaagtgattatgaactaaagctctccatggggtcatgtgtgaggggtggatcatggacagttgactcagtgcacactcctcactctgccctggagcagcacggaacaggaataccatgttacaacagaagaggaggggacactgtaaataacgtttataatacctaaatatatttgattgttaccagagagttctaatatgaagggtagtttttcattatttaagaacacatggaaaaattatgagacattgtaacacgggagctacagtgcctggtacagcgtcagcactcggcagctgatctgcagaaaccaaagcaagaactgaatgccagcggccgtggtgttttataatagaatgtgagttagggtctttggacagttatagactttgttgtttgcctattctggcttttaccaagttgtacctcgaatcacatgtcaccagttgtgttaaaagggagctgccgtttctgggctctttacacctttaacacaaagagctgcctatttccaatcagttgaagtcactaaattatagtattcccagggctttcagtgttttagaattaacaggctatttttcttttgtttccaggccttgttcattaaaacaggagacagtgtgtaaccaaatgcaggccagttctatgcaggataatgataaattcccttctggctctattgtaaattattgtacagatgtcgtattacaattaccgagtttcagcagcttattcttgtacaaatgtttaaaaatacggcttttctaattggatattgtattttttttaagtcttctcgaaggcgctttaattgctgctaaatgatattgcttttttgctaaaaaaaaattgaatgacctccttgaaggcacaagttgactgtacatcatagagagatattaaaagcaggcattcattaacaatcaaggcatgtaaaatgatccatgttgggcatattgagttcttcaaatcagttttttaggttctagggctgtggaacacatagatactagatttataaattgttcatggttattctacatttctagaacgttctttagcatcaaggtgggatgatggtcccatagaatgtttcttgtggtttgtacagatttgttaaaatgtgaacattttctaactgcctgtgtggtagaaaccaatatttttccgggatgctgtatttcattcttgtacggtatttttttttctttattgtcacagtcataatgctgagacttacatgtaagttgtccatggtgcagaaaacaggctgtcctgaccagacaccccaacatgtacagttaaactgtggctcttacctgatgttgcaagccattttgtttgtttgttttcattgtaca

SEQ ID NO: 379 - DNA, 2982 bp, Cricetulus griseus
ccgccatcttggaccagcccgaggaagatcctgaggggagccgcagggtcagctgccgccaccgccgcgactgcagcccgagtgtctgcaacctcaggccagccccgccttcctgctggggtctcggccgacgggtcccggccgccctcccgccgcgtccgcgctccgcttcctcgtcctgacgtccccctcccgtccggaaagctgcccagccaccagcaaccccccagtgccaccatggcaactgcaccatacaactactcgtacatctttaagtatattattattggggatatgggagtaggaaaatcttgcttgcttcatcaatttacagaaaaaaatttatggctgactgtcctcacacaattggtgttgaatttggtacaagaataattgaagttagtggccaaaaaatcaaactgcagatttgggatacagcaggacaggagcggttccgagctgttacacggagctactacagaggggctgcgggtgcactcatggtgtatgacatcaccagaagaagtacatataaccacttaagcagctggttgacagatgcaaggaatctcaccaatccaaacactgtaataattctcataggaaataaagcagatttggaagcacagagagatgttacctatgaagaagccaaacagtttgctgaagaaaacggcttattgttccttgaagcaagtgcaaaaacgggagagaatgtagaagatgcttttcttgaggctgccaagaaaatctatcagaacattcaggacggaagcctggatctgaatgctgccgagtctggtgtacaacacaaaccctcagccccgcagggaggacggctaaccagtgaaccccaaccccagagagaaggctgtggctgctagtgacctctttgctcttgccctcatttgacctttcacatctgtctgttgggagcagtactttttactgcttccttgtcttctgtacatcttattgggtttaattaaaaaagaaaaaagaaaaacaactcttgtaaaaacagtttaacaatactaaactgctaaacaactagatgtaatcaggttatcaaaggcaagtagagtaataaatctctcctgcatggtaaatctagactttccccctttgattgtcctcgtgataggtttgtcaccaatatatgatttaaaatgagcactgatgcgggactcgatttttaccttcccttttggcaaggcttcgtctcactgtacggtttaaattcgatctcttcagcctttctcccatctttaaactgttcatgtatgtctgttgtagcaagaaagttcattgctgtgaaatgacttccgatggtagagaaaagggggtctgcaactgcttttgtttttgttggataaattccctcttgtaggggtggcatttttcttgatgaggtttgcttctgtcttagccttgcacagggaaaaatacccatttatcttttcttgtgcttaattaatagctttatcttttttttttatttttacaccattttattcttttctctttaacagaaagtaaatatgtataaaatttgaaggaacctaactaacaataccttctgtgtatattattttaatgaagaaaataaattgattactggcattggaacagtataaaataccagtttgtacagtgtgacctatatgagaccatgttactctcttccatttcacacaaggaaatagacacaactgcagtttcacaagtaatactggctccactccttggtgctggcagtgactggggacaggcataatgctggaaagagctcctggcatcagcggaaacactagtggattctagtccatctttgcactgtggcttacctgctgattttcttaactgttcttgtgtaatcaacaatgtgctaacctgctattctttttgtaaacattttgtgttacaggctgcattcttgccttactgtatagaaaaatggaagaaggctgggtttaatattgcacattttaagcttttatacctttatcttggaatggtcaacctctggaccagatagccagaaccacaggtctgctgttaagggattttaaattgtgcatttttaacactacagtgaagtaatttaatactatcctttgtgttcataggattgaggggctattttatgtcatgttggtctaaattgtttagtaaaagggaagaatgtttctaagtgtgtatgctgacatgaagtaagtcactactttgcactgggtggtctggcacaggaagaacaccctgcaaaggaaacaagcctttagaaggaaggcgtctgcttcagtccgctctccactcatggttgttggtttctagctgagttgaaagtggctgggaatcaagaggtcactggaagtgcgtgcaaggaagcccaagcacattatagaaaatgctcccagctaagtgctgtgtttcaaattcacattttaaatccctctttaccagacactaatgtaaaaatacatctttctggattataaacatgtagtaggtccagagttttgtatagttgatgttaaataaaagccaaaactggaatgtgcagaaaataggattcggtttatttgtgaattcaccttttgtctttgtttaatttaaaggattcctggagtagattgatatcttctgttaaagacttacatcgatccatttgcttacactgttgcatcacaagggattcacccagggaccatgacctgctggtgtgtgtatatatttacaaaaaaaaaaaaatcacccatcgggatataaggtagcaatcacaaactacagatgacttcagcttgttgaggtgcaatgccctgactctcagttagttacagtgggtcttgattgtttttgtgacagaaggatttattcagactgctgtactcttcatttgatgtaacaaaatgctattatctaaatatttgtaaataaagtacctgtatctagaattaaaaaaaaaaaaaaaaaaaaaaaaaa

SEQ ID NO: 380 - DNA, 2981 bp, Cricetulus griseus
gtcggatatatctttgtggttttagtggcagaaagctagataaacttagaaggcttattaacagtggcggtggagttcgatttaatcaacttaatgaagatgtaactcatgtaattgtgggagattatgaggatgacctgaagcagttttggaacaaatcatcccacaggcctcatgtagtgggagcaaagtggttgctggagtgttttagtaaaggatatatgctccctgaagagccatatatccacactaactaccagccaactggaattccagtttcagatcagcctgaaaaccagacaactgtcttggaaaagaacagcacattctctaaagaaagattttactcctaatgagaagctccagcaagctgatgaggatctgctctctcagtatgtaaacaatgactccacagtagtggaagctaaagccgtctgcatctatagagcttagaagttgggccttgcagtggttttactcagtaatattgtaaacatcataagagaacatgctggaaagattgtgtcccttcctagcagaattgttgctgactttgctgtggttccgctgctcgggtgtgaagtagaggcaactgtgggagaagttgttacaaatacatggctggttacgtgtatagattaccagacactagttgatcccaagtccaatcccctcttcacaccagtgtcagtaatgtcgggaatgactcctttaaaggactgtgttatttccttcagtcagtgtgttggagcagagagagattccttggtattcttggcaaatcatcttggagcaagtgttcaagaattctttgttcgcaaatccagtgcaaagaaaggcatgcttgcaagtacacatcttatagtgaaagaaccgactggttctaaaatatgaagctgcaaaagaagtggagtttgccagcagtcactatttcatggctcttagaaactgctagaatagggtgcccatttggaagaggaagaggcttccgaaaccacttgacagagttgtggtgtgtgtgagtaaaaagctcagtaagaagcagagtgaattaaatggggtcgcagcctcactgggagcagagtacaggtggagttttgatgagtcagtggactcatttcatttatcagggtcgggcaaatgatagtaatcgagaatataaatctgcaaaagaaagaggggtgcatattgtttctgagcattggcttttagagtgtgctcaagagtataagcatcttcctgaatctctctatccacacacttacaatcctaaaatgagcctggacatcagtacagtgcaagatggctggctctctaatagccgggtatcctccgcagttcctgcatctacagacgatgagccagatcatttgtctgtagaagatgatgagacaaacagcatggtcacgaatagcaaagaatcagcactattgaatgggaatggaagaaatgactgcaaaggagctctaacacagaccttggagatgagagaaaatttccagaagcaattgcaagagatcatgtcagcaacctgcattgtgaagatgccggcacagaggaattgcctgtcaagaagcagttgcaacagtgcttcttcaactcctgacagtgcacgctctgctcggagtggacgaagccgagtcctggaggcactcaggcagtctcgacagatagtgcctgatatcaacacagagccctcccagaacgagcagatcatttgggatgacccgacagcaagggaggagagagcaaggctcgccagcaacttgcagtggcctagctaccccacacagtattctgagcttcaggttgacattaaaaactggatgattctccttctctagagcctgtgtaccattcagaaattgctgagcaggccttgtgtgtgactgaagccccagaactcccaatctctgatgaagcagaaactccagcagcggataagcatccaatccctgtgcctcaacctcccagcattgctttccccttggccaagccacctgcagctccacatcctctggacaagattgaaaaaatggagaagagtcgtgaaaaacttaaaaaacagtatgtattccagatgtcatctctgaattctcaagagcgggttgattactgtcacctgattaagaaactaggtgggtcggtgattgagaagcagtgctcagaccccaactgcacacacatggttgtggggtacccattgcgcaatgagaagtacttagcctccatggcagctggcaagtgggtgcttcatcgttcctacctggaagcttgcaggaccgctgggtgctttgtgcaggaagaagactatgagtggggaagtagtgccatactggatgctctcactgatgtcactgaacaccagcagaaactagcacttgcggcaatgaggtggaggaaaagaatccagcaaaggcaagagtcaggcattgttgagggagcatttagtggctggaaggttattttacgcgttgatcggccccgagaagctggattcaagcgccttcttctggcaggcggagcaaaggtattacctggtcaaccagtacctttatttaatgaggctacacatcttttttgtgacttcaataaactgaaacctgatgactgcagagttttcatatcagaggctgctgcccagaacatggcctgcttgaaaacagaatatatcgctgattatctcatgctggaatcgcctccttgtgcggataattaccgtctctcagaagctgctttcctccagaataaagaatctgggcctggattatctcagaagaggagagctcctgcagagaacatcatcaaacggcctcgagttatatatatatacttgccattttaccttttttaacagcctaagcatggggtttaataatgaagctggggctttaaacttaaatgtgtatatatgtaaatgtatatgtataaacttccatgtttgccaaatgggggcaccaaaacttagaaaataaacaata

SEQ ID NO: 381 - DNA, 2980 bp, Cricetulus griseus
gaagatcctgaaggctttacagtggaagaaacaggaggagactcttggaaatacagcttgaggccttgcactgaagtattatttatagatatattccacgaatataatcaaaactcttactccagtactactagaaatgatgcaaactctacaaggtccaaccaatgtagaagatatgaatgcactgttaatcaaagatgctgtgtataatgctgtgggattagctgcttttgagctatttgacagtgttgattttgatcagtggtttaagaaccaacttcttccagaattacaagtttctcataataggtataagccattgcggcgcagggtgatttggctcattggtcagtggatttctgtgaaattcaagtctgacttgagacccatgctgtatgaagcaatctgtaacttgcttcaagatcaggatttagtggtccgaattgaaacagcaacaactctgaagttaactgttgatgattttgaatttagaacagatcaatttttaccgtatttggagaccatgttcacactgctctttcagctgcttcagcaagttacagaatgtgacacaaagatgcatgttttgcacgtcctttcctgtgtgattgaaagagtcaatgtacagatacgaccatatgtaggatgtttggtacaatatttgcctctcctttggaagcagagtgaagagcacaacatgttgcgatgtgctattctgacaacacttatccatcttgttcagggattaggagcagacagcaagaacctgtaccctttcctgctcccagttatccagctgagtacagatgtttcccagcctcctcatgtctaccttctggaagatggccttgagttatggttagtgacattggaaaacagcccatgtgttacaccagaattgcttcgtatatttcagaacatgtcaccacttcttgaactaagtttcggagtaagtctcagaacctgctttaagatcatcaatggctatatctttttatcatcaacagaatttttacagacatatgcagtaggtctgtgccagtccttttgtgagctgctaccagagattactacagaaggtcaagttcaagtgctcaaggttgtggaaagtgcccttaaagtgaatccagtgttaggcccacagatgtttcaaccaattctgccgtatgttttcagaggtgttattgaaggcgagaggtatccagtagtgatgtccatctatcttgctgttatgggtcgagtcttactacaaaataccagtttcttttcttcacttcttaataagatggcacatgagtttaatcaggagatggaccagcttttagggaatgtgattgagatgtgggttgatcgagtggacaatatcacacagcctgaaaggaagaagctttcagctttggctttgctttctcttctgccttctgataatagtgttatccaagataaattctgtggaattataaatatctcagtggaggcccttcatgatgtcatgacagaagaccctgaaacaaggacttacaaagactgtatgttgatgtctcatcatgaagaaccaaaagtaacagaagatgaagaaccacccacagaacaagacaagaggaaaaaaatgctggccctgaaggaccctgtgcacacagtgtcactgcagcagttcatctacgagaaactgaaggcccagcaggagatgctgggggagcaagggttccagtctcttatggaaacagtggacacagagattgtcacccaactgcaggaatttttgcaaggattctaagagcacgcacgcgccacgtggccgccatccccttctgatttaagctgacaagcccatcctgccatctgtacgtgagagcctgctgagatgaagtcatttgtgtaggaatacaaagaaaacaagaccatagatttttactataaaatataaagaataagtataaatccaaaatattaaagtcagaaaactattcctcaaaagaatttaattttatatttatgaggggccctgtgtttactagaggtgcatttatcaacagtatgtgcattgtttcctgttaagaaactcgttgattacattttaatcatgagctcttaacacttgagaagatgaaggttgatgttccagatgttttttctgcaacccgaattagttaaatttggttgccttatcctatttttttttaagctaatgaaaaaagtttgaaaaatgagactgctgcacaaatgatactattaagtttgtgcactagggaatcggcatgacagatacctactacccagagtatcttacaagggagctgttttcatctggaggagaaatcgagtgatttcattttcattctagccttctggatataggaattggtaaaggcacttttaactttacttgtagtgcatacattgtaaggcccactgaagtgaacctgtggtactgtagtgccaagtgggagactggtcatgctctggccctgttcctttgctacatgggaaggccagcagacctgtgagtgagcatcgagaaccagacagctccaagtcccctttctgctgtgactgtcatgattggccatgacaggctgctcagtatttacccatctcaggttcctcagtcaggggtgtctcagtgccatgggtgcacatcagagcacctcagcagcacccagggcactagcactgacataactagtcttcctttctgtcttccttcctatccctctgttgcactaaacgtgtgagggagagaattgacgccttactttgcattacttgccattgtgaggagcctttagagcatcttttaggaaaaactcaaaagcaagattggaaatgtcttatctttctatagaaatctggggacagtatgtaactgtgggaaaccactaccctttgtaagctatgaagcccataatgtctaaggatacataacgttttcagcaaagaaagaaaatatggtccaattaaattttccaaagatacctca

SEQ ID NO: 382 - DNA, 2979 bp, Cricetulus griseus
tcaagagtgacatccaacgagagaagagggcaaacaagggcagcaaagtcatggagaggctgaggaagaagctgtcagagcaaagaagtcactgctactgttaatgtcccccagcatggccttcagggtacacagtcgcaatggcaagagttacacattcctgatctcctccgactatgagcgggccgagtggagagaaagcatccgggagcagcagaagaagtgtttcaagagtttctctctgacatcagtggagctgcaaatgctgaccaattcgtgtgtaaaaacttcagacagttcaccacattccactgaccatcaacaaagaggatgatgagtctcccgggctctacggcttcctgaatgtcatcgtccactcagccacggggtttaagcagagttcaaatctgtactgcaccctggaggtggattcctttgggtattttgtgaataaagcgaagactcgagtctacagggacacaactgagccaaactggaatgaggagtttgagatagagctggaaggctcccagacccttcggatactgtgctatgaaaagtgttacaacaaaacgaagattaccaaggaggatggcgagagcgcagacaagctcatggggaaaggccagctccagctggacccccaaaccctgcaggacagagactggcaacggactgtcattgacatgaatgggattgaagtgaaactttccgtcaagttcacgagcagagagttcagcttgaagagaatgccttcccgaaaacagacaggggtcttcggtgtcaagattgctgtggtcacaaagagagagaggtccaaggtaccttacattgtgcgtcagtgtgtggaagagatcgagcgccggggcatggaggaggtgggcatctaccgagtatccggagtggccacagacatccaggcactgaaggcggcctttgatgtcaataataaggatgtgtcggtgatgatgagcgagatggatgtgaacgccattgctggcacgctgaagctctacttccgtgagctgcccgagcccctcttcactgatgagttctaccctaacttcgcagagggcatcgctctttcagaccctgttgcaaaggagagctgcatgctcaacttgctgctgtccctcccagaagccaacctagtgaccttccttttccttctggaccacttgaaaagggtggctgagaaggagacagtgaacaagatgtccctccacaacctcgccacagtctttggccccacgctgcttcgaccctcagagaaggaaagcaagctccctgctaaccccacccagcccatcaccatgactgacagctggtccctggaggtcatgtcccaggtccaagtgttgctgtatttcctgcagctggaggccatccctgcccccgacagcaagagacagagcatcctgttttccactgaggtctaaaggcctggcatcagtcggctcattaggaggtccacagaatgacctggaaacctgtgacaagagaatccatccccagagtgggaatgggacctttcttgtggtataatttaaccattcccaagctctgggccatctgccaagagacaaacacccaaagcaaaaggccaaagggtctacacaaatccagatgcgtctgcaagtcccaggctggccccagactgtactcttcccttgttgccgccagagggcaccccaggccagcccatccgccagcctgcgtgcaagggaaagctggcaaagagagtggtttttacgaatctaatttatcagagtttttctgctccaaagcagcagcttgctctagtggcttgttttaaaattttgatccgaaatagcttttgatacttgaatatttttaagttttatacatagtttctaattttttttcctaacggattcagacacctaataagatcctagaatgtacaccgtggtggacgggcagtgtcccaagcagcgttttgtcttccttcaagagccagctttcttttggtttggagtcatttctgatgtctctggaacatcagaaacatgggaagaaggttaggaaagtcaggcctgggggtaggagttcaagaaagaaatctataaatccttgcatcgttctttaaaaaggtcttggaatcccacatttgggaggtggaggcagaattactatgagttcaagaccaccttggcaagtgcttatcaggccagccaaggctccagtgcaaggctgtgatacaaggggcttggagtagacatggggagagaagaaagactggtagacttgaatcccaagctgctcctacagaaaggcatgacttgggggtgtagactgcttgccatggtaggattcctgtgcctggtcacatactccacggccgctcccacttctggaatagtgtccacaaatagcatctaccaaccccacagcacatgggggttcctgagaggcagagccatgtattcccctaccgtctgctcttgaacctgcccaaggtgttgggcaggaaacaaaagaccctgcagggtctccatctgcatccagtgtttgtttcgttggcctctttctcagcagagccaccctttggtccaacccttgagtatttctggacctagtgggctcctgtagcttggctgcccatctgagtctgtctcaatggctctgacccgataagaggaacactgctgagaaaagcaaaatgcgtggtgttctccaggagtgggaaaactcgggtttccctctgcaaagagaatgatggcccagagtccatcatgactgcccaccaagcatggctgccagactcttaacagaagaagtgatactttctaaccttggaacctgggtcctgggtacagtgggcttggcttcgtggtggtaacctggcctccacactgggtggatggtcttttagcttcgatcttgcttttgagctcagctgtctgtactactcctgtgccggaaggaccacgggcactctcattaaagctcctgaga

SEQ ID NO: 383 - DNA, 2979 bp, Cricetulus griseus
cacttaagaaatgtcatgaaattgagagacattttatagaaatcaccgatgaccagtttgattttcatacatactgtatgaggaagatcacccttagatcatatgtggacttattaaaactagaagatgtacttcggcagcatccattttacttcaaagcagctagaattgctattgagatctatttgaagcttcatgacaaaccctcttacagatgagaataaagaacacgaggctgatacagcaaacatgtctgacaaagagttaaagaaactacgtaataaacaaagaagagcacaaaagaaagcccagatagaagaagagaaaaaaaatagacagagaaagaaaagcagcagagaaatcagaaaaagaaaaaggaatagatgatgatgaggaaatcggaggccccaaagaagaacttatcccagagaaattggaccaaggtacttgcatggaggtattggaagccttgtgtgatggtagcctaggagactgtaagaagctgctgaagcttatagagcaaattgtcataagcttttcccttatgctttggctttcatgccccctggatatgaagaggatatgaagatcacagttaatggagatagttctgcagaaactgaagaactggccaatgaaatttgaacatcattaaacagcaaatggaatgatactttaaatttgtcttgtgagattttactatatctcagacagcataaatgctgttttagcactggattctttcactgagcacaaagagttgttggggctttagcatctgactgattttgttacggggttgattcttgaccataggaagtatgcaatgtgaatcactatgtacagagccatctacaacagacgcttgacgttgtagagactgggacacatagctaccaagcagattatatgaaacctagaaggtgttcagtacgtgtgttgtgtttccaaaatttgctgtacatgatcagtttggtgttcttgtaccacagtttttaaccgaaggaaccagttggaacaatctcaattttaacaaaaacttgaagaactaaaataacaatgcaaatctttagcattgtttgccaaacttgttaaaactgtaatgcaagaaccaaatgcactgtgatgtggcaccaactaatagcaagcatgaattttcaccttgaagaaagaaaaaagaaaaatctaccatggcttgaagttaaagagcagaactcctgactaccattctatgactgatcaagagactaatagctaaaaacctcagcaggccttgttcacgatatgcagaaaaaagtgctgcagtttagatacctctggaacttttccacagtgtcacaggtttgtaatacttgaagcccttcatttctaagaatatatttcttgctcagttgtttcaggcaagcccaagactttgtaatttttaaagggcccaagatttttttttcaataacagaccagcttctttttcctgcagttacaaatgtaatttcttttttgttgtcaaacataaggtaccaaatatgatgcaataaattgttttgaaaaacagttgtgtgaatatttccactaatccgagttgggcttctgtgaaatacacaggtggaaacagaggttgcaagccagaggcaatgaaatgcactgtagagttagtacagatgggagctttttagagtgggctaattgatggtgtcagggaagttccagaataaagtagaatgctgctcctttgttcagatttcactgagggctaggattgtggcaggtcctatgaatgtaattcataatctgaaaggaaaactaaacacgactattttgattgggaaaatgagccttaaacatgtcaaacctgtacactgagaactagcctcaggctcaatattctctttatgtttgcaaggtctgagcaattaagtttaagtaaaatgaattaagtgtatataaaattgaacttttgtagtattttagttatagatagttcatacgctaaagggaattttcagaagatcaaatccttttatttcatagtacatgatctgcattccacatcccagtctaacaggttagtgatgcaaagataatcgtagtctgaactccagtgctttgctttaacaggccctgtctcaggaacatcttaacagatggacaaaaaaaatttctcctatgagtggcaactgagactcttattgtatggaaaaacactagtgcttcctctgccactaattcagtgttggaggaggcaccagccatatagtaggcgcgtgtgtgtgtgtgtgtgtgtgtgtgtgtgtgtgtgtgtgtgtgtgtatttgtttaagctctactgtatatcacaatgaaatccgtctatttgtcttgacaatgttcaaacaatgtagattgtcttagaaggactcagaaggactgagactctaatgcagatgccacccgagaggagctaaattcctatcatgtatattgtatttcaacccaattttactggaactattgaataaatcttttattttctttcaggtttacttgatagtgtatacattgtctggtgtcaaaggaccttgactgggttcacctaaaacattgtactgtactctctgagtatatcaactggatcatttcacatttgccccatccatattcagttaaaatccagtgatactgtgggggaaaacagggttagataaacaagttggaaaaatgcagtgtgatgttgtaatctaaacaagtgccttatgtttattgctaagaactggtgttatcaacccttttaataagaaggggttctctcggcctgtattaatataggaaagtaaagatccttttgtttttctttatatttccttattgtcatttctcattgaaaagctaaaactctgactagcttagtttacttagctttaattagatagttgagtcatacattttcactattttttctgtatttattatgcacaacaataaaaatgatctctaatagcatga

SEQ ID NO: 384 - DNA, 2977 bp, Cricetulus griseus
aggaggtgatctctcgggctgagcttgtacaattagtctctctttctgggaatcctgaattgtttaactggtttaaaaactttctgggatataaggagtctgtacatctagaaagctttccaaaggaacgagctacagaaggcattgcaatggagatagactacgcctcttgtaaacgactgggctctagctaccgagccctgccaaaaagttaccagcagcccaagtgtacaggacggactcctctgtgtaaagaggttttaaatgatacctgggtttccttcccatcatggtctgaagattccacttttgttagttccaagaagactcagtatgaagaacatatttatcgttgtgaagatgaacgatttgagcttgatgtagttttagagaccaatcttgcaacaatccgggttctggaagcaatacagaaaaaactttcccgcttgtctgctgaagagcaagctaaatttcgcctggataatacccttggcggcacgtcagaagtcatccatcggaaagaaggtcttgaggtctaagagcttactcaatgagattgagagcatctatgatgagagacaagaacaggctacagaagagaatgctggtgtacctgttggcccccacctctcgcttgcctatgaagacaaacagatattagaagatgctgctgctctaattatccatcatgtaaagaggcaaacaggcattcaaaaagaggacaagtacaaaatcaagcaaatcatgcatcatttcattcctgatctgctgtttgctcagagaggtgatctctcagatgtggaagaagaagaggaggaagaaatggatgtggatgaagccacgggggcacctaagaagcataatggtgttgggggcagtccccctaagtccaagttgttatttagtaatacagcagctcaaaagttaagagggatggatgaagtatataacctattctacgtcaataataactggtatatctttatgcgactgcatcagattctctgcttgaggctgctacggatttgttcccaagctgagcggcaaattgaagaagaaaaccgcgagagagaatgggaacgggaggtgctaggcataaagcgagacaaaagtgatagccctgccatacagctccgtctcaaagagcctatggatgttgatgtagaagattattacccagctttcctggatatggtgcggagtctgctcgacggcaacatagactcatcacagtatgaagattcactgagagagatgttcaccattcacgcctatattgcctttactatggacaaactaatccagagcatcgtcagacagctgcagcacattgtcagtgatgaggtctgtgtgcaggttactgacctttacttggcagaaaacaataatggagccactggaggccagctgaacactcagacatcaaggagccttctggagtcaacgtaccagcggaaagcagaacaactaatgtcagatgagaactgctttaagctaatgttcattcagagtcaaggccaggtgcagctgacaattgagcttctggatacagaagaggagaactcagatgaccctgtggaagcagagcgttggtcagactacgtggagcgatacatgagttctgatactacatctcctgaacttcgagagcatctggcacagaaaccagtatttctcccaagaaatttgcggcgtatccgaaagtgtcagcgtggtcgagagcaacaggagaaagaagggaaagaaggaaacagcaagaagcccatggaaaatgtagagagcctggataagctggagtgtaggttcaaactgaactcctataaaatggtatatgtgatcaagtcggaggactacatgtaccggagaacggctttactcagagctcatcagtcccatgagcgtgtaagcaagcgtctgcatcagcgattccaggcctgggtagataaatggaccaaggagcatgtgcctcgtgaaatggcagcagagaccagcaagtggctcatgggtgaggggctagagggcctggtgccctgcaccaccacctgtgacacagagactctgcactttgtaagcattaacaagtatcgtgtcaaatacggcacagtattcaaagccccttaactgcagagccagcacaggtagctcagaggtgtgtgtctgtgtgtgtgtgtgtgtgtgtgtgtgtgtgtgtgtgtgtgtaggcatgtgtactacacaccgaagaacagaggaagatgcctttcaagccaccagtgcaacctggcaccaagcaggaaccttagaaagctggaactggcacttttcccaagggtactagcctgcccaacagggaatgaagtccatgcaagcacagagaaccggcagcttgcttgcacacaccagcagagctcaagctagaacttctgtgacctgaacttgagcacatctacgatcccctgttagagtttgtctgagacctgctgtttggctttgggattgataccttgtggatttggtttctgagccgttgcagcccaccttcctccgtcttctggttctcagcctcaccaaattccagccagtcctcttttggcccccgtggactgttttgtacctgcttcttactggtctgccctagtgccatccaccagcttcactcacacacagacacacacagacacacacattttaacttggattttctttttgtaaataatgtatatactgtcaattttttattaaaggaaatatgctttgatgtgctagcataagtgctctagcttcttgtgtaccataggactatgtggcttcagatttagtacttataaagagatgtacaagacatttattacactttttaccaaagggagataccattgtagtacttttatgtaaaacttgtctcctcccccccccccttttcttttcctttccctttttttatgtaaaataaaagcttggttcttaaggaaataagtaaaaaaaaaaaaaaaaaaaa

SEQ ID NO: 385 - DNA, 2977 bp, Cricetulus griseus
agtaaataagaggacacgagcccaagctgcctcctcttaatagtgacactggcggcagcagtgctaatgttcctgacctgatggatgagttcatagcagagcggcttcgaagtgggaatgcctcgactatgacaagaaggggaagtagtccaggcagccttgaaattccgaaagacctccctgacattctaaacaagcagaaccagatgcgtcctgttgatgacccaggtgtaccctcagaatggacatctcctgccagtgcagggagcagtgatcttatgagctcggatagtcattcggattctttcagtgctttccagtgtgacggacgaaagtttgacaactttggctttggaactgacattgggattccgtcctctgctgatatggattgtctcaccaagagaagccagaagagcctcctacatctaatgaatgcttagaagacataacagtaaaagatggactttctctacagcttagaagatttagagaaactgtaccaacttggtctacaataagggaggaggaagatgctcttgacgagctcctgcaatatttaggcactacgagtcctgaatgtttacagagaactggaatctccctcaatgtccctgctccacaacctgtgtgcatttctgaaaaacaggagaatgatgtcattaatgctatccttaagcaatacacagaagaaaaagagtttgtagagaagcactttaatgacttaaacatgaaagcctcagaacaagatgaaccaacacctcagaagcctcagtcagcattttattactgcagattgcttcttagtatcttgggtaatgaattcctgggacaaacggaggagctttcatctcctgaagaaaaatgaaaagctgctcagagaacttaggaacttggattcaaggcagtgccgagagacacacaagattgcagtattttatgttgctgaaggacaagaagataaatactccattctcaccaatataggaggaagccaagcatatgaagattttgtagctggtcttggttgggaggtaaatcttacaaatcattgtggcttcatgggaggactacagaagaacaaaagcactggactgaccactccatattttgctacctctacagttgaagtaatatttcatgtatcaacaagaatgccttctgattctgatgactctctgaccaaaaaattgagacacctaggaaatgatgaagtacactattgtttggtcagaacatactagagactacaagaagaggtaattattcctacagaatttggtgatgtcctcattgtaatatatccaatgaaaaaccacatgttcagtatccagatcatgaaaaaaccagaggttcccttctttggtccactttttgatggtgctattgtgaatggaaaagttctgcccattatggttcgatccacagcaataaatgctagccgtgctctgaaatccctgattccattgtatcaaaacttctatgaggagagagcacggtacctgcaaacaattgtccagcaccatttggaaccaacaacatttgaagactttgcagcacaggttttctctccagcaccctaccatcacttccctcctgaggatcctacccagaaagtctgctcagtgatgctcccacagcagcccaggtagatggggctgacctggcctctccaatgtctcctcgaactagcaaaagccgaatgtccatgaagctgcgtcggtcctctggctcagccaataaatcctaaggagacaaacagcccagcagtgatcagcagcagccaccctggcacaaacgtagtgttaactctttctggcctcatgtttgccatacgttcatgtttcttcctgtacacttatttgagaaaacactggacttaaagtaatttgcaacttactgttttaaatttggactatttatttagttcagttttttccacactccatgctgccgtattttgaggggattgagttttatttcatactcttcaccttcctagataatcatgtctaagtagtgctaccttcaaattcatgattaatgttgagtcaaaatataattggacagatagtcttgtgttatttattgtgcctcattacaactttataattcaataaatacatagtttttactaacctttttttgaagtgccaggaatggaagccagcatccccagcatgctaggcaagcacactgtcctcacagcccagccctacaaatgtaaattaataaagcatttgtaaagctagagcaaaagctgctcatctgtccgttacataggatgtgtgcagactgtttgtgttacagacggaaacactggaatggccatgcagcagctcagattccagcggaaattacattcattaactttttcttcccaagtcagtgtctcatttcttggcagtgcaaatgacgacacaacacattgaataactaggaaaatcaccactgaactttgatttctgcttagctcccaaacaactttgttctgcttttttaggtggtatcactgttaaatactgtttctgctttgaggctgtggttctattattgaccagtttatcctggtgtgtctgtgtgctttctgaagtaccaaaaagagaggtggtggaaagaagggttttgctcaaattatgtgtattgtttaaaaagcaagggaacatgacccaggagtctaagttaaatctaatattttagtactaaacttgctgcaggtcaggttggtatgcatcccacctccagaagtatttcctatagtaaataagctgcccccctttgtttaacattaacatcctaaggaaatgtagcatgattgataccaactgcatgtgtaaatacatcatcctgacaaaccacaaaatataaattatgtatcattcatgtagtgtctacagatttgtaatgggacaaaaagatgacatggtatttaaataaaacaaaataaaatattcttcgacaaaaaaaaaaaaaaaaa

SEQ ID NO: 386 - DNA, 2976 bp, Cricetulus griseus
  modified_base (1900)..(1900): a, c, t, g, unknown or other
gcgaagtatcctccagtcgagcgaggaggcccgctcttccgcagccatagccgccccggaggttttaggaggtagcgaagggcagggagctggaccctgaggtgccgccgcgaccgcagcagccatggaggacgagatgcccaagactctatacgtcggtaacctttcccgagatgtgacagaagctctcatcctccagctctttagccagattggaccttgtaaaaactgcaaaatgattatggatacggcaggaaatgacccatactgttttgtggagtttcatgagcatcgtcatgcagctgcagcactggctgctatgaatgggcgaagataaatggggtaaaggaaagttaaagtgaaattgggcaacaacccccagcagtcaaaagaaagatacaagcagtagtaaccgttgtcagcacacagcgttcaacaagatcatttccatgtgtttgttggtgacctcagtccagaaatcacaactgaagacatcaaagcagcttttgcaccatttgggagaatttcagatgcccgtgtggtaaaagacatggctacggggaagtctaagggatatggctttgtctcctttttcaacaaatgggatgcggaaaatgccattcagcagatgggtggccagtggcttggtggaagacaaaaactaactgggcaacccgaaagcctccagctccaaagagtacatatgagttgaacaccaaacaactgtcatatgatgaggttgtaagtcagtctagccccagcaactgcactgtgtactgtggaggtgtgacgtcgggactgacagaacaactaatgcgtcagactttttctccatttggacaaatattggaaattcgagtcttcccagataaaggatattcatttattcggttcaattcccatgaaagtgcagcacatgcgattgtttctgttaatggtactaccattgaaggtacatgtggtgaaatgctattggggcaaagagactcttgatatgataaatcccgtgcaacagcaaacaaaatcaaattggatatccaccagcatatggccaggtcggggccagtggtatggaaacgcacaacagattggccagtatgtgcctaatggttggcaagtacctgcctatggaatgtatggccagccgtggagccagcagggattcaatcaggcccagtcttctgcaccctggatgggacccaattacagtgtgccaccacctcaagggcagaatggcagcatgcttccgagtcagcctgctggatatcgagtggcagggtatgaaacccagtgaaaacagactacagaatggcagccagtggcttgacgctacagggagggtaggaaaactgttgtttacttaaagatttatcaaatccgtcagtacaaatgccagataacaatgtatttatttaaaagatttcattttttaatcatgaaattacttttcatccactttgttttaaaaaggaacaaaaatggtggatgtctgccaatttttgccttcattatcttttttgataaagtttctcagatccttgttttcaaacacaaatgcagggattgctgccacttttaaaaaattaagaggcagaaaattgcacaatgttgaacttttttccactaaagtgtcatgcagtttagtttgcattcctgattatgatttaaaatatgtaatatagatgtaaaaagaaaagccaaaacttgtgcaaagtctagaagttctttataactttcagcatatgcacagttctgttttagtttaaagagatattgttaaatgaaaaaatgatgttcacttagactgaaaacttttctcagatggactgataattgcattcatcttgtttttatatgagaaggtgcctcaaggattccctgttggatttgtttaaagggntttttatcttctgtgataaactttgccgtctaccaagaactttaaaaacaacagcttgtgactaaggagcctctgaagtgtgctcagtcctcatccacatcagcttcatgtgccagcatctacatttacatctgttgtttgctaagatacttccacaagtaatattttgcagttagcaaactttgtatgtcattcctttcctaaaaaggtgtcatgaagagttgacatgagacaggatttacgtttgcacgtgaatatcacatacatactttggtagtctttgatacaaactcatctgttcttgttttcaagaattttgagtacacagagttgtatgtaaaggaatatattaatttgatgttttctagttagatttacttgaaagagtaaatccacttcattatgtacaaatgatagctgtgaaactgtagaatattcctctgtcaggcttgagattcattaagaacaccaaaattagcctgaaggaccagctgggaaaaacattttttaaatcttcagtggccaaaatatgaacaaacaaacaaaaaacccttaaaattctacctccttaaatagccgtcaaggaagaggctcctcaacataggcatgactttggttctttggcacctgatctcttggagcgtccacattattatttttgaggtttgctctttgatggcattgttcttgccttgggatttgtaatacatttcagagtcttcttgggtttgtgatggccacaacctcctccttgacatcagagagaaaggagcccctgtgaattgtgggttttgagacctgcagagagctcccagcattttacttaggcctgtggaattggaagcatttcctggcctgtatcttccaggtaggagcacatgactctaacctgttttctaagccagtcctcttgtaaaaaacagagcccaggaagatagcttgaaatgtgtgcttctctggagctcagttctatgcagttgtgctgatgtttcattaagtcactgtgtatttttaagtactaatacattgaaatttgctttatggaagatgaaataaattttttaaatacttaggaa

SEQ ID NO: 387 - DNA, 2975 bp, Cricetulus griseus
ctcacaggagtgacctaaatcctgagtctttatattttgaggatgaagatgggtttcaagaactaagtgagaatggaaattctaaagatgagaatattcaacagaaacttccttcaaaagtactggatgatttacctgaaaactcgcctatcaatatagttcagactccgattcccattaccacgtcagttcctaaacgagccaagagtcaaaagaagaaagcattagctgcagcccttgccacagcacaagaatactcagaaataagtatggagcaaaaaaattacaggaagctttatcaaaagcagctggaaaaaagaataaaacccccgtgcagctagatttaggggacatgctagctgctctggagaagcaacagcaagcaatgaaagcacgccagatcaccaacaccagaccgctcgcgtatccagtcgccgctgcagctgcttttcacactaaagactctgctaacagaaagcctttaaccaaaagtcagccctgtttaacgtcctgtaattctctggacattacttcctctaaagctaagaaggaaaagagaaggaaattgcaaagctaaaaagacccacagcactcaaaaaggttattttgaaagaaagagaggagaagaagggacgtctgactgtggaacacactgttttgggcacggaggagccaacagagacacatttggacctcaccaatgacttgcctcaggagactgtctcccaggaagatactggactgagcatgcccagtgatgcttcactttctccagcaagtcagaactctccatactgtatgacacctgtgtcgcaaggctctcctgctagttctggcataggcagcccaatggcatcatcaacgataaccaaaatccacagcaaaagatttcgagaatattgtaatcaggttctctctaaagaaattgatgaatgtgtgaccctccttctgcaagagcttgtaagtttccaggagcgcatctaccagaaggaccctgtgagagcgaaggccaggaggcggctggtcatggggctgagggaggtcaccaagcacatgaagctgaacaagatcaagtgtgtcatcatttcccccaactgtgagaagatccagtcaaagggtggcctagatgaggccctctacaacgtcatagccatggcccgggaacaggagatccctttcgtatttgcccttggaaggaaagctctcggacgctgtgtgaacaagctggttcctgttagtgtggtggggatcttcaactatttcggtgctgagagcctatttaatagattagtggagctcaccgaggaagcccggaaggcgtataaagacatggttgcagcaacagagcaggagcaagcagaggaagccttgaagagtgtgaagacagtgcctcaccacatgggccattctcggaacccctctgcagcaagtgctatttctttctgcagtgttatttctgaacccatttctgaagtaaacgagaaggagtatgaaactaattggagaagcatggtggaaacttccgatggcttggaaatgtcagaaaatgagagagagcttccctctaagcagagcccttctgagaatcccagtaaactcacaccggacacaacccctgtgagtaaggagctgcagctggctgcaggcagcactccctcagcgccaagccaggggaagcccgcaagtgacaaggacgaactgaagccggacgacctggagtgggcctcccagcaaagcacagagactggctcattggatggcagctgccgagatcttctgaattcctccatcaccagcaccaccagcacgcttgtacctggcatgcttgaagaggaggatgaagaggaggaagaagaggaagattatactcatgaacccatatcagtagaagtacaactcaatagtagaatcgagtcctgggtctcagagacccagaggactatggaaacccttcagctcggcaaggcccttcctggctccgaggaagacaatgcagtgcagagtggagaggaatcagcagaagcacctgaggggccggagtcaggagtggacagtgagagctggacccctgaccagcagccgaagcccagcagcaccgtgaacaaagagcactctgattccaatcctgctcctccaaatccataactcaggaagtgtcagttgtctccagctgtgtccagctgcagccatgtccctgatgctccaactcaacgttttccactgtccagttacttactatgttttaattcccaacagaccttttgtagcttttacctattttgttaagatctcagcttaacttttaactagtgttcaggtctgtttctaagaattgtgtagaaaattcagacttgtttcaacttactttgtaatgaaaaataatagattaaaagaaagaagaccaaattctaaagagaaaacatgatgttatttcctgcttgatgtcagtagttcagatgctcttgatcttgaggtagtggcttttcaaagatttcttatattttattctcttctggatgtggatcatcattttagagttttgacatttgtaccaaaacagatgttgaggaaatcttggaaacagcaataatttacttttgctgtagttgtcagaaggccagctggtggcctctgaaaggcagtggatttcctgccacaaaatccaagggaccacagactttatatgggaaactggtcacttctagaggacagccccaaaaatttatcaaaaggaagttcttccatgctgaatacccttaagtatgcatcagcgatgtctttataatctatttcctgattctgcagaatcttaaaactgaaccctggttaatgataacatttaaacttggttggcacatcacaccttaaaagtatttgtattgttttgtaatttaatttctaaatataccacctcaatttataatttaatgtcttaattataatgctctaataaaactagcaaaattagtggatta

SEQ ID NO: 388 - DNA, 2974 bp, Cricetulus griseus
agggcgcgcgcggagtcggcgtctccgggaagcgtgcccgacgacggctgcaggacggtgtacttgtttgaccggcgcgggaaggagtcggagctcggggatcgcgctctgcaggtcccggagcgcgcaggctacgctgggttccgcgcctccgtgtgtcagacaattggcatttcatctgaagaaaagtttgttattacaactacaagcaggaaagaaatcacttgtgataattttgatgaaactgtaaaagatggagtcactctatacctgctacagtcagttgaccagtcactatcaacagcaacaaaagaaagaattgacttcctgccccactatgacactttggtaaaagtgggatgtatgaatattatgctagtgaaggacagaatcctttgccatgaagatgtggaagctgtccagcagcatgaaccagccgccaccaaatgcagaaacatttagttgtaataaaataaaagataatgacaaagaagatggctgcttctatttcagggaaaaacaattcctaacaaagttggggcctactgtatccagttttgattttatgatcgataaaacacatgtgctcaacagtgatcaggttgtaaattgatgttctgcctaatcagcctatgaagttggttcctgacgtccaaccagctaccccagctgtttctaatgttcgctctattgccagtaggaccttggtcaaagacctacgtctcagtattacagataattatggtaatcatactggaatgaacttggttggcacagtagtagctaccattaaaggttttaatgaggaggacactgataccccactcttcatcgggaaagctaggacacttgagtttccctttgtgaatggatctgctgcaatcacaactctagtgctggcagaaaacagtcctggaagggatagtactgaatactttattatctttgagcctcgtctatcaactttatcaagaacattagagccatacagcctgccatttatgttttacaatgatgttaaaaagcagcaacaaatggcagcacttacaaaggaaaaggaccagttatctaagtctatcatcatgtatagaagtctctttgacgccaacaagcagcttgttgatgaaatgaaatgccaagttgaagaagcaaaattaaaagaagcccagctgcgaaatgaacttaaagcacacaatattgatattcctatagcacaacagatacctcacattgaagcacttttggaaaagaagctaacagaacaaaatgaactgaaaaaaaagcccagaagatcgtgtactcttccaaactacactaagcgtggtggagatgttttgggaaagatcgcacatctagcgcaaattgaagatgatcgagctgcaatggttatctcttggcatctggcaagtgacatggactgtgtagtcaccctgaccactgatgcagcacgctctatatatgatgaaactcaaggtcgtcagcaggtgttgccccttgattctatttttaggaaaactcttccagattggaaaagacctctacctcatttccgaaatggcaaattacattttaaaccctttggagatccagtctttgcccgagatttgttaacattcccagataatattgagcattgtgaaacagtttttggtatgctgttaggagacaccattattttggataatctagatgcagccaatcattatagaaaagaggttgttaaaatcacacactgtcccacattactgactagagatggagatcgaattagaagtaatgggaagtttgggggccttcagaataaagctcctccaatggacaaacttcggggaatggtcttcggagctccaataccaagacagtgtatggtcttggggaaacaaatagacctccttcagcagtaccgcactgctgtgtgcaagctgggcactgtgaaccaggacttgagcaatcagttgcagtaccttcacacccctgacatgaagaagaaaaagcaagagctggatgaacaggaaaaaagcctgaagctaatagagcagaaactcggtatgactcctacacggaagtgtattgactcattttgtcagtctacaaagattgagatgatagagtgtccaattcctactaaaaaaatgagaagagaatccactagacaaaatagaagaccgaaaggtgatgtgccaaactgagtgtttctggagacagtacaggaatcctggcaagaatgttctgtttctccgggtgggcctggaagcgcttgcacatgtcactcttacccagtgatgctctagctggccctgaagcgtttctcgccctgaagatgtgcaaacctcctgtttctcaacataatcatgactatattagaactgtttcttaaaaacaaccttttttactgcttttttgtgaacttatttaacaaacacattttgtcttttgtgtaaggaaagttctagagctagatatttaattgtaaatatgtgtggaaatttggattctgcattaaaatggagaaagcacaggtgtctggcaattaaaatgttcaaatacatggaaaaataaattgatgggatagtctaaagattttatcctgtatataagtaagatatgcagcagcatcgatttttataagtattgtctgaatttattattgctagatctatagcctcagctttaattctacatttgcattattttctaattttttactactatttttaagagggtaaagaaaacataaaaaaatgcaataaagtttgttaggaagctgttgtataaacatttaaactgtgtattaactcaagctaacatacactgtgtgtgtctctgtaagtgcaagacttttggtctgtgatgttattttgtaaggaatacttttggtacagttttctgtcctaggaaatgtgtgtgttttttaatcctttctgattatgcagcaaggttaataaacaacagtcatttcccctccaaaaaaaaa

SEQ ID NO: 389 - DNA, 2973 bp, Cricetulus griseus
gaagtctgtttcacgatagaaaacaagactccccagggacgagagtatgggatgatctaccttggaaaagatactaatggggaaaacatcgcagagtcactggttgcagagggcttggccacccggagagaaggcatgagagccaataacccagagcagaaccggctttcagaatgtgaggaacaagcaaaagcatccaagaaaggcatttggagtgaggggaatggttcacataccatccgggacctcaagtataccattgagaacccaaggcactttgtggactcacaccaccagaagcctgttaatgctatcatcgagcatgttcgagatggcagtgtggtccgggccctgctccttccagatcactaccttgttaccgttatgctgtcagggattaagtgcccaacttttcgccgagaagcagatggtagtgaaacaccagagccttttgctgcagaagccaagtttttcacggagtcaagactgcttcagagagatgttcagatcattctggagagctgtcacaatcagaacattctgggtaccatccttcatccaaatggtaacatcactgagctcctcctgaaggaaggctttgcacgctgtgtggactggtcaattgcagtttacacccggggtgcagaaaaactgagggcagctgagaggtttgccaaggagcgcaggctgagaatctggagagactatgtggctcctactgctaatttggaccaaaaggataagcaattcattgccaaggtaatgcaggttttgaacgctgatgccattgttgtgaagctgaattctggagtctacaagaccatccacctgtcgagcattcggccaccaaggttggagggggacaacatacaggataagaacaagaaactgcgtcccctgtacgacattccctacatgtttgaggcccgggaatttcttcgaaaaaagctcattgggaagaaggtcaatgtgaatgtggactacattagagcagccagcccagccactgaaacggtgcctgccttttccgagcggacctgtgccactgtcaccattggaggaataaacattgctgaggctcttgtcagcaaaggtctagccacagtcatcagataccggcaggatgatgaccagagatcctcacactatgatgagctgctggccgcagaggccagagctattaagaatggcaaaggattgcacagcaagaaggaagtgcccatccaccgagttgctgacatttctggggacacccagaaagcaaagcagttcctgccctttcttcagcgggcaggccgttctgaggctgtggtggaatatgtcttcagtggctctcgcctcaagctctatttgcctaaggagacttgcctcatcaccttcctgctggcaggcattgagtgtcccagaggagcacgaaacctaccaggcttggtgcaggaaggagagccattcagtgaggaagccacacttttcaccaaggaactagtgctgcagcgagaggtggaggtagaggtcgagagcatggacaaggctggcaacttcatcggctggctgcacatggatggggctaacctgtccgtcttgctggtggagcaagcgctttctaaggtccacttcactgccgagcgcagcgcctactacaagcccctcctatctgctgaggaagccgccaagcagaggaaggagaaggtctgggcccactatgaggagcagcctgtagaggaggcgttgcctgtgctggaggagaaggagcgttctgccagctacaagcccgtgtttgtgactgagatcacagacgacctgcacttctatgtgcaagacgtggagactggcacccagctggaaaagctgatggagaacatgcgcaatgacgtctccagccacccccctgtggagggctcctacgccccccgccggggagagctctgcattgccaaatttgtagatggagaatggtaccgagctcgggtggagaaagtggaatctcctgccaaagtgcatgtcttctacattgactacggcaatagagagatcctgccatctacccgcctgggtaccctaccacctgccttcagcactcgtgtgttgccagctcaagccacagagtatgccttcgccttcatccaggtgccccaagatgaggacgctcgcacagatgctgtggacagtgtggttcgggacattcaaaacactcagtgtctgctcaatgtagagcacctgagtgccagctgcccccatgtcactctgcaatttgcggattccaaaggcgacgtggggctgggcctggtgaaggagggactcgtcatggtggaggttcgcaaggagaagcagttccagaaagtgatcacagaatacctgaatgcccaggagtcagccaagagtgccaggctgaacctgtggcgctatggagacttccgagctgatgatgccgatgagtttggctacagccgctaaggagaactgtgcctggcccccagcactgctgatgccagacccgttccctctgccaggaggcggttttcagtgtcagacctggttgggggagcatagattgggtccagctttgcttcagtgtacagaaacctcctgtgtggtgggtagcattggagctggggatgggagcccgaggcttgctggggcagaccatgatagtggcactgccatccacagtctctcctggatgattttgtatttttatttggaggtttgttggtgggttttttttttaaattgtcttcaaatcaggaaagaaccatgaaagactttgtcttagtgaaggggataatcgtgacatccaaggcagcgatcagctggcacccatccctcccccagactgcccttcttcccaagtgttgattatgtgacttctgagatgtcggttctcaaactccagtgtgtccacatctgcccctcaccagcctgttctgtatttaaagcttttgagacccaataaaatagaacctgctgtctgca

SEQ ID NO: 390 - DNA, 2967 bp, Cricetulus griseus
aagactccgagtctcacgggctactataccgccacattgaccgtaccactggccaggtgctaacctgtgataagtgtccggcaggaacctatgtctccgagcactgtaccaacatgagcctgcgtgtttgcagcagttgccccacgggcacctttaccaggcatgagaatggcatagagagatgccatgactgtagtcagccatgcccatggccgatgatcgagagattaccttgtgctgccttgactgaccgggaatgcacttgcccacctggaatgtatcagtctaatggtacctgcgctccccacacagtgtgccccgtgggctggggtgtgcggaagaaagggacggagaatgaggatgtgcggtgtaagcagtgtgctcggggtaccttctctgatgtgccttccagtgtgatgaaatgcaaagcccacacagactgtctgggtcagaacctggtggtggtcaagccggggaccaaggagacagacaacgtctgtggcacacgcctgccctccagcacaaccccaccttcccctggcacagctatcttttctcaccctgagcacatggaatcccatgaagtcccttcctccacctatgagccccaaggcatgaactcaacagaatccaactctactgcctctgttagaccaaaggtaccaggtggcatccaggaagggacagttcccgacaacacaagttcaacaagtgggaaggaaggcaccaacaagaccctcccaagcccaccacaagttacccaccagcaaggcccccaccacagacacattctgaaactgctaccgacatccatggaggccactggggagaagtccagcacggccatcaaggcccccaagcggggccatcccagacagaacctgcataagcattttgacatcaatgagcatttaccttggatgattgtgctcttcctcctgctggtgctggtgctgattgtggtgtgcagtatccgcaagagttcccggactctcaaaaaggggccccggcaggaccccagtgccattgtggaaaaggcggggctcaagaaatcctcgactccaactcagaaccgggagaagtggatctactactgcaatggccatggtattgacatcctgaagcttgtagcagcccaggtgggaagccagtggaaggacatatatcagtttctttgcaacgccagtgagagggaggtggctgctttctccaatggatacacggccgaccatgaacgggcgtatgcagccctgcagcactggaccatccgtggccctgaggccagcctcgcccagctaatcagtgccctgcgccaacaccgacgcaatgacgttgtggagaagattcgtgggctgatggaagatactacgcagttggaaactgacaaactggctctccccatgagccccagtcctcttagcccaagccccattcccagtcctaacatgaaacttgagaattccactctcctgacagtggagccctcccctctagacaagaacaagggcttcttcgtggacgagtcggaaccccttctgcgctgcgactccacatccagtggctcatcagcactgagcaggaacgggtcctttattaccaaagaaaagaaggacacagtgttgcggcaggtccgcctggacccctgtgacttgcagcccatctttgatgacatgctacatatcctgaaccccgaggagctgcgagtgattgaagagatcccccaggctgaggacaaactggacaggctctttgaaatcattggggtcaagagccaagaagccagccagaccctcctggactctgtgtacagccatcttcccgacctattgtagaacacaggggcactgcattctggaaatcgacctactgacagggtggtttcattttgtttccgacttttgcgttctggtgtgcgcgcgtatgtatgtgtttcacagagtctatgtccggtgctttcttttcttccccctcttcttgaaagtgaatttataaagccttttcaatgtataactgttggaaaatgcccaccactaaagtttttttaagttccacatattctccatttttgccttcttacatattttcaaaactgttctgtgcactttaaaaacttaaggtaaacgcagtgtgacttttcccacatgctgggctctgagactcctaacttcgtaaaaacataatggcatcttgtgacttctataagcagatataagtctttgaacacccgcacctactttttggttttgttttgtttctctttatcttactgtttggcctttacaagtgttcttaaggaccgagggtattcaagaccctgtttgattactgtaatgtgattagacttcgagctatctttttcatgtcttgtatagttcatactcatggctgaaacttgaccacactatctatcgctgattgtatggttttcatctggacaccgtacactgcttggtaacttgtgctcctcttaatgctaatatgctctgggctggagaatgacgttcttgagtcatcagggcttgctgtttcagtggcttgacacctgggccaccaaagaacttgatctttgtctttttagggacacctctgctgcaccttggaacgtcaaccttgagtgtcagtggcagcttttgcccagctttgctttgaaagtatttttttttttttttttattttttttttaaattacacatggtcaataggtccagtttgccctcaaggccttgctgggttttcgtcttcattcaatcactttaattaaaaatggctgcggctgtaagaactcttgtctgatgaatttgcaactatgctctcacttatcaacctgccctctaacgctcagctgtcaggctctaatgcaaaggtggtatggactgcctttgtgtgggtgggcttagtggtgaggaactgatatcagaaaaatgccttcaagtatactaatttattaataaatattaggtgtttgtt

SEQ ID NO: 391 - DNA, 2967 bp, Cricetulus griseus
  modified_base (2271)..(2271): a, c, t, g, unknown or other
caggtccctaaaccttttgctggcccagtgagactacactcttctaatcctaatttgtcaacactggaccttggcgaagagaagtgttactcagatggttctgaagcctcatccgagttctccaagatgcaggaagacctgtgccatgttgcccacaaagtttacttcgctttaaggtcagcttttaatagcatatcggcggagagagagaagctgaagcagctgatggagctggaggtctcctcttctccttctgctcaggtcgtcggtctgaagcatgccctgtcatcgaaaactccggggatgaaagccgagccctggtgcaccagctctccaacgagagcaggctgtctatcacggactccctttctgagttttttgatgcccaggaagttctgctatctcctagctcttcagaaaatgagatttctgatgacgattcatatgtcagtgacataagtgacaatctgtccttagacaacctcagtaatgatttagacaatgaaagacagaccttagggcctgttctggagagtggtggggaagccaggtccaaaaggcggacctgcttgcccgcacagggtcccaacaccagcagtgtcagcttgtggaccatcctgcggaacaacattgggaaggacctgtccaaggtggccatgcccgtggagctgaatgagcccctgaacacactgcagcggctctgtgaggagctggagtacagcgagcttctggacaaggctgcgcgcatccccagcgccctggagaggatggtgtacgtggcagccttcgccatctctgcgtatgcgtccagctacttccgagcaggcagcaagccgtttaacccggtccttggagaaacgtacgaatgtgtccgacaggacaagggcttccagttttttgccgagcaggtcagccaccacccacctatctccgcctgccacgctgagtctgggaactttgttttctggcaagatgtgagatggaaaaataaattctggggtaaatccatggaaattgtcccaatcggcacaacccacgtgactctgcctgcttttggagatcacttcgagtggaacaaagtgacctcctgcatccacaacatcttaagtggacagcggtggatcgagcactatggtgaaattgtcatcaagaacctgacggacgattcctgccactgcaaagtgaacttcataaaggcaaaatactggagcactaatgctcacgagatcgaaggcacggtattcgaccgcgatgggaaggctgttcaccggctgtttggaaaatggcatgagagcatctactgcggtggtgcctcctcctccacgtgtgtctggagagcaaatcccatgccgaaaggctatgagcagtattatggcttcacacagtttgcattagagttaaatgaaatggatcctctgtcaaggtctttattaccacccaccgacactcggtttagaccagatcaaaggcttctagaagaagggaacatagaggaagccgaggcacagaagcagaggattgaacagctgcagagggagaggaggcgagtcttagaggaaaacaacttggagcaccagccccggtttttcaggaaatccagcgacgactcttgggtgagcaacgggacatacctggaactgaggaaagaacttggcttttccaaactagaccatcccgtcttgtggtgaaaaagtagagaagaaaactgttagtgtccttgccccacatttgcttctggaagcagcacacacctgtgtctgtacctttaaaagatagcatctagaatgaccacttgtgcttagcttatagcattgtaagtactgaagtgtatattttcttcagtaagtttctttacaatttcaaatactatcatgattgtttatacgaatgtagaacacctcggtaattctttttatatataaactatttaataaaaatggaagattgaatagttaatgtgtgggtttaaaagaaaaagaagctttaacactaattttccaaaggtaagggaaaataaaatttatgccttataaaatcactctggagaaaaagaacaatctcccaggtgcattgagaaataacacccagggttgctcacccatgcaccagctttccaggtttaattggtagctgggatatctttttgcctcagacagctcttgaattgctcatacagaacaagtctgctggtgctgaagtaccaaggatattttcatttgcattttagaggttacggcatctgtgtggggttagtaggatgcatatttttangtaaggtggacatgaccatctgccttatagacaatcatcaagcattgctgtctgtgtcatcctgagaaaaaccacaaaggtttttagttctttcctctactctcttcttgtttataatactctaaggtctgcctctgtctccaataggagataccaaaaggaagctgtggttcttgtaagtgtcttacttcacattatgataatagaatttatgcagtagctgaattgtgttgtcaaaacaattctgacttctgcccagagcacattaaaaccaaagcctgattagtaaagggttcttgtactaattagctaggggttcacttgcggatttcaatacagttacctagcaagtagcaagaatgcctcagcagcccccagtcttccagtgcatctggggggctccctgagggaaaacgacataaactgagttttttaatgtttagttcatgtagactgatgttttcctcataccccatttttaactacttccaataaatcatttgctcagccttctagcactgcccttcatctacatttgccagatttatgatgagatgttttattctatacttaaagatgtcaagccaaaaatagaggtaaggttactttgctttttatgtagacttactgtgcacgacaagctctctgatggaccatgggtattacagactgtcctcacacctctcttagctacca

SEQ ID NO: 392 - DNA, 2965 bp, Cricetulus griseus
cccatctggctggacaatgtgcgttgtttgggcaccgaggaaaccctggaccagtgtggatctaacgggtggggtgtcagtgactgcagacactcagaagatgttggggtggtgtgccacccacagcgccatcgtggctaccactctgagaaggtctccaatgcccttgggccccagggccggcggctggaagaggtacggctcaaacccatcctcgccagtgccaaaaggcacagcccagtgactgagggggccgtggaggtacggtacgagggccactggaggcaggtgtgtgaccagggctgggaccatgaacaacagcagggttgtatgcgggatgctgggttttcccagccaggtacctgtcaacagccactactacagaaaagtctggagtctgaagatgaaggatcccaagtctaggctgaacagtctgacaaaaaagaattccttctggattcatcgggttgactgtctgggaacagagccccatttggccaagtgccaggtacaggtggctccaggaaggggcaagcttcggccaccctgtccaggtggcatgctgtggtcagctgtgtggcagggccccactttcacccacagaagccaaagtccaggcgcaaggagtcccgtacagaggagctgaaggtgcgcctgcgctctggggcgtcaggtgggtgagggccgtgtggaagtgcttaggaaccgccagtggggcacagtctgtgaccacaggtggaacctcatctcagccagcgtcgtgtgtcgtcagcttggctttggctctgcccgggaggctcttttggggcccagctgggccaagggttaggacctatccacctgagtgaggtccgctgcagggggtacgagcggaccctcagtgactgccttgccctggaagggtctcagaatggttgtcaacatgcaaatgacgctgctgtgagatgcaacatccctgacatgggcttccaaaagcaggtgcgcttggctggtgggcgcaaccccgaagagggagtggtggaggtgcaggtagaggtgaatggagtctcccgctgggggacagtatgcagtgaccactgggggctcatggaagccatggtcacctgtcgacagcttggtctgggatatgccaactttgctatcaaggacacctggtactggcaggggacaccagaagccaaagaggtggtgatgagcggggttcgctgctccggcacagagctggctcttcagcagtgtcagaggcatgggcctgtgcactgctcccacggccccgggcgcttctcagctggagttgcctgcatgagcactgctccagaccttgtgatgaacgcccagctggtccaagagacagcgtacttggaggatcgtccgctcagcatgctgtattgtgcccatgaggaaaactgcctgtccaagtctgctgaccacatggactggccctatggacaccggcgcttgttgcgcttctcctcacagatctacaaccttggcagggctgacttccgtcccaaggctggacgccacagctggatttggcaccagtgccacaggcactaccacagcatcgaagtcttcacccattatgacttgctcacgctcaatggctccaaagtggctgaggggcacaaggccagcttctgtctagaagacacaaactgccctacaggagtgcagcggcgttatgcgtgtgccaactttggggaacagggggtgtctgtaggctgctgggacacctaccggcatgacatcgattgccagtgggtggatatcacagacgtgggtcccggggattatatcttccaggtggttgtgaaccccacaaatgacgtggcagagtcagatttctccaacaacatgttgcgctgccgctgcaagtatgacgggcagcgagtctggctgcacaactgccatacaggagactcctacagacccaatgcggagctctctctggagcaggaacagcggctcaggaacaacctgatctaaagccattactgcacactcccagctctgctcacacaccagatacctcagcttactggagccatgcccttcacagagccccaactcacaggacaaggggccagtgacaaggagcaccaagaacctgctcaggaagccttttgatggccagatcaccaccccggatggcagcagtctcaggatggctctgggccagctaagccttcttttccttaaggagactcaatctgtcttaaaacttcatgtacagttcccagtttcaggagctctaagttccttagggacgaactgtggccaagacctccatctaagtggtgctttgtaaatgtcttggaggaacagaagacagaagaccaaagaacattagaagtggagtcagttttctgtcacgagctctgtgcaaaaacaagtgtgtcaaagtcacacctggcagacaagttggtgaatgcagtcccttaccttatcccccacttagtttacagtattctcttccccacaacacacaagctaccccaatagtgagaaggaacgtgttctgggggtgtcttctgtgaacacaaagtgcccttttccattccctccattccctcatctcccccatttggcaggggaagcctattttggtgtagtagtttaggtaaacaagggaaggactgatttcctgttggatccagcaaacagtgacaacattatactcacacccgaagctaatggtctgtgaaagaatgtgcagctactagggggctgggttgggagtggtgactgatgaccagaccagggcagggacccaccaccttcttgttagatctagtttccaagaggccagaaaaagcaggtcaggtggacagtaaccagcagcacaggtctcagcccctctgtccacatcacacagctggtaggagcagccagctctaattcctggaaaaagttatacaagggctgtgctgttaagcttctgagttgaaagagaaaggcacgg

SEQ ID NO: 393 - DNA, 2962 bp, Cricetulus griseus
  modified_base (23)..(23): a, c, t, g, unknown or other
tctggaagcagcagctttctganatttaccaggccacggagagtgaggctggtgacatggacctgagtggactgccagagacggcagttgattctgaggatgatgacgatgaggaagacatcgagaggccgaccctctgatgagcagggacattgtgagggactgcctggagaaggacccaatagataggactgatgatgatattgaacaactgcttgaatttatgcaccagctgcctgctttcgccaacatgacgatgtcagtgagacgggagctctgtgctgtgatggtgttcgcagtggtggaaagagctggaaccattgtgttaaatgatggagaagagctggattcctggtcagtgattctcaacggttccgtggaagtaacatacccagatgggaaaagcagaaatactgtgcatgggaaaccaacctaggtgtcggcaggatggagcggcggaccctgattgagcctgatcaatacagtttagggtcatatgccccagtgtctgaaagccgaggcctgtacgccgcagcaactgtcatctcttctcctagcgcagaggagctctcccatgaccaaggggaccgtgcttccctcgatgctgctgacagcggtcgtgggagctggacatcatgttcaagtggttcccatgataacatccagaccatccagcaccagagaagctgggaaacattgccgtttgggcacactcactttgactattcaggggatgctgcaggcatatgggcctctggtggccatatggaccaaattatgttttctgatcatagcacaaaatataatagacaaaatcaaagtagagagagtcttgaacaagcccaatcacgggcaagctgggcatcttccacaggctactcgggccactgacgccccggccacaagcccagtgatgcagaccctcgcctagcacccttccagccacagggctttgctggcaccgccactgaggaagacgaagatgaacaggtgtctgcggtttgaggcacaggcttcttaaaccagagcgagccaccaaaaggagagcacaagatgtaggaagcattggagccttggcacgcacatcctgaggatggtggaccagtttgcctccttccctgccttaaagcagcatggggcttcttctccccttcttcctttcccctttgcatgtgaaatactgtgaagaaattgccctggcactttgcagaccttattgcttgagatgcacagtccagcagtctccgagctgctgcctgccacatcacacagtatcattccagattccaagatcatcgtgaggtgattccctctggctacacttctccaagcctggaaggagttttcaatcttcctcttagatttcaatccagccctagccctcgatctcatttagaagatgagaaaagctagcctttgaactacttggggtcttgaacccaccaaggaagacaaagacagacatgaaatcctttgagtacagtgctttgtccacttgtttacaatatcctttaaaaaatgagttttaaagatttgtgttcagagagtaaatgttatatccatttaatgattacagtattattttgaccttaagtaggattgccagcctgggtttctgaaaaaccaaatatgccggacagggtatggccgcaccaaggaaagacctagcagtgacgatgtcttcccatgtcctggccttgcctgagaagtgccctatcccagaagcagcaaacattagccaattacttaaataccaagactcctcacctgcttcttccccagtgggtgaggttctaatgtaaaactgtttgcacatggccaggggagggaacgaggactcgagtgtcctgtctgagccttatgaggcaggacagtgttatttgggagtgtgtcctgcccaattacaatggatggctaacccctgtttttaagtttattggttttttattttttgtttttgggttttttttttttgttttgtttcaagttttgttaatttagagttttagagctttttgtttttattttttaaaagaaagaaacataactggataacatcgcagtaaagcagcttggggtgttggagtgaatgccagctgttcgtactgctctttcaagacagcctccccttgttgaattggcaccagagagtatgtctttaaacaggattaaaggtcacgtggttagatacaccagcctttgcaaggtgggttagtcaccaaagactgacctgtaagtggcttcgtggacgctgcatatagagaaggcctaagtgtagcgcccatctgctcacagctgctatgaaccctagaatgactgaaaatgacccccaccgttctatttttgtgttgtttttgcacagactccggaaaagtgaaggctgccaatccgagtagtactcagatgtgaggggctgctggtcttggatttttccattaaattcagctgatcatattgatcagtagataaacgtaaatagcttcaaattttaaaggtcgaattgcagtgttttttcactgtgtcaaacaatgtcagtgctttatttaataattctcttctatgtcatggcatttgtctactatgtatcacattgtcacttacgcatttgtaattttacatgtaatatgcattattgccagttttactatataggctatggacctcatgtgcatatagaaagacaaaaatctagctctatcacaaattgcacagatgttatctaaacattaagtaattgtagaacataggactgctaatctcagttcgctctgtgatgtcaagtgcagaatgtaaaattaactggtgatttcctcatacttttgatactacttgtacctgtatgtcttttagaaagacattggtggagtctgtatcccttttgtatttttaatacaataattgtacatattggttatatttttgttgaagatggtagaaatgtactatgtttatgcttctacat

SEQ ID NO: 394 - DNA, 2960 bp, Cricetulus griseus
taaagatgcctaccaagtgatactggatggcgtgaaaggcggcaccaaggagaaacgattagcagctcagtttattccaaaattctttaagcattttcctgaactggctgattctgcaatcaatgcacagttagacctctgtgaggatgaagatgtgtcaatacgacgccaagcaattaaagagctgcctcaatttgccactggagagaatctgccaagagtagcagatatactgacccaacttctacagacagatgactctgcagaatttaatttggtgaacaatgctttattgagtatatttaagatggatgcaaaaggaacgttaggtggcttatttagccagattctccaaggagaagacattgttagagaaagagcaattaaatttctgtctacaaaactcaagacgctcccagatgaagtgttaactaaggaagtagaggaactcatacttactgagtccaaaaaggtcctggaagaactggtgaagaatttgttctattcatgaagatactgtctggcttaaaaagacttacagacagtgagtggaagacaacagctggtagagctggtggcagaacaggctgacctggagcagaccttcagcccctcagaccctgactgtgtagacagactgctacagtgcacacggcaggccgtacctctcttctctaaaaatgtacattctacaaggtttgtgacatacttctgtgagcaagttctccctaatctcagtaccctaactaccccagtggagggtcttgatatacagttggaggtattaaaattgttggcagagatgagttcattttgtggtgacatggaaaaactagaaacaaatttaagaaaactatttgataagttactggagtatatgcctctccctccagaagaagcagaaaatggagagaacgctagtaatgaagagcccaagctacagttcagttatgtggaatgtttattgtacagttttcaccaattgggcagaaaacttccagatttcttaacagccaaactgaatgcagaaaagctcaaagatttcaaaatcaggttgcaatactttgcacggggccttcaagtctatatcagacaacttcgattggctctccagggtaaaacaggcgaggccttaaaaactgaggagaacaagataaaagttgttgcattgaagataacaaataatatcaatgttttaatcaaggatctcttccacattcctccttcatataagagcacagtaacattgtcctggaaacctgtacagaaagttgagattgggcaaaagagagcaaatgaagatacaagttcaggttcaccacccaagaaatctccaggaggaccaaaaagggatgccagacagatttataatcctcctagtgggaagtacagcagcaatttgggcaactttaattatgagaggagccttcaggggaagtagaggaggccgaggttggggaacacgaggaaatcgtagtcgaggaagactctactagagtgcgacatcacattcatcagcattcgtcatgacattaaacatgagcttaaatctactactcattggattgccggggatgtccctttaaaaggactgctgccttcagctgaaaacgtaatgttctttctacctttgtatgtatgatctacttttctaacagaccatggttgtgtccaaggtaaaaccacaataatatttttggatgctttgtctgccgccttgacttgttttcacaatatcctcattatcagacttcatcttgtgaatcttgctttttaaacatcttcataatttggtattgagaactgagtctaatggaaaattcagtctagctcgtgatctggtaaagttcatcacttttgaaaggttacttattttcctccccattctgttaaaagttttttgcttcaatacatggagaagagtaaagatcactcttaaaccttttgctttcatggatttctaatgaagctgctaggcagtgtggtagcattcctactaagacacataaaagttaaacaccagcttcttacaactacaaatgacgttaagtttttaggatgcagtaagttgatttgcattacttccttctactcttctccattttttgggtatacagcttttgaacacagggtcttattattattcgaataggagtacatgtgcataatatacgtacaaacataagcatatgttgtgtgtatatatgcatgctatggaacttgagtgtacaacaaatcaatattttaaattctaggaatgggtcatctgacacagtgattatccttttgaggctgaatccattactgacttggtgtctaggtttttactccagtagggaggatttttgagtctgtagtacttacatgattattattgttgtttaaaaacaaaggctgtttttttcaaagacaaattgaagacccttgttggtgaaatcagccagatctggtgtacatacaggttcccacaggatgtgatagggtaatttaggatttggagacttaataaccagggctacccaggaaagtgacttgatgacatagtaccattaaacagcttgactatggagtgctggcaataatctctaaacattccacaagactgagctgaacctaggcttccttggaatctgaacagacataggaacatgggattggcagttgagaactgaccatctagtatggacctcagatagatcagccatggcttaacgctatttcaagtacgaaaatgaattggactacagcaatataaatttgaacatagtgtaatttttcctttcacttgtctgagtatatttgtaaactcagcagaaataacttgacctcgtgtctaacgcagagctcactgcattccttcctcatccttttgctccccttcccttgcctaggcaatagtgcataacttagtgttctttttgctttcagagatttgaattgaaaatcttcatgccataaat

SEQ ID NO: 395 - DNA, 2958 bp, Cricetulus griseus
tgcagattccagaagtaaagcaagatgcagtgtcagaaccagtcacgcctgcatcgcttgctgctttgcagagtgatgtacaaccagtgggacatgattatgttgaagaggtacgaaacgatgaagggaaagtcattcgtttccactgtaaattatgtgaatgcagctttaatgaccccaatgctaaagagatgcacttaaaaggacgaagacatagacttcagtataaaaaaaaagtaaatccagatttgcaagtagaagtaaagcccagtattcgagcaagaaagattcaggaagagaaaatgaggaagcaaatgcagaaggaagaatattggcggagacgagaagaggaggagcgctggaggatggaaatgagacgttatgaagaggatatgtactggagacgaatggaggaagaacagcatcattgggatgatcgcagacgaatgcctgatggaggctatcctcatggtcctccaggcccattaggtcttttaggagtccgaccaggcatgcctccccagccacagggtcccgcacccttacgtcgccctgattcgtctgatgatcgttatgtaatgacaaaacatgcaaccatttacccaactgaggaagagttacaagcagttcaaaaaatcgtttctatcactgaacgtgctttaaaactcgtgtcagacagtttgtctgaacatgagaagaataagaacaaagagggagatgataaaaaagagggaggtaaagacagagctctaaaaggggtattacgagtaggagtattggcaaaaggattacttctcagaggagacagaaatgtcaaccttgttttgctgtgctcggaaaaaccttcaaagacattattaagccgtattgcagaaaacctacccaagcagcttgctgttataagtcctgagaagtatgacataaaatgtgctgtgtctgaagcagcaataattttgaactcgtgtgtggagcccaaaatgcaagtcactatcaccctgacatctccaattattcgagaagagaacatgagggaaggagatgtaacctcgggtatggtgaaagacccaccggacgtcttggacaggcaaaaatgccttgacgctctggctgctctacgccacgctaagtggttccaggctagagctaatggcctacagtcctgtgtgattatcatacgtattctccgagacctttgtcaacgagttccaacttggtctgattttcccagctgggctatggagttactggtagagaaagcaattagtagtgcttccagtcctcaaagccctggagatgccctgagaagagtatttgagtgcatttcttcagggattattctcaaaggcagccctggacttctggatccttgtgaaaaggatccctttgatactttggctacaatgactgaccaacaacgtgaagacattacatccagtgcacagtttgcattgagactcctcgcattccgccagatacacaaagttctaggaatggatccattaccacaaatgaatcaacgtttcaacatccacaacaacaggaaacgaagaagggatagtgatggagtagatggatttgaagcagagggcaaaaaagacaagaaggattatgatagcttttaaaaagtttctgtatatcttcagtgttaaaataggtgccggtttattggctgttttccattcataataatgtctactttaaaaatttatcaagaatataaagagtttcatagaggaaccaagtttttctatgacattaaaaacttaatgtacagtgttaggtattatatggatggaaagacaccgaaataaataaaaataaaaaaaaagtagtagatactcctccacccattattttgattttatttactggttgcccttgctccctgtatttttgtgtcttttattaactagtgcattgtgttattaaatctttactgtatttaatgcaggatttgtgcctcagttgctccatgtattttgatacttttatttagaagttttgtttgctttgacactagttgtaagttactttgtgttatagataatatcctttaccccttaatattttacagcagtacgtttttttggtaacgtgaaactgtgggatatttttttccttttgttattctttgtgtgaaggattacaatacaaaaagctaccctgccatttgagtgctcagaactgggtgtttctgcatatcttgtggcatttgtctatctagtgtgatatataaaggtgtaattaagacaaattcgttaatctaatcaagtttgctgttagttgtgcattagcagtataaaagctaatatatactatatggtcttgcaacagttttaaagcctctgcataactgataataaaatgcatgacatttttgtttttaatagacttttaaaattataattttaggtttaacacgtagatctttgtacagttgactttttgacatagcaaggccaaaaataactttctgaatactttttcttctgtacaagtgaaaagggcatttttcacatataagtgggctattgttttcaaaagaactttatcattgtgcaactaacaataactagcccttaattatggtgacagttccttattaatgtgtgtgcaattactcttaacagctcttacagtgtaacacagttgaatgatccccacacatcccatcatccagatcatttataggttattaacagtgagattgataaagtattactgattttaaaaaataagattatctaagaaaaaaaacagaaaattatttggtgtggccatcttacatgcttatgtctcatataaaatgctaatacccttagcagtggtgtaattcgaagttacatcttactgttgatgtatgtatgctctggtacacagatgttgttttgttgtcacagcactacagtgaggtaaagaaataaaaacttaaatgcaaaaaaaaaaaaaaaaaaaaaa

SEQ ID NO: 396 - DNA, 2957 bp, Cricetulus griseus
tgggggagctgcagctgtatagaatattgcagaaagccaacctgctttcttactttgatgccttcattcaacaaggtggcgatgatgtccagcaactttgtgaggctggagaagaggaatttttggaaatcatggcactcgtgggcatggcaagcaagccccttcacgtcagaaggctacagaaggctttgagagactgggttacaaaccctggcctttcaatcagccactgacttcccttcctgtcagtagcatacccatctataagttaccagagggatcaccaacatggttggggatatcttgcaatagttatgaaaggaatagcagtgcccgggaaccgcatttaaaaatccctaagtgtgcggccaccacatgtgtgcagagcttgggtcagggcaagtcagaggtgggaagtttggcactgcagagtgtcagtgagtccagactctggcaaggacaccatgccactgagagtgagcacagcctctccccagcagacctgggctccccagcctctccaaaggaaagcagtgaggccctggatgctgccgctgcactctctgtggctgagtgtgtggagcggatggcctccacgctgcccaaaagtgacttgaatgaagtgaaagagctgctcaagaacaataagaagttggccaaaatgattggtcacatcttcgagatgagtgatgaagatccacataaagaagaggagattcggaagtacagtgccatctatgggcgattcgactccaagagaaaggatggcaaacacctcacattgcatgagctcactgtcaatgaagcagccgctcagctctgtgtgaaggacaatgccctgctgacgagaagagatgaacttttgccctggccaggcaggtttctcgagaagttacctacaagtacacttacaggaccaccaggttaaaatgtggcgaaagagatgagttgtctccaaagagaatcaaagtggaggacggatttccagacttccaggaacctgtgcaaacactcttccagcaggccagagccaagagcgaggagctcgcagctctcagttcacagcaggccgaaaaggggatggcgaagcagatggagctcctgtgtgcccaggccagctatgagaggctgcagcaggagaggagactgacagcaggactctacaggcagagctctggcgagcacagcccggacggcctgccttctgatggttcagatggacaaggagaaagacctttgaatctccgaatgcctaacgtacagaacagacagccccatcattttgtggccgatggggagctaagcagactttactccagtgaggcgaagtcccactcatcagagaccctcgggattttaaaagactaccctcactcagcttttacgttggaaaagaaagttattaaaacagagcctgaagactcaagatagcctagattctcccactgtctctgaaaatggcgccagattcaaggataatgctccatcatagaataagccttaataaccagtgttgcctcattctgctcaaacagaccatagccaaagcataagaactcacagtagtctgtggaaaccaggacaaagcaacatccacagaagaagaaatcaagagtgttgcaatgtaacaaacactgaccattagcttcctgtgtaagttgtttgtatggaaaggctcaatattataggcattcactatttaagaatgtacaatgtgtctgtgtaatttatagaagcaaatctagctgttaagaccttttggtctaatagatgtggataccattctttttacttgaaattttgttgtctactttaagtgtatttacggtaaatgttactcatcaacatttaggacttttgagtcataaaaagaaagcttaagcaatgtagttattggcaaggtgacagtgactgtagagagatggaaggcaaatactcagtttacaccaaaagactgtgtacttaatacttgattaaaattgattttggttaataggaaatgtgtagccatcactaaataatgccactttcattggtttaatccatgcatgaattaaaaattagagtaatatttccaatatgaggtaggctacatttaggacagctgctcaagatgtaagacagaagacttgaataaacgtgctaatgtgtaaaagccttgactttaaacattgggatttcggagtgtgttaagtaaattaaggcatagtaaattaaccctaaatgtgataaaggtggtgacacaggagaactgacatggcgtgtgtgttttgtttttagtcctgctttaaatcatggctgtaataaatattagttcctaatctgttctgtggaaatctgttgaccaaatgttagatgagatgtcctcaccacagtctctaatcactgtcatgtggtcacttttccttctgacctgtagaagagtgttacagtagaaacaccagtaaacttctctaccactgaaaaggtttttttcccttcctgaatgtttctaccggaccatggcgtttgcccactggaagaagtgtgtcatggaccttgacctctgctgctcttgatgttgactactgtggtttcacagtccgctgtgtatagagctagtgtgataccatttgcatagaacattcagttttttgattagccacagcactggttaatgtccccctactttcatgaactgtttcctgtattctgtaatctattttgagaaaattttgtggtcctttttaaaaaaattgtgtcttacagttcaagtttgtagggttttaacatgcaagttttaaaagatgcagtaatcttgcccccttgtgtttgtctgtcactcccggacccagaacctgcatctttaaatctagaagtaagtttccttaagtagcatactattctgactttcaagcttagagataaagaagaagcacacacacacacacacacacacacacacacacacacaaatt

SEQ ID NO: 397 - DNA, 2957 bp, Cricetulus griseus
agaaagggagaagatgatgaagatgcatgcaccttcatgttcaagcaaagttgctccaagaaatagttcgttctttctctggcacaacctgccagcccattcaacatatgttacggcgtatttgtgttcaattgtgtggaccttgcatctccaactgctcttctgatcatgagaactgtgttggatttgattgtagaagacttgcaaaagcacttcggaagataaagaaaaacagtatactagccaaaccaccaggttgcttgctcttcttgatgctctggcttcacacaaagcttgcaaattagctattttgcatctaattaatgggactattaaaggcgacgaaagatatgcagagatattccaggatcttttagctttgctacggtctcctggggacagtgttactcgacagcagtgtgtggaatatgttatgtccattttgcagtctctctgtgaccaggacattgcactcatcttgccgagcccttctgaaggtcctgtctctgagcttgagcagctctccaattccctgccaagtaaagagttgatgactgcaatctgtgactgtctgctggtgactctagctaattccgaaagcagttacaactgtctgctgacttgtgttcgcacaatgatgtttcttgcagagcatgactatggattgtttcacttaaaaagttctttaaggaaaaacagtagcgctctgcatagtttgctgaagcgagtggtcagcacgttcagtaaggacacaggtgagcttgcatcctcatttctggagttcatgagacagatcctcaactctgatgcaatgggctgttgtggagacgatagtggtctcatggaggtagagggagctcacccagcccggacgatgagtattaacgctgcagagttaaaacagcttctacagagcaaagaagagagtccagagagtctgctccttcagctagagaagcttgttttggaacattcaaaagatgatgacagtctggattctttgttggacaatgtagttggcctgaagcagatgctggagtcatctggtgaccctttgcctctcagtgaccaggatgtagagccagtgctttcagctcctcgaatctctgcagaatctatttaataacaggactgcatatgtgctagctgatgtcatggatgaccagttaaaatctatgtggtttactccatttcaggctgaagagattgatacagatctagatttggtaaaggttgacttgattgaactttctgaaaaagtgctgtagtgactttgatttgcactcagaattagagcgctcatttttgtcagagccgtcatctccaggaagaaccaagactactaagggatttaaactggggaagcataagcacgagacgttcataacttcaagtggaaaatctgaatacatcgagcctgccaaacgtgctcatgttgtgccaccaccaaggggccgtggccggggcggatttggacagggcatccggccccatgatatttttcgtcagagaaaacagaacacgagtaggccaccgtctatgcacgtggatgactttgttgcagctgaaagtaaagaagtggtccctcaagatggaatacccccaccgaaacggccacttaaagtgtcacagaagatttcctctcgaggtggattttcaggcaatcgaggaggacggggtgcttttcacagtcagaacaggtttttcacaccgcctgcttcaaaagggaactacagtcgtcgggaaggaaccagaggctctagttggagtgctcagaatactcctcgaggaaattataatgaaagtcgtggaggccagagcaattttaacaggggtcctcttccaccattacggccacttagttctacaggttaccgcccgagtcctcgggatcgtgcttcgagaggccgtggggggcttggaccttcctgggctagcaccaatagcggcagtggaggctcaagaggaagttgttagtggaggcagtgggagaggtcgtcatgtacggtcttttactcgatagactttggaataccccaagcaaatggacatttcatgaggaaaaaaaaaaactggagacatccgagagaatatttttatctgaagaaagcagatttgtttgatacttaccgagatttcaataaaaaaccaaactttgtatgtatgtttgtatatatttttcccatttttatatggtatttatttagaaaatttctaggtagaaagagaaaaactaaataaatgacttggtatgtatttctcttgcttatactacagatattcccaaactttcttagcctgtcaccctttagtgtgtctcaagaaatttttttcttcagtgtctccagccagaaacaaacttaatacttctgtttcttaaacagttaggtccaagcagctgaagactacacaactaccactagtccctggacactgctcaatgcgtcacccttggaaacagcagcctttcctgcccaggtttctcaagcagtactgtttttcaaactgctaattgtttgttaccgatgttcgtgtgctgtcatggaaagtcatacaatgttatccagtgctgaaaatgtgaactacctcatattagtagtttgtgtggtgtccagcagatgttgctgtttacctaaaaagtttaaaacattttctaaggtgcccaccacacagtttaggaaccatagttgtaccggaagcagacacttctttatgttagagaaaagtataaacgtttgcttcagctttggacctactgttgctattttattatagttatttaaagcctaaagtttgacatatcttaatatggttattttgggaatcagaagcatctactttatattcagaaataaaacttctaactttgacaaaggagccatatttccccggaggtatgtcttaattcattgagcctatacaaatggcataaaatacagagttctcttaaacaaaaa

SEQ ID NO: 398 - DNA, 2956 bp, Cricetulus griseus
  modified_base (2533)..(2533): a, c, t, g, unknown or other
atctgatcagccaacccaagcattgtttcttgtgcctggcacttcagtgctggggccttttccttgccccaaactacagcactgtcatggcagctgcctctacttccagccctgtaatttcacagccccagttcacagccatgaacgaaccccagtgcttctacaacgagtctatcgccttcttttataaccggagtgggaaataccttgccacagaatggaacacagtgagcaagctggtgatgggactggggatcactgtctgtgtgtttatcatgctggccaacctactggtcatggtggcaatctacgtcaaccgccgcttccattttcctatttattacttgatggccaatctggctgcagcagacttctttgctggattggcctacttctacctgatgttcaacacaggacccaatactcggagactgactgttagcacatggctcctccggcagggcctcatcgacaccagcctgacggcctctgtcgccaatctgttggctattgccattgagaggcacatcaccgttttccgaatgcagctccatacacgaatgagcaacaggcgtgtggtggtggtgattgtagtcatctggactatggccattgtgatgggtgccatacccagtgtgggctggaactgtatctgtgatattgatcattgctccaacatggcacccctctatagtgactcctacttagtcttctgggccattttcaacctggtgacctttgtggtcatggtggttctctatgctcacatctttggctatgtccgccagaggactatgagaatgtcccggcatagttctggacccaggaggaatcgggacaccatgatgagccttctgaagactgtggtcattgtgcttggtgccttcattgtctgctggactcctggactggtcttgttactgctggatgtgtgttgcccgcagtgcaacgtcctggcctatgagaagttcttcctcctccttgctgagttcaattctgccatgaatcccatcatctactcctaccgagacaaagagatgagcgccactttcaggcagatcctgtgctgccagcgcaatgaaaaccccaatggtcccacagaaggctctgaccgctcagcctcctccctcaaccacaccattctggctggagttcacagcaatgaccactctgtggtttagaaggaagccagccagcctctgtgcagctgtgaacccccacaccccattgccagggtaaggtggggagccagaggagaggaagatgctcccgtacttaaaacactaaccaacagcagtatttgtccctagacccaagagacttgagtcttgcagtggaattcagaaacagactccggggtgaccatgtagccttcactaactagacttaaagattttatgtggtttggcctaagctggaggaaaactgtaaagtagagtgattttgtgtttgtttagaaagcaggcatgtggtgtgtgtgtatacagtatgcttttctttaaagataaaaggatactatcttaaatcttctaggggatagaagaatctagtaaaaaaaaatcagtattcatttagaccatgggaagaaacaatatccttaccactttaccttttaatgaaggatattgaaacacacatgaaaggctgggaatgtgagtttatcacccaaagagtatgtgctctgaaaacacgagagaagacgcatgcggtagtcttgtccctgcatcgttaagatacccatgttcattcttagtgccaggacatcagcacagattattttttaaagcctgtggttttccaagttataaaataatatgtattttctacagaaaacttgaaaattgcagaactgtgtgaaaaagaataaaaaaagaaagattactgctattacaacccagaagtaaccatctttaccagctcatgcatgtatgcctatagatatatattatacacttttttacataattgggatgatattgtaaaaattgttttgttaaactttttttctttactagaaatttgcctaggttttcctatgatataatttttatttttacaaaacagtgttagtggctacataatattccatttaatggatgcagctctagtttatttaaccattcctgtattgttgactaagtttttaaaattttcattattataatattggaagaatattgtgtacataaaactttgccagtatcattgatttatttacttaggacctattcccatgaaggacctactttttaaaatgtgaaatgtcctcatgtattttcactttataaaaagggatagcctactttcaaactgcagagtggcagtgctagaagtcctcaaaattacccctttacaaaagaaacacagtggttactctaactgagaatgacttcttaacaagatgtttctcaataaccaagatgccctaatgtaactagcaatttcacttttccaccattgctgtacttagtagcctgggtggggtatgttagaaactggctgctgtgtggtctccagcaattgcccaatagantgcttgtgttgagatgcctggtacattgtctgggtgactaatggctctattggtgtgctataaggagaaatgaggaagaaatacagcccagaagcaggtatgggaaggtcaagaggatgtttgagagaaagaagtcctgaagacagtggcattctgggaaggaggaaggtggagtgcggcctttgtctgcacagaaggaagacacatgaagtgtacctgttagatacccaaagaaaaagtaggtggagagccagttagcaggaaaaagattttgctcagagtttacacaaaatgcagaaaatttgtactggaaatgagtgaaatgaacttggacttttattgatgccatttttatgggggagaaaagtactatttgaattgaaaagcatactaattagaccttaataaatcattttcaatcag

SEQ ID NO: 399 - DNA, 2955 bp, Cricetulus griseus
gacccatttgagaaagaacgctaccgagaatgggagaggaaataccgagagtggtatgagaagtactacaaagggtatgctgtggggacacagcctagaccctcagctaacagagaggacttctctccagagagacttttacctcttaatatcagaaattcacccttcacaagagggcgcagagacgactatcctgctggacaaagtcatagaaatagaaatctaggtggcagctatccagaaaagcttttcaacaagagatagtcacaatcaaaaagataatacaaaatcaaaggagagtgagaacattccaggagacaataaaggaaacaagcataagaaacacagaaaacgaagaaagggggaagagagtgagagcttcctgaaccccgagctgttagagacctccaggaaatccagggagtcatcaggtgttgatgacgctaagacagatacattgtttgttctcccaagtagagacgatgctacacctgttagggatgaaccaatggatgcagaatctatcactttcaaatcagtatctgaaaaagacaagagagaaaaggataagccaaaagtaaaaagtgacaagaccaaacggaaaagtgatggatctactacaaccaagaaagaaaatgttttaaaaccttctaaaggaccccaagaaaagtagatggggagcgtgaaaaatctcctcggtctgaacctccactcaaaaaagccaaagaggaggctgacaaagactgattctgtaaaaccttcatcatcgtctcagaaggatgcaacagagagactgggaaaaattggaagtgcagaaaatacatctactttactaaaagaaccctctgaaaaaatggagtcaacatctagcaaaattaaaacaggaaaaagtcaagggaaaggccaagcggaaagtagctggaactgaaggctccagctccacacttgtggattacaccagtacaagctcaactggaggcagtcctgtgcggaagtctgaagaaaagacagatacaaagaggacagtcattaaaactatggaggaatataataatgataatacagctcctgctgaagacgttataattatgatccaggttcctcagtccaaatgggataaagatgactttgaatctgaagaagaagatgttaaatccacacagcctgtacaaaatgtagggaaaccatctagtatcataaaaaatgttactactaagccgtccgctccagtcaagtacactgagaaagaaagtgagcagtcagagaaacttcagaagctcaccaaagaggtgagccacgaaatgacgcagcatgaagtcaaaagctcaaaaggctctgcatccagtgaaaaggggagaaccaaagacagggagcactcggtgttagagaaggaaatccctgacaagagaaagagcagtgcccagccagagaaggagagcacctcagaccgtctgagtgaacaaggaaattttaagaatctgtctcagtcttccaaagagaccaggacttcggataaacatgaatctgttcgtggttcctcaaataaagacttcactcctggaagggacaagaaaatagactatgacagcagagagtattctagttccaagcgaagagatgagagaagtgagttagtaagaaggaaggactctcctcctcgaggtaaagattcttcatctggacagaaaggtaagccgagggaggagagagatttgcctaaaaaggggacagagtccaaaaaaagtaattctagtcccccaagagacaaaaagcctcatgatcataaagccccctacgataccaaacgctcatgtgaagagacaaagtctgtagataaaaactctgggaaggaacgggagaagcatgctgctgaggctagaaacgggaaagagtccagtagtggtggcaagttgccgtatatacctaacccaccagaccctgcagttgagaaagaaatggttgctggacagattgataagagcaccatcaagccaaaaccccagttcagtcattcctctcgtctttcctctgatctaactagagagactgatgaggctgcttttgaaccagactataacgagagcgacagtgagagtaacgtgtctgtgaaggaagaggaagctgtggccagtatctccaaggacttgaaagagaaaacaacagagaaagcaaaagagagcttgaacgtagcagcagccatccagccaggtgcagacaggagccagagtcagagcagccccagtattagtccaagtagaagtcacagcccttctggcagccagacccgaagccatagcagcagtgccagctcagcaggaagccaggacagcaagaagaagaagaagaagaaagagaagaaaaagcacaagaagcataaaaagcacaagaagcacaagaagcatgcgggtgcagaggccgacgccgagaagagccagaaacacaaacacaagaagaaaaaggcaaagaagagcaaggacaaggacaaggagaaagacgaccaaaaagcgaaatctgtcactgtgtgaaggacggatgttttaattgacttaattactaagtcatctgtattaaactctgttataatgtaaagagattccagccttgtaaataatgaatggaagaccctgtgctgcacttaaaaagtatttgctgcttgattatttcatttttacatcagagctttataacgaacttttgtacagaattgtgagctgtgaccatggaacatgagaggttttgctagggcctattatttttaaccaccattaattagttggggtggagtttactgtactgtgaaattttcacatttgaatttttttaattgcctggcaaatgctggtatcagttcaaaaatatcagcagaatgatttgctgaactcattacagccccgttatgtcactttttgattacaataaaagttttcagtaaacttcttacatgttgaagatgta

SEQ ID NO: 400 - DNA, 2954 bp, Cricetulus griseus
gaggaacaccgaggcatgctcagggaggatgctgtcctggaatatctcaagatcgctcaagacctggagatgtacggtgtgaacatttcagcatcaagaacaagaaaggctcagagctatggctgggtgtggatgccttgggactcaacatctatgagcagaatgacagactgactcctaagattggcttcccttggagtgaaatcaggaatatctccttcaatgataagaaatttgtcatcaagcctattgacaaaaaagccccggactttgtgttctatgctccccggcttcggattaacaagaggatcttggccttgtgcatggggaatcatgagctgtacatgcgtcggcgtaagcctgacaccattgaggttcagcagatgaaggcacaggctcgggaggagaagcaccagaagcagatggagcgtgctctgctggaaaatgagaagaagaagcgtgagctggcagaaaaagagaaggagaagattgaacgggagaaagaagaactgatggagaagctgaagcagattgaagagcagactaagaaggctcagcaagaactggaagaacagacccgtagggccctagaacttgagcaggaacggaagcgtgcccagagtgaggctgaaaaactggccaaagagcgtcaagaagctgaagaagccaaggaggccctgctgcaagcttctcgggaccagaagaagacccaggaacagctggcttcagaaatggcagagctgacctcacggatctctcagttggaaatggcccgaaagaagaaggagagtgaggctgtggaatggcagcaaaaggcccaaatggtacaggaggacttggagaagactcgtgctgagctgaagactgccatgagtacacctcatgtggcagagcctgctgagaatgaacaggatgaacaggatgagaatggggcagaggccagtgctgagcttcgggctgatgctatggccaaggaccgcagcgaagaggagcgtaccactgaggctgagaagaatgagcgtgtgcagaagcatcttaaggcccttacttcagagctggccaatgcccgggatgagtccaagaagactgccaatgacatgatccatgctgagaacatgcgactgggacgagacaaatacaagaccctgcgccagatccggcagggcaataccaagcagcgcattgatgagtttgagtccatgtagtgggcattcagccttcagggacccctcctcctccttccttgtccccacactcctatagttttgcctaactaacactgtgctggagccactaactagaaaagccttggagccatgccaagcattcagtatagccacgggaccaaatttatctccccttactcagatccctgggcaaacaaatggcccactgtggtgcgaatggaatctccgtcttctctggcacattcaacctagctttctagaatagagtcctgtgatttgcaaagttatgatattgtgtggtttagggacagaagtaaaagtagtgtgccttggctttgtcattcagtatgtcagctgacctaggatttggcctcttaatgtccatcccttttagagttatttaggctttgtaatgattggagggtaaagagaagtttagccattcttatttcttctacctcctatgttgggcccattactaattcagccgaaataagccttgtcccagtgtttagggactcagtttccaaccaaggagggaataaagggatgcaggaaacagtgcattcgagagagcacactaacaacctaaaaaggcccttgccaccgagcatcttgggagcctttcttctatcaggttaggtttatgggtaaggctatccccatgttagttcatgttcctggttccatctcagaatctgttcctgccctctccagtccccagatctcttccagctaggacagagaggacaagtactcccaaacctagccagttgcacctaaaggtgttgccaccaagggagaaatgcttatacctggctgtagtattttccctgccaagagttctaaactcctcccccagacagatacacattatgatgagtaagagtaactctcacctttcagtcacccagtaacccttccccatctaacccagtccaaggtggtgagtgggccctgcttctgacaaatctctaacccaggtctcatcactagttgtgctgtcccttggagctacatacagaaagctgctgggtattctggccttgtcccttcacacccccacaccattttctccactttggagcagctgcttcctcttttttgtcacatgtgtgctcttctaattttttaccagtattatatattctagtgatatctaactcgatattgatttctactttttttgctaacgcactattagagatattagtcttgggacaagataattttagcttcattatttttactacccccaccccatgtctgggaaatatatactatattaaaaaggatattttgccaaaaacaaaatgtaagaagacttcagtattagtgatttacctgtcactataggtcatacaatccatttaaaatgtacttaatatttggttttattgttcctgtttgccttttccccagggttcagttcccaaaaggctgtattgtccttcaatccagtacccctaacccagatcctccctcagcccttgccccttttacttaaccttggggaatcttatatgcattgctgtgaattgtattgacactcggtgagctgccctatattggctaaattcaaacctggaattgtgggggcaatctagctgcattaagggcaataacccacccccacagaggctggggagaaggttagaatttatattcaggttttttgtgtatttttattttttaaataattgtttggaggggtttatgctcaatctgtgttctatttcagtgccaataaaatttaggaagacttca

SEQ ID NO: 401 - DNA, 2953 bp, Cricetulus griseus
gccgcgcgagcgcagatcggatacctgcggtggtttgaggggtggcgagcccgcggggctgagcggggtcctcaggcttcccggcgacggcggtaccaagttcggcagcggtcgaaggcagggcgcggcatgtcgtgggttccgcggggctggcagtgaacgcgcgtgcgggatgggcaggcgccggggtgtggagctgtaccgggccccgttcccgttgtacgcgctccaggtggaccccaagaacgggctgctcattgctgcgggcggaggaggagccgccaagaccggcatcaagaatggtgtgcactttctgcagctagagcaaatcaatggctgcctgagcgcctccttgctacactctcatgacacagagacacgggccactatgaacttggcactggctggtgacatccttgctgccggacaggatgcccgatgtcagcttctacgttttcatgtccatcaacagaagcgcaataaaacagagaagtcaggttccaaggagcagggacctcgacaaaggaagggggcagctccagcagagaagaaatctggagcagaagtacaccctgaaggggtagaactcaaagtaaaaaatttggaggcagtacagacagactttagcactgaaccactgcagaaagttgtgtgcttcaaccacgataataccctgcttgctactggagggactgatggccatgttcgtgtctggaaggtacctagcctggagaaagttctggatttcaaagcacatgaaggagagattggagatttggctttgggtcctgatggcaagttggtgactgtaggctgggacttaaaggcctctgtgtggcagaaggagcaactagtgacacagctacagtggcaagagaatggacccgcctcttctgacacaccataccgctaccaggcctgcaggtttgggaaggttccagatcaacctggggggctgcgactcttcacagtgcagatcccccacaagcgcctgcgtcagcccccaccctgctacctcacagcctgggacagttccacattcttgcctcttcggaccaggccctgtggccatgaagtcatctcctgcctcagtgtcagtgaatccggtaccttcctaggcttaggcacggtcactggctctgtcgccatctatatagctttctctctccagcgcctctattatgtgaaggaggcccatggcattgtggtgacagatgtaacctttctacctgagaagggttgtggcccagagcttcttggaccccatgaaactgctcttttctctgtggctgtggatagtcgttgccagttgcacctgctgccctcacggcggagtgttccagtatggctactgctgctgatgtgtgtcggccttattattgtgaccatcctgctgctccagagtgcctttccaggttttctttagcctccctgaccaatgagaattcggcttggacactgccacctcctagagcagaatcactgaggtccacagctgaggctgcctgcaatgagactggcgggtactgcgtgtcccttagccagagcttgcctgtggccccacatccctgtggatcttggggccctacattcatcacctgtggatccatttaggaaagtgtggtctgaacccaggcacactacctgccttgtttcctctgcttcccagggctccagagttgagctcttctctagaaatatgtgaagatgcccaagaccctggaggcattgccatccttcttatagaaactgtgtccactcctccccttacagccattacacgaggtccttggcttttgttgagacaaagtctgggctggcacttgctgttagggcaggaagaggcaaaggaagtctcaggtagctgtggtctgtgggcttaggtgggtagcaccaacccagtcaggccacatgtacagtaagctcctgaatcgtctactcgggcctgaggaaggggaaagtgaccctcagctcattaggtgggaagagttgatatttaataaacaaagaaagattgaactgagacccccagaagtgagtgccccaaggtcaggcagctccatgtagtgctggaagatggcttgggcgtactgatggaggacacggttcatatagcagtgcttccggggcagcagtccttccaggaagccaatgtggcccccccgagctgtgatgagcagtgcaacatagggagactgttgagcggcctgcagagggaaggctgggagggaatcaaagaggaaaaggtcagaaagttgtcctgcaatgagaacccaggctcacacctcatgctgtcctacctggccacaagccggcagagtccagcagtaaggggctgattgaagagcagtgagttgagcggggtttccaaagagtcaacggtctcaaaggaatcccagcatgcagacattgtcagtcctgctaccagtcctccagtcccttccctgtcccgtgccaggtagttgagcaccagtatcctagggtaggggagtaggtaagtaggcagagccctagggccagtgatctctacagagagcaggtgcagggccaccacaaggaaggagggtactcaccaacagttcttcccctcggcagccacgattattaaacacaacagccctggggcaacacaggtatgtgaggcaaaccctcccaagaagcccctcccctttggtagtcttcaggaaggcccctgccgaagagtgctgtatcaggctcagatccacttttcccttcccaagttctgtaccccaaccttacctatagccatctttcaaagcttggttaactaggtgtaagatgtatggctcctggctactgccgctgatgcctggaagcaacagtactatgggctgggtggtagggtccaggtagtgactgctcttagactgctcagcccagtctagaaggaactggcctccatctggggtctggaggacttcactggggttta

SEQ ID NO: 402 - DNA, 2953 bp, Cricetulus griseus
  modified_base (1650)..(1650): a, c, t, g, unknown or other
ctatattaggccttacattacaactcctagtggtacagctcgacagacacaacagcattctggctgggtatctcagtttaatcctatgaaccctcagcaagcctatcaaccttcacagcctggtccttggactacttaccctgcatccaatcctttgccacatacctcaacccaacagccgaatcagcagggccatcaaacctctcatgtctacatgcctatcagttcgccaactactccacaaccgccaacaattcattcatctggtagctcacagtcttctgcccatagccaatataacattcagaatatttcaacaggacctcgaaaaaaccagatcgaaatcaaacttgaacccccacaaagaaacagttcttcaaaattgcgttcttctggacctcgaactgccagcacttcctcgttggtcaacagccagaccttaaatagaaatcagcccactgtttacatagctgccagtcctccaagtactgatgagatgatctcccgtagtcaacctaaggtctatatttcagccaatgccaccacaggagatgagcagggcatgcgcaatcaacctacactcttcatatccacaaactctggggcatctgcagcctccaggaatatgtccgggcaagtgagcatgggtcctgccttcatccatcaccaccctcccaaaagccgagtattaggcagtaactctgcaacatctcctcgagtggtggtcactcaacccaacacaaaatatactttcaaaattaccgtttctcccaataagccccctgcagtttccccgggggtggtgtcccctacctttgaacttacaaatcttctaaatcatcctgaccattatgtagaaacagagaatattcaacacctcacagaccctgctttagcacatgtggatagaataagtgaagcacggaaactgagtatgggatctgatgatgctgcctacacgcaagctctgctagtgcaccagaaggccaggatggaacggcttcagagagaacttgagatgcagaagaaaaagctggataaactcaaatctgaggtcaatgaaatggaaaacaatctaactcgaaggcgcctgaagagatcaaattccatatcccaaataccttcactcgaagaaatgcagcagttgagaagttgtaatagacaactccagattgacattgactgcttaaccaaagaaattgatctttttcaagcccgaggaccacattttaaccccagcgctattcataacttttatgacaatattggatttgtaggtcctgtgccaccaaaacccaaagatcaaaggtccaccatcaaagcaccgaagactcaagacaccgaggaagaggagggggctcagtggaactgcactgcctgtacttttttgaatcacccggctttgatccgctgtgaacagtgtgagatgcctcggcatttctgagccaaaggccccctgtctcctctaaaaccacatctgaaagtcaaggaagtcctctctgtcatcggggaaatgtttcactgctacataggatttagtccagttgaaggtgtgacaggacagtggcatgctgtgttgagtgtcagtccacagagctaataatacctcagtctaacgtcatgggcagtagaatttcgtcatgtgaaagntgatctgagagactgggctgcctgctgcctgaccatgtacagtgtcacaaaggaaagcagtatgcattgtctgtacaaatccgcagtgagctcccccaagccttccctactgtacagatctctcacgtctgctttaagtgatttcttcattattttcttatatttctatatgtatagtgtaatagacttttgttaactaatgttctttttcccttttaggaggcgcaatcatgttcctttttaagccttactgagaaaagcaatgccataagataaaaagcattaatgagatgaaactatgcacaaataactcccctctcctgctcctgccctttgtccctttgtccaatactctgagaagacatgcaggtgctgcaggtacattgcaggaaacactgcaggcatgtcagtaggtcacgctgtacactgacttcagcagtgggtgaccaaacatgtcattttgtcttcttcagctgcttgaaacaaaaagtatttaagcccactgacatcttgccccgtgtgtggtgtcccatagaacttcatgggaggttctcattgggaatgttcagtttcagaagcagccacagcagcagaaccaacagccttttcatcttcttggaaagaagtgtggttgctgtactgttgggccagtctgtgtctttataaaacatagtcatctttaggacaactgaagaaaagctggaaaaaagaaagaaaacaagcagacttgaacactgaagcaacctcagacatctctttattttgatgatatatttttgtaaggaaaataaatattcatatgatcaggaatgtatataactaaatgaaatcaagaaaaaaataacagtatgcatttaaaaagaattatgaaattcagtgcttacaatggggctaagggaagtgctgaagtatagcagaacataggaaatattgtcccactgtaaatgttcacaagtggctgtgttttaaataaacaggattattacagatgagcctcagaaaggtcagcagagccttggcttccaggctttgtgtcatggatatgaaaagaaatacagcaatcacaggtcactagacaccagaccccaaacctcggacatttgatgcatcttgttttaaaagtaggccttgtttttcagcttcctctgcagttctatgtgaagattggtaaatcagtttttacttgttttattaataaaacgtaatttggatatcttgagttgatggttttgtgatttagctgggtaaactatctttgtaacagataagttatttataaaaattaaaaaacttatattctaat

SEQ ID NO: 403 - DNA, 2953 bp, Cricetulus griseus
cggctttggcgcattttcggctggtttgattcatccattttgaggagacgggggagcggggggctcgccagatccaagggcccgaaaccagccgccgcggactctgagaagccagcagcccggggctcagcagcagcggccccgccggccggccggagcggggggtggggcgccgagcgcgcggggaggggggtcctggtcctcggctcctcgactcggtcgtgcctcgacagcgaacatgtctcggcctgtcagaaataggaaggtcgttgattactcacagtttcaggaatcagatgatgcagatgaagattatggaagagattcaggccctcctgctaagaaaattcggtcatctcctcgagaagctaaaaataagaggcgatctggaaagaattcacaagaagacagtgaagactcagaagaaaaagatgtaaagactaagaaggatgattctcactcagcagatgacagtgaagacgaaaaagatgatcataaaaatgtacgccagcaacgacaggcagcatctaaagcagcttctaaacagagagagatgctcttggaagatgtcggcagtgaggaagagccagaagaagatgatgaagcaccattccaagagaaagattctggcagcgatgaagatttcctaatggaagacgatgatgatagtgattatggcagttcaaaaaagagaaacaaaaagattgttaagaagtccaaacctgagagaaaagaaaagaaaatgcccaaacccagactaaaggctacagtgacgccaagtccagtgaaaggcaaaggaaaagtgggtcgtcctacagcttcaaaggcatcaaaggaaaaaactccttctcccaaagaagaggatgaggaagcagaaagtcctccagaaaagaagtctggagatgaagggtctgaagatgaagccccatctggggaagattaaaagtgatgtttggggagagattttattaaaaaaaaatcaaaaaggaaacctatgtaggacacggtttgggctgtggcttgactcatgggctttcagtgctatttcatttgtctaaaataatgtttctatctctatcaaaaccattgtatgttgaaaggtttaagttgccattttgtctaatggtcttatttctttgccaacccctccgaaagccatgtcaattaatcactgggttgactgcttcgtctttgtatttttaatggaagttaggaatcctacggctgtaaagcaataagatttgagatggattctatggaaactttgcttttgctaaagaatagcaacttgaacagtaatcaaaaaactagaaaggttttagttaaaaattactcttcttttcctgtacgtttgacagaccagttgtcatttaacatgagcttatatgtctaaatcgtaaatgtcaaaaagaatcatgactctaaacttaacactgatgaggcagttgggaggtgaacatgaattctgggttgttaacccagcactcacattatcccccccgatgtggaggaaatgggcttcctggaactttcctgatttttggatagttttaccaatgatcaaaaaactaaaaagagattccctagaattttgatgacaagataagtgtatgcctcacagtgcatttctttacagactgatgatgttaaaagttttaagcaaataaagtttgagttaatgtgaagctcatatacaaaggattggaatttatcctttataaatacatataattgaatgctgtttccatactgtggggttgttttgcttcttagttgttatgacacccttctttctgtttatgtttcttaaagcaagagcctgagcctcaacaggatgagtgaactgtattttagggtgcctatgtgccattgataacagtctagacaccttagcagagcatcaggacatagagctataggtttgattcttcatattcagatcccatgctccaatagaagcaaagtttaggggtcctattatgctactaaattaagatttagtggaattaaatttctgtatattttctgcacttaagataaatttgttccctcagtattctgcttttgtgttttttaagtgacatgtttgtctcagacaatgtcattttcttataggtattcataggacaaagggttatttaagaaatatttttacttgcggtttttaagacactttaaagaacactcttagatctgctttaaaataaaataaagtaaataaaacacctagtggcagaaagtcatttcaaccctgcactgttaataaatgagtattaaatatggccaaaaatagaaacttgaacatataaggtgttggattattgtattatgtgatggaatatatagttgtgatggcaattaaaactttgtcttctggaagttagtgaattcactttcttgtggaagtatttgttacaaaatttgtaaataagagctctacatagtcagtttaccatgaacatgttgcaacaaaccttacatgcttaattcctgcgaggcatgacttgccaggttacggcagcagccacaatctcaataattgtttgccttgattaatcttttaatcttcatttgccagtctataagctcccagtcttcctcaattttagtccttaatctttcatattcagaacaggaaaggtcagagagctagcttaactgtatggtaggctatgggctgagatccaggcaccctttttttcattttgcagtgtggctagatacatgatcggacatcagagggttgggcattcttgcaataccttagcagtgctgaaatacacagcatggtactaaggaagttaaaagtttgaatgtaaccactttatttaaagttttttcttttaaatgaaaccaagttgaagtgaacatgattttgttgaccatgtttgtgaattatagatgcaacatgcattggtagaatcttgtgatggtctaatgtgatacttcattt

SEQ ID NO: 404 - DNA, 2952 bp, Cricetulus griseus
  modified_base (2828)..(2828): a, c, t, g, unknown or other
  modified_base (2940)..(2940): a, c, t, g, unknown or other
caagaggagagctgagaccaagagatgcaccttaggaaagttaacaggaaacaggaaagcagagtgtggcagtgcaggtaaaatcccagacagaactaagaaagactccagtgtctgaagccaggaaaacacctgtcactcaaactccaagtcaagcgaataattctcagttcatccctattcatcaccctggagccttccctcctcttcccagccgaccagggttcccgttccccctaacatatgttatcccccctcctgtggcattttctatgggctcaggttacaccttcccagctggtgtttctgtcccaggaacctttcttcagtctacagctcactctccagcaggaaaccaggtgcaagctgggaaacagtcccacattccttacagccagcaacggccctctggaccagggccaatgaactggaaaactagataaaccaagccatgggtggttttggtcgttgattatctctcaacaacatcatcatctgagagcagttggcatcaggctaccactccaagtggcacctggacaggccatggcccctccatggaggattcctctgctgtcctcatggaaagcctaaagtctatctggtccagttccatgatgcatcctggaccctccgctctggagcagttgttaatgcagcagaagcagaaacagcagcggggacaaggtgccatgaaccctccacactgaggccacaatagcgacccagggaatgaaggctccataaaccatggcatgttgggtttgcaggactggcccacaccagtccctgcaggtggcagccctcttgtctgtttcttgctgtcgagagggtgtaagtgttccaccagcccgctgagtgtgcacgaaatgttcgcagtgcaacaaaaagaaaaacccatccggaactctggttccccggggctttccggaggagagaggagctgctgtttgtctcgctcagttactgacagcacgcctctcaccttctccaccgcgcatgtccccaacacgtgggaagtggaagctgagaagggaaggcagatgggagaagccaataggaacttctcagtccttttttcctctttggggaataaaataggaatccattatgagtgctttgctgactgagaatgtagttgaaattattcttaaacatcttttattgttattactctcagtagcaaaatatcacactgaattcttccatacacaggtgtacttctagtcagtgtggagcaaagacagtcctgtttgctgctcctgtgagaggtcggtggtgacgggacagggaactgacctcttaagccagtgggagtgttccataagggagagtacaaggcctcatagaaggttctggtaggccttcctccagcctggaaactccagcaggaaatgcccttcactctgtaggtgctcgagccccaatcgaggatgcagtgtgggtggtgctgctgggctagaccagcaggtggctgctgtaagatttcaaattaatgtttttgattcctacacttttgcagtagcgtagcaagcagtctcacagaaggcaggctattccattcatagcctggaacacattttaataggtggatgctttcagtgtggttatttttgttaagttggttttgtgtccccatcctgcttaccagcctcttgcaccagtctccacccctttagccatatgctgtatcctagtaattgttttatccctaatgtgtacaacatctcgccaagaagcagcaacacggggccagcacttggggcccaaaagacggtctgaagaggaaggaagcagtagtgcctgcatcgctacagaggagccgggcctctgcccagtcacaggctcccagccttcacctcaagaacaaaactgaaggcaacagggacaaatgcacactgtgcacagaagaaaacagaacgaacgccgctttggaacaggcggaagaaaggaataaactctttatttgatatttattgggaggaaagagaactgaagatgttctgtgtaggaacagaaggacagcatttctgttagtcatttcctggaaaagtaatattttaaggggaaattatggaaacaatctaaatgtccaattgctgtgctaggatagggattattttctgggaagtaggtgtgtgtgtgtgtgtgcgtgtgtgtgtgtccacacatggccatctactctcccagagggcaagggctaagtgtggagttagtgtggaacttagctggaagacagctgtagagcaaagcacatccatgagccccgggtgtcactggggtctgggctgccccggcaatgagaggggtgaggtattgctcttcagaaagagtgcttggagccccagacttactctattgctcttttagtttgacatggtatttgggttttcttggttttgttttgtttttttggttttttcgtttttttattttgtttaatggcaaatgaaaccctctgtgctgctccagtcccctccctgtgtccacctttgtcctcttacctattccttccctgctcccttcacccggtttgtgtatgtaagctctgcattcagacagctgcaacattccgatgttggaaatgtcactgattcttgcaccttagaccagccaacaggtttaccagctccctcccagtagtacccacttcccatcttcagccccagtctgcatgagaatttggtgtttggaatgttttatgactctcggcagggttcctcaccttgccatcctcactgtggggtaatgaggaagaggaggagaatcttcaactggttttgtgtaatactttcctttgtgttttgatttggtttgttttcttcttnttttttttttcccccggtctgtctgtgcaagatctgcagctgctgaaatcagctttgcctttaattaaaccgtgttctctccaaaaaaaaaaaaaaaaaaaaaaaaaaaaanaaaaaaaaaaaa

SEQ ID NO: 405 - DNA, 2952 bp, Cricetulus griseus
tcaccagcctcgccctgaggagaaacttctttcgggaggcagcccgcgccatgagcagcacggccgtggtccccagcgcggcgggcccaggcccgggccccagcggcgggccaggcggaggcaccgaggtgatccaggtgaccaacgtgtccccgagcgctagctccgagcagatgcggacgctcttttggcttcctgggcaagattgacgagctgcgcctcttcccgccggatgactcgcctttgccagtctcctctcgtgtctgctttgttaagttccatgatccagactcagcagttgtggcacagcatctgacaaacactgtgttcgttgacagagctttgatagtcgtaccatatgctgaaggagttattcctgatgagactaaggctttgtctctattggcaccagctaatgcagtggcaggtcttctgcctggtggtggactcctgcctacccccaacccacttacccagattggcgctgttcccctggctgcattgggagctccagctcttgatcccgcccttgctgctcttgggctaccgggaacaaacttgaactctcagtctcttgctgcagaccagctgttgaagcttatgagtaccgttgatcccaaattgaatcatgtagctgctggtcttgtttcaccaagtctgaaatcagacacctctagtaaagaaatagaggaagccatgaaaagagtgcgtgaggcccagtccctgatttctgccgctattgagccagacaagaaagaagaaaagagaagacattcaagatcaaggtcgcgctcgaggaggaggaggaccccctcatcctccagacacaggcggtcacgaagccgatcaaggaggcggtcacactccaagtccagaagtaggaggagatccaaaagtccaagacggagacgatctcattccagagagaggggtagaaggtcaaggagcacgtccaaagccagagacaaaaagaaagaagataaagaaaagaaacgatccaaaactccaccaaaaagctacagtacagccagacgctctcggagtgcaagcagggagaggcggcggcgtcgaagcaggagtggtacaaggtctcctaaaaagcccaggtctcctaaaagaaagctgtcccgctcaccatccccacggagacataaaaaagagaagaagaaagataaggacaaagaaagaagcagagatgaaagggaacggtcaacaagtaaaaagaagaggagcaaagacaaggagaaggagcgagaaaggaagtccgagagtgacaaagatgtcaaacaggtgactcgagattacgatgaagaggagcagggatatgacagcgagaaggagaagaaagaggagaagagaccgacagaagcagtgtcccctaaaacaaaggagtgctctgtggagaagggggtgggtgacctgcgagagtccaaagtgaacggggatgatcaccacgaagaagacatggatatgagtgactgagcccctgaagctggctgcagatgggcctcggtgtcattcctggtgacacctaatgctgtgtgtgttcatctcacttaggtgtatacagctgcacattaccaatggttgcagaacacccaattgtgacttctagttctttacagcaaaagcttttagaaagtggtacctgggtgaccagcactgccatggtgatatccatttgtgtgaccaagcagctgtgcaaactgctgcttctaacacaaatgaagagctgcatgcatctatctccagcaggcatgggttgtctctgttgtatgatcctcagtgcgttcacttagagtatttctagagtttgagtccttgccgtggtagagccatgtagggaatgcactgattgcatgctaccccaaatgtcatgaaaccctccaacacggtgacctagttaatggtcttatttgttgacatgacaaattaacattcttagagttacatctggaaacaagcatttgtgatagataagccttttgagccttgtggctaaatttttgtggctttgtttaactttcaaaggttatatatgcactaaccttttttgatggctaagtaggctttaaattacagaaaaaaatttcaagtaaaactggctgtaaaaatacgatgttttgaattagagttgttcacattttcatagctatttaggttttttttccaataatttatttcacatctctaccagtgaatgcagcccatcactaggagaaataacctcatcctgatactcagttttcaacttttgtttagttttaaagctcactgttgaacaagaggaggtggtggtgcattttaaattgaccttcatgtgcttttacaatacgacaaatcttgataatgtacttttatttgatctcaagttgtacaaaaccaataaacttgtgttactttgattgcagtagtatcttatgcagtgattccatgttatatgcagattaggtaggtaactgttttcttagttacaagcttcacttttgtgcagtaaaagacaaaagtaggcgaccgtctgtgccatgttgatgtacagtttctgaaattgttttacaggactttgataataaaacccttaaactcacaagtcatgcgcctgtagaactgcattgtgtttattcacacgttgaagtagatgccggcagaattgtcaacaataccttctgtctaaattatggcttgtgctttggatgtaggactggggtcatgcaacagtgtcttggggataaatatgatctcacctatacctacctagtaaatttatattttccttgaaattacagaaatttgctttttctgaagtaatatggaagttgttggtcacaagtttgtattgtattacaatactaaacacgtaagtggctactgttgggtggctgagagggagattgagactggagtttgtagtctcgagttttgaatataacttattaaattgaatgctgtata

SEQ ID NO: 406 - DNA, 2951 bp, Cricetulus griseus
aggattccagctttctctcctggccagcaatgttcagcctggactcattcagaaaagatcggacccagcacaggcagcgtcaatgcaaaacttccccaccccgacttccacccatgtgtgtcaaccctgcccctcggagggaccatctctcgagccatgacctttgttgccaaagggcgccgcaaagctgaggctgagaataaggcagcggccttggcttgcaagaaactgaagagcctgggcctggtggacaggaacaatgagccgcttaccctatgtacaacctggcctccttgcgtgagttgggtgagacccagcgccggccatgtaccatccaggtgcccgagcccatccttcgcaagatagaggccttcctgagtcattaccctgtggacagttcatggatttctccagaactccggctgcagaatgatgacatcttgcccttaggcaaggactcagggcccttgtagtgtaccctatcacaggcaagccatacatgcccctgtcagaagcggaggaggtacgtctgagccagagcctgctagagctgtggcggaggcgagggccaatctggcaggaggccccacagctacctgtggaccctcatcgggacactatcctcagtgccattgaacagcacccagttgtggtcatctctggggacacgggctgtgggaagaccacacgtatccctcagctactgttggagcgctatgtgactgaaggccgaggtgcccgctgcaatgtgatcatcacacaacctcgccgaatctcagctgtgtctgtggcgcagcgggtcagccatgaactgggcccctctttgcgccggaatgtgggcttccaggtgcgtttggaaagcaagcccccagcccgaggtggggcactgctcttctgcactgtgggcatcctgctgcggaagctgcagagcaaccccagcctggagggtgtgagccacgtcattgtggacgaggtccatgagcgggatgtgaacacagacttcctgctgattctgctcaaaggccttcagcggctcaacccagcccttcggctggtgctcatgagtgctacaggtgataatgagcgcttctcccgatactttgggggctgccctgtcatcaaggtgcctggcttcatgtatcccgtcaaggaacactacctggaagacatcctggccaagctaggcaaacaccagtacccacaccggcatcggcaccacgagtctgaagatgaatgtgcacttgatttggaccttgtgactgatttggttctgcacatcgatgcccgtggggaaccaggtgggatcctgtgctttctgcctggttggcaagaaatcaaaggagtgcagcaacgtctccaggaggccctgggcatgcatgagagcaagtacctcatcttaccagtgcactccaatatccccatgatggatcagaaggccatattccagcagcctccacttggggtgcggaagattgtattggccaccaacattgccgaaacctccatcacaattaacgacattgtgcatgtcgtagacagcggcctgcacaaggaggaacgctatgacctgaagactaaggtgtcctgcctggagactgtgtgggtgtctagagcaaatgtgatccagcgccggggcagggcaggccgctgccagtcagggtttgcctaccacttgttcccgaggagccggctggagaaaatggttcctttccaagtgccagagatcctgcgcacacctctcgagaacctggtgctgcaagccaaaatccacatgcctgagaagacggcagtggagttcctctccaaagctgtggacagtccaaatatcaaggcagtggatgaggctgtgatactgctccaggagatcggggtgctggaccagcgggaatacctgaccaccttggggcagcgcctagcccacatctctaccgacccccgactggccaaggccatagtgttggctgccatcttccgttgcctgcacccactgctggtggttgtttcctgccttacccgggaccccttcagcagcagtttgcagaaccgggcagaggtggacaaggtgaaggcattgctgagccatgacagtggcagtgaccatttggccttcgtgcgtgctgtggctggctgggaggaggtgctgcgttggcaggaccgaacctcccgggaaaactacctggaagaaaaccttctgtacgcccccagcttgcgcttcatccacgggctcatcaagcagttctcagagaatatttatgaagctttcctagtgggcaagccctctgactgcacactgccctccgcacagtgcaatgagtacagtgaggaagaggagctggtgaagggtgtgctgatggccggcctctaccccaacctcatccaggtgaggcaaggtaaggtgactcggcaggggaagttcaagcccaacagtgtcacttacaggaccaaatctggcaacatcttgctgcacaagtcaaccattaacagggaggctacccggttacggagccgatggctgacatatttcatggccgtcaagtccaacggtagcgtctttgttcgagattcctcccaggtgcacccactagctgtgttgctcctaacagacggggacgtccacatacgtgatgatgggcgccgagccaccatctctctgagtgacagtgacctgctgcggctagaaggtgattcgcgaactgttcggttgctaagggagctgcggcgagccctaggccgaatggtggaacggagcctccgaagtgagctggctgcacttccacttagtgtgcagcaggaacatgggcagctgcttgcactgttggcggagctgcttcggggaccttgtggcagttttgatgtacgcaagacagctgatgactgagcccctcttccgctggggctatgtacagagtgcaaatgtttatttaaaataaagttatatttatcccttgtga

SEQ ID NO: 407 - DNA, 2951 bp, Cricetulus griseus
  modified_base (1835)..(1835): a, c, t, g, unknown or other
agatgccagcacgagccgccgcttcacgccgccttccaccgcgctgagccccggcaagatgagcgaggcgctaccgctgggcgccccggacggcggcgccgccctggccagcaagctgaggagcggcgaccgcagcatggtggaagtactggctgaccacccgggagagctggtgcgcaccgacagccccaacttcctctgctccgtgctccccactcactggcgctgcaacaagaccctgcccatcgctttcaaggtggtagcgctgggggacgttcccgatggcactttggtcaccgtgatggcaggcaacgatgaaaactattcggcagagctgagaaatgctacagcagccatgaagaaccaagtggcaagattcaacgacctcaggtttgtcggtcggagtggtagaggcaagagtttcactctgaccatcaccgtctttactaaccccccacaagtcgccacctaccatagagccatcaagatcacagtggacggaccgagagaaccccgaagacatcggcagaaactagatgagaccaagccggggagtttgtccttttccgagcggctcagtgaactggagcagctgcggcgcacggccatgagggtcagcccgcaccacccagcccccacgcccaaccctcgggcctccttgaaccactccactgcctttaaccctcagcctcagagtcagatgcaggatgccaggcagatccagccgtccccaccgtggtcctatgatcagtcttaccagtacctggggtccatcacctcctcttccgtgcacccagcaacacccatttcaccaggacgtgccagcgggatgacaagcctctctgcagagctttccagtcgactttcaacagccccggacctgaccgccttcggtgacccgcgccagttccccacgctgccctccatctccgacccgcgcatgcactaccccggcgccttcacctactcgccgccggtcacgtcgggcatcggcatcggcatgtcagccatgagctcggcctctcgctaccacacctacctgccgccgccctacccaggctcctcgcaggcacaggccgggcccttccagaccagctcgccctcctaccacctgtactacggcgcgtctgccggctcctaccagttctccatggtgggcggcgagcgatcgccgccgcgcatcctgccgccctgcaccaacgcgtccacgggcgccgcgctgctcaaccccagcctccccagccagagcgacgtggtggagaccgagggcagccacagcaactcgcccaccaacatgccacccgcgcgcctggaggaggcggtgtggcggccctactgagccccggaggggagctgtgaatgcttctgatttagcaatgctgtgaataaaagaaagattttatacccttgacttcacttttttaaccacgttgtttattccaaagagtgttttttaattatttaaatgtacttatattaagaaaaaaatatcaagtactacatttttctttatatagccaagttaatgttatttgaagatggctggaaaaaacaatggatgggttatgtgattgctcggttacctagagatattgtttacattaaactccttttatgttattcaaacaagttggtagctaatgcagcaatgttttcaatcagattttagacactgggggtcactccaaggaccagaagtacaaaattttctgccaggctcaacggagggccttatacctggctccttcccttcaaaaagacaggcaaaactctttattattattttataaatttaagcattcagattagatctttggctgcaggcagcaaaaacngctggacttatttaaaaaaatcaactttgtttttgagttatctatatctatatctatataaaaataaaaaaaaagttaattagtgcttcccaaacccttatcagcatacacagtatttagtcatttgagaaaaacttgagtcaggcattccttgtcttggagatagattccacatggcatatcgctttcttcctgagaaattgtattcattgccttcacgtgcatcaaggtgactcttcacccaccgtcttcaggtaagacccaccagccaattctgggataagtggcactgtttgggaatactggtccaggaggagaaaactggaataagccatttctactgcttattcaagcctctgtttatgactctaacacatccttcagttccttctgtttttctcaccctctgtgtcctcacatggctcttctttcttttctcctctctcctccaaacggggtttgttttggttttgatagtttcttgggttcttttaattttgtttatggggggaggcatgagatgtttagggtcttttatacaagaaaataaatggtttgacaacaatctcagaatatattttttccacatctgaacaaaatacctttgtttactctacagcatacatttattgggggttttggtttgtcggttacttgtcggggtgccttccctgtttctgccaggtcagtattggcaaagctgatcatttgtctttttttctccttcagaagaagttgtatcaataaactcaattgtatttatgtatgtaaatagatttcaagcttcattataaaatattgttaatgcctgtaataacttttttcactttttgtgtgtgtttctaaggactttttcttatgttcgctgaatattgtagaagaaaatgcttctctccacttgtttattttagacttttaaaaaaaacaagctacttcttattcactttttataaacagctaataaacagcatggttccaatttttttaagttcactttatgttctaggaggaatggatgtgacaaaaaaaaagaagagaaaaaaatactccaaatgaactatcggatatttctgttaccatgaatgtgcaaaaatcaatagggaaaaaataaataaa

SEQ ID NO: 408 - DNA, 2949 bp, Cricetulus griseus
  modified_base (1673)..(1673): a, c, t, g, unknown or other
gcctttcggcctgaagcttcgcaggactcggcgctacaatgtcctgagtaagaattgctttgttacccggatccgccttctggacagcaatgtcatcgagtgcaccctgtcagtggaaagcacagggcaggagtgcctcgaggcggtggcccagaggctggagctgagggagacacactacttcggcctttggttcctcagtaagagccagcaagcgagatgggtggagcttgagaagccgctgaagaaacatctggacaagctcgctaacgagcctctgcttttctttggagtcatgttctatgtgcccaatgtgtcatggcttcatcaggaggccacaagatatcagtattacctgcaagtcaaaaggatgtgcttgaagggcggttacggtgcaccctggaacaagtgatccggctggctggcttagctgtgcaagcggattttggagactataaccaatttgattcccaagaattcctacgagagtatgtcctgtttcctatggatttggccctggaggaagctgttctggaggagttgacccagaaggtggcccaggagcacaaagcccacagtgggatcctgcccgcagaagccgagctcatgtacatcaacgaagtcgagcgcttggatggatttggacaggagaccttcccggtgaaggacaatcaaggcaacagcatgcaccttggaatttctttatggggatttttgtgtaggaacaggatcggaagacaggcagtgatatacaggtggaatgacattgggagtgtcacccacagtctcgcacacagtgagcaccccagaactggccaacatgcagcttcaaggaacacaaaactacagcacagcccacatgctcaggaactgtctctttaggccaccacccccttaccctcggccccgtcctgccaccagcaccccagacctcgccagccaccgccacaagtatgtcagcggcagcagccctgatctggtaactcggaaggtccagctgtcagtgaagaccttccaggaggacagctctcccgtggtccaccagtctttacaggaggtgagcgagcccctcacagccaccaagcaccacggcgaacagtatggtgcgtaggcatggaggccatgacactgaagtcactcaacatccccatggctcggcgtaacacccttcgggagcagggcccttccgaggaggcaggtggccacgaagttcacgggcttccccagtatcaccacaagaagacactctcagatgctaccatgctcatccacagcagtgacagtgaggaagaggaggaggcccccgaggcggtgcctcagattcctgtgcttcgggagaaggtggaatacagtgcccagctgcaggctgccctggcccgcattcccaacaggcccccgcctgagtacccagggccgagaaaaaagtgtcagtaaacggggcattgcggcaggaccagggggaccctccttcctgccgtggccagagccagggtgctgagacacgggccatccaaggcccctcacgtgtcctcccgggctgagcagctggctgtcaagtggggcctcgtctcattatagagagagagatgatgactaggaatctagagaagcagagatggctggcctggacccacagaggaggcccctcatgctggcagcactgaatgggctcncggtggcccgcgtcccagggcgggaagacagtcgacaggatgccacccgagttcccatagatgacaggctcagagctctgaagaagaagctggaagagggaatggtgttcacagagtatgagcagatcccaaacaagaaggccaatggcgtcttcagcaccgccactctgccagaaaacgccgagcgcagccggatccgagaagggggcccttacgaggaaaacagggtggagcttatccccaccaaagagaacaacacaggctacatcaatgcctcccacatcaaggtggtggttggtggggcagaatggcactacatcgccactcagggacccttgccacatacctgccatgacttctggcagatggtgtgggagcagggggtgaacgtgatcgccatggtcaccgcagaggaggagggtggacggaccaaaagccatcgatactggcccaaactggggtccaagcacagctcagccacctatggcaagttcaaggtcaccacaaagttccgaacagactctggttgctatgcaaccacagggttaaaggtcaagcacctgctgtccggccaggagaggactgtgtggcatttgcaatacactgactggccccaccatggctgcccagaggacgtgcaaggatttctgtcctacttggaggaaatccagtcggtcaggcgtcacaccaacagtgtgctggaaggcatcaagaccaggcaccctcccatcgtggtccactgcagtgcaggggtgggaaggaccggcgtcgtcattctgtctgagctcatgatctactgcctagagcataatgaaaaggtggaagtgcccacgatgctgaggttcctccgggagcagaggatgttcatgatccagaccatcgcgcagtacaagttcgtctaccaagtcctcgtccagttcctgcagaactccaggctcatttgatttcccggatgcagcttcgggaggagggacccagctccatcctgcagggggcgccacttccagacaacatctgcctacccaggttggaggcggatggctggcagcaggcaagagccagagttgcttacaaacaccatgtattatttatatgagataatttattttccgcctttggaattaagttttgtgtagttgttatggctggagtgcagtgctgcagatgtggttggctttcgagggctgcaaatgcgagattctttattctaaccccttgtgtttttggtaaaaaatatctattgatttctacatgcaaattaaacctttagttttga

SEQ ID NO: 409 - DNA, 2948 bp, Cricetulus griseus
atttttttttcagcctaagaccactcaaaaaccttgtgcttgtggatgaactagacagcctctctcccattctgttttgccagatagctgatctggccaatgaagatactccacagctgtatgtcgcctgtggtagaggaccccggtcatcgctgagagtcttaaggcatggacttgaggtgtcagaaatggctgtttctgagctccctggtaaccccaatgctgtctggacagtgcgtcggcacattgaagatgagtttgatgcctatatcattgtgtctttcgtgaatgccacgcttgtgctatctatcggagaaactgtggaagaagtgactgactctgggttcctgggtaccactccaaccttgtcctgctccttattaggagatgatgcattggttcaggtgtatccagatggcattcgacacatacgagcagataagagagtcaatgagtggaagactcctggcaagaaaacaattgtgaagtgtgcagtgaaccagcgacaagtggtgatcgccctgactggaggagaacttgtctattttgagatggatccttcaggacagttgaatgaatacacagagcggaaagagatgtcagcagatgtggtgtgcatgagtctggccaacgtgccgccaggagaacagcgatctcgattcctggctgtggggctggtggacaacactgtcagaatcatctcccttgacccatcagactgtttacagcctctgagtatgcaggctctcccagcccagcctgagtctctatgtattgtggaaatgggtgggactgagaaacaagatgagctgggtgagagaggctctattggcttcctatacctgaacattggactacagaatggtgtgctgctgagaactgttctagaccctgtcactggggacctgtctgacactcgaactaggtatctggggtcccgtcctgtgaaactcttccgagtccggatgcaaggccaggaggctgttttggccatgtccagtcgctcgtggttaagctactcttaccaatcccgtttccatctcacccctctatcttatgagactctggagtttgcatctggcttcgcctctgaacagtgtcctgaaggcattgttgccatctccaccaacaccttgaggattttggcattggagaaactcggtgctgtcttcaatcaagtagcctttccattgcagtacacacccaggaaatttgtcattcaccctgagagtaacaatcttatcatcattgagacagaccacaatgcctacactgaggctacaaaagctcagagaaagcagcagatggcagaggaaatggtggaagcagcaggagaggatgagcgggagttggctgcagaaatggcagcagcattccttaatgaaaacctccctgaatctatttttggagctccaaaggctggcaatggtcagtgggcctctgtgattcgggtgatgaaccctatccaggggaatacactagatcttgtccaactggaacaaaatgaggcagcctttagtgtggcagtgtgtaggttctcgaacactggtgaagactggtatgtgctggtgggtgtggccaaggacttgatattgagccctcgatctgtggcagggggctttgtctatacatacaagcttgtgaacaatggggaaaagttggagtttttacacaagactccagtggaagaggtccctgctgccattgccccattccaggggagggtattgattggtgtggggaagctattacgagtctatgatctgggaaaaaagaagttacttcgaaaatgtgagaataagcatattgccaattacatatctgggatccagactattgggcacagggttattgtgtctgatgtccaagaaagtttcatctgggttcgatacaagcgtaacgagaaccagctcattatctttgctgatgacacctaccccagatgggtcactaccgccagccttcttgactatgacactgtggctggggcagacaagtttggcaacatttgtgtggtgaggcttccacctaacaccaacgatgaggttgatgaagatcccactggaaacaaagccctgtgggaccggggcttgctcaatggagcgtcacagaaggcagaggtcatcatgaactaccatgttggtgagacggtactgtcattgcagaagaccacactgatccctggaggctcagaatcgcttgtttacaccactttatctggaggaattggcatccttgtccctttcacatctcatgaggaccatgacttcttccagcatgttgaaatgcacctgcggtctgagcatcctcctctttgtgggcgggaccacctcagctttcgttcttattatttccctgttaagaatgtgattgatggagacctttgtgagcagttcaactccatggaacccaacaagcagaagaatgtttctgaagagctggaccgaactcctcctgaagtgtccaagaagcttgaggatattcggacccgttatgctttctgagcccacctttatctgggggcttgccagagagtccctcttttgttcccattactaccgtctggcttctgccacatggcaggagaaaggtgatgtggtaattaagactgcaatgataaagccgatagctctgcaccctcaactcttcctttggaacgactggttctccctagagttggcactgaggtctgctcctcgaatgtaatgtgtggccctgtgcttcagtgtggaacacagtattccctgttcccaaagctgtccctacattctggctcttgtctacttttgtatacacttaaattcattgttttcctgtaaatacagttttatacaatgttactttgtgagatggagggaggcaagctaaggtgcagccaggctggttgcattatgggtagtttttaccctctgaaccctccttgatatataaaactagtttttaaggtg

SEQ ID NO: 410 - DNA, 2947 bp, Cricetulus griseus
  modified_base (1363)..(1363): a, c, t, g, unknown or other
gcagcagcagaagctgccgcctcagcagcagcagcagcagcagcctgctttcccggcgggcgggcccccagcccggcggggcggagcggggcccggtgggactggcggaggctggaagctggcggaggaagagtcctgcagggaagacgtgacccgtgtgtgccccaagcacacctggagcaacaacctggcggtgctcgagtgcttgcaggacgtaagggagcccgagaatgaaatttctactgcaatcatttgtgtggaattacaagctgaacctgactactgatcccaaatttgaatctgtggccaggaggtttgcaagtcaactatatcagagattaaagaatgtgctgaagaaccagttggtaaaggttacatggtttcttgcttggtggatcaccgaggcaacataactgaatatcagtgtcaccaatacattaccaaaatgacagctatcatcttcagtgattaccgattgatttgtggcttcatggatgactgcaaaaatgacatcaaccttttgaaatgtggaagtattcgccttggtgaaaaggatgcacattcacaaggtgaggtggtgtcctgtttggaaaaaggcctggtgaaagaagcagaagaaaaagagaaccaagattcaagtttctagaactctgcaagaaagctattctccgtgtggctgagctgtcctcagatgactttcatttagaccggcatttgtattttgcttgccgagatgatcgggagcgcttttgtgaaaatacacaagctggtgaaggaagagtatataaatgcctttttaaccataaatttgaagaatccatgagtgaaaagtgtagagaagcattaactacacgccaaaagctcattgcccaggactataaagtcagttattcattggccaaatcctgtaagagtgacttgaagaaataccgatgtaatgtggaaaaccttcctcggtcccgggaagctaggctctcctaccttctgatgtgcctggagtcagctgtgcacagagggcgacaagtgagcagtgagtgccaaggggagatgttagattatcgacgtatgctgatggaagatttctctctgagccctgagatcatcctgagctgccgaggggagattgaacatcactgctctggattacatcgcaaagggcgaaccctccactgtctgatgaaagtaattcggggtgaaaaagggaaccttggaatgaactgccagcaggcgcttcagacactgattcaggagactgaccctggagcagattaccgcattgatcgagctttgaatgaagcttgtgaatctgtaatacagacagcctgcaaacacatacgatctggagacccaatgattctttcangtttgatggaacatttatatacagagaaaatggtagaagactgtgaacaccgactcctagagctgcagtattttatctctcgggattggaagttggaccctgttttataccgaaagtgccagggagatgcttctcgcctttgccatacccatggttggaatgagaccagtgaacttatgccccctggagctgtgttttcctgcttatatagacatgcctaccgtacagaagaacagggaagaaggctttcacgagaatgccgagctgaagtacaaaggatcctacaccagcgtgcctcagaacttttgccacgatgtggcagacaaccagatagattctggggacctgatggagtgtctgatacagaacaaacaccagaaggacatgaatgagaagtgtgccattggagtcactcatttccagctggtacagatgaaggattttcgattctcttacaaattcaaaatggcctgcaaggaggatgtgttaaaactttgtcccaacataaaagaagaaggttgatgtagtgatctgcctgagcaccactgtgcgaaacgatactctacaggaagccaaggaacaccgggtgtcactgaagtgccgcaagcaactccgtgtggaggagctagagatgacggaggacatccgttggaaccagattgtatgaagcctgcaagagtgacatcaggggctactgttctacagtgcaatatggaaatgctcagattattgaatgtctaaaagaaaacaagaagcagctgagtacccgttgccaccagaaagtatttaagcttcaggagacagagatgatggacccagaattagattatacactcatgcgagtctgcaagcagatgattaagaggttctgtccagaagcagattctaaaaccatgttacaatgtttgaagcaaaaataaaaacagtgaattgatggatcccaaatgacaaacagatgataaccaagcgaccaaaatcacccagaacacagattaccgttaaacccaaggaagtgttaaacatgttgaaggagagtaaggcagacatttttgtggacccagttcttcacacagcgtgtgccttggacattaaacaccactgtgcagccatcacccctggccgagggcgtcagatgtcctgcctaatggaggccttggaagataagcgagtgaggttgcagccggagtgcaaaaagcgtctcaatgacagaattgaaatgtggagttacgcagccaaggtggccccagcagatggcttctctgatcttgccatgcaagtgatgacatctccctcaaagaactacatattatctgtgatcagtgggagcatctgcatattgttcctgattggcctgatgtgtggacggatcactaagcgtgtgacacgagagctcaaggacaggtagagctgcctgatcaccaaaggaactacctgcccagggcccagtttgtacagccttcctgtatagtgcaccctctcacttcgtccttctacgaggtggcaccaacacccacagtagagcagcatcaggtgccctctgcatcttcccatccagacttggccacatccgccgtgtcctcctcc

SEQ ID NO: 411 - DNA, 2947 bp, Cricetulus griseus
gaaagctgcgataatgtgaaggttgttgttaggtgccggcccctcaatgaaagagagaaatcgatgtgctatagacaggccgtcagcgtggatgagatgaggggaactatcaccgtccataagactgattcttccaacgaaacctccaaagacatttacttttgtatactgtttttggaccagaaagtaaacaacttgatgtatataacttaactgcaagacctattattgattctgttctggaaggctacaatgggaccatttttgcatatggacagactgggacaggcaagactttcaccatggaaggcgtccgtgctgtgccagggctcagaggggtcatcccaaactcatttgctcacatatttggtcacatcgcaaaagcagagggtgacacaaggttttttggttcgagtgtcatacttggagatatataatgaagaagttcgagaccttttgggcaaggatcagtctcagcggttggaagttaaagaaaggcctgagacgacatggatagaatcatgacattgggccacaaaaatcgttctgttggtgccactaacatgaatgagcatagttcaagatcccatgccatctttacaattactatagaatgtagcgagaagggcgttgatggaaacatgcatgtcaggatggggaagctgcaccttgtggatctcgcagggtcagaaagacaagcaaagactggagccacaggacagcgcctcaaggaagctacaaaaatcaacctttcactgtctaccctgggcaatgtcatttctgccttggtggatgggaaaagcacccatgtgccgtatcgaaactctaaactgacacgtcttctgcaggattcgttaggagggaactcaaaaaccatgatgtgtgcaaatattgggccagcagattataattatgatgaaaccatcagtaccttgcggtatgccaaccgtgccaagaacattaaaaacaaagcgagaattaacgaagatcctaaggatgctctgctccgtcagtttcagaaagagatagaagagctgaagaaaaagcttgaggaaggtgaagaagtgtacaggttctgacgtcagtgggtcagaggaggatgacaatgaggtgggtgagcttagagaagatggaagaaaaaaaaaaacaagacgaaaattagatgagagagaaaagacactaggaaacaaaacttagacatggaagaagaagaaagaaacaaggctagagctgaactggagagacgggagaaggacctactgaaagcccaacaagagcatcagtctttgctggaaaaactgtctgctttagagaagaaggtcattgtcggtggtgtggacttgttggccaaagctgaggagcaagagaagcttcttgaggagtccaatatggagctggaggagaggaggaagagaggcaacttcggaaagaactggaggaaaaagagcaagaacgcttggacattgaggaaaaatataccagtctgcaagaggaggcacagggaaagaccaagaaattaaagaaagtctggaccatgctgatggctgcaaagtcagagatggctgatctccagcaagagcatcagagggaaattgaaggcctcttggagaacattcggcaggctcagccgcgagctttcggcttcagatgctcatggaaaaaaaaaaaaaaaaaaaaaaaaaaataaaaaaaaaaaaaaaaaaaaaaaaaaaaaaaaatcagcaacaaaataatgccataaaaactgaaaatattgagaaaattctctaagtatcctggcttagtaattttgtttgcctgcttgcttgttgttttgagacaggatctctctgtgttagcccaggctggcctggtactcaagatccttctgcttcagcctcccatgtgctgaggttgcaagtgatgtcatcacgccaagcagtgtgttcattaaagcgtttgtattaaaactctaataaggtggacattgttcatttcttgagaaccaaataggattcttgacctgttgggaggtccgtttgaagatggtgggacatccactctgtcacagcagtgctgtagccgcttctcattcactgtgtctttgtccacaaaaggatagtagtttgcattttcagtgttaatttcatgaatggagagatgtagaacaaacttgactaatgtttaaaataaatgtacagattttaaatgagtgggacagagctataaataagctgcctcatgtatattctggaaaaggtgattttctactttatgttgttggcagccagaatatcaaggttactttggagaggaaagtattgcttcatctgcaacatgtttttaaagttatgattcgagttttagcatttctgttttcatcttagggttagaatgtgtcccatccttccccacccccttttaagtcgtaatgcaaggaacaccctctttccaatagagctgtgaattgaggaatgggcaaagtttacatttacacacacctgtgtctgcccagtttctcccctccccctttccattttgaaatagagttagttccatgtagcctaggatggccacaaaccctgtatgtagctcaggttggccttaaactcctgggcctcctctacctccacctcacgatcactgggataacacttatgcaaccccgtcgtttatatatataattgttttcttcttttttttttaacttactagaaaacagttcttcctagtgcctttgaactgagcctgcagttttgactaattagaatcagtgcaaacctgagaagcattactgtaatgctgttactgaccaggatacaaactgtatagtaagtttgctgtgttaattcagaagccacacttgcgttgtacttatgtataaattgtatttgctcaagctgtatatatcaatgttgtgtgtacatgcagcatggtaagatgagaaataaaattcctccccaatgcc

SEQ ID NO: 412 - DNA, 2946 bp, Cricetulus griseus
gggaagatgaagagttagaagaagaatatgatgacgaggaacctcttaaatttcccagtgatttttcacgtgtgtccagtggaaagaaacccccatcccggaggcagaggcaccgttttttgaccaaggaggatactcgggatagtggacgcagagatcccaggtccccaggtcgtcatcggctgggccgaaaacgaaatcagacagataagcgcagaggcctgggactgtggggcgtggaggagctatgtcagcttggacaggcaggcttctggtggctgattgaacttctggtattggtgggagagtatgtagaaacgtgtggccatctcatttatgcatgcaggcagctgaaaggcagtgacctgaacctctttcgagtttgggtgggatcctgggcagggagattggggggctgggcccaggtgatggtccagtgcctaagccagagcttttcctgtgcagcagggctattcacccgtcttcttaggctagtgggtgctttcctgctcctggctcttgccctccttttgggttgtctgcagctgggctggcggtttttggtgggactgggtgacaggttaggctggagggataggaccaccaggctgttctcttggctggcttctccagctgtgcaccgttgcttgactctgcttcgagatagcaggccatggcagcagctggtaagattagttcagcggaactggctggagtttccttgggtcaagccgaggactaataagcaaggtaatgcacctgcagctagtgggcgccactgccagccagaagaagaagtggcccgacttttgaccatggccggggtccctgaggatgaactgaacccttttcatgtgctgggggttgaagccacagcatcagatatggagctaaagaaggcctataggcagctagcagtgatggttcatcctgataaaaatcatcatcccagggctgaggaggccttcaaagttttgcgggcagcttgggacattgtcagcaacccagaaaggcggaaggagtatgagatgaaacgaatggcagagaatgagctgagccggtcagtgaatgagtttctgtcgaagctacaagatgacctcaaggaggcaatgaatactatgatgtgcagccgatgccaaggaaagcataggaggtttgaaatggaccgggaacctaagagtgccagatactgtgctgagtgtaacaggctgcatcctgctgaggagggagacttttgggcagagtcaagcatgttgggtctcaagatcacctactttgcactgatggatggaaaggtctatgatatcacagagtgggctggatgccagcgtgtgggaatctctccagatacccatagagttccttaccacatctcatttggttctcgggtaccgggcactagtggtcggcagagagccacaccagagacccctcctgctgacctgcaggatttcttgagccggatctttcaagtaccccccgggcagatgtccaatgggaacttctttgcagcacctcaccctggacctggggccactgcgacctccaagcccaacagtacagtacccaagggagaagccaaacctaaacggcggaagaaagtgaggcggcccttccaacgttgacacccttctcttccttcctcaaatcaatgtcagggagtcaaaagggctgtgtacagcacaggatggaatttgatttatttttaaatactttaaaaagggaaaaatttaaattgttcactcagtacttagaggaagtccatgacctatactccctccttcccaacacctaggaactgtatcttgtcttctgacaataccaaagaaataggaggtggcgagagcaaagaacgtagggtctggatctagtccagtcagtgcgttcctgaggtgtgggaactgggcattttctgggttctgtatgcctttatcttatcatttgctttcagagcaaatgaaactcaccctttttaaatgagtgtatcttatttcttaacccatttcaggggttccttcccctttaccctgatgtactagttaaaagaaaaagcatgtagccctaattttggagatacagaattcagagtggaaactgaatttttcctctgactttcactttaatgggaaaccacctgacttcaggcttgttgttgcaaggatggccaaaattaattaatttttaaaaagcagacttatgccctgtgcccttgggtgagggggaagcatagaggggttccccagaggcccccttgtgagccaagggtttgtatttttttaagtttgttcattatttgtattgtatatatctatttaaagccagggaattatctttctataaatatataactggcaacttatttaaggaaaatatacagcaaaacagaacttgaaggtggtatgtttggaagacatggaaacataatcaccagacaagctgccaagcgtggatggcttcttgctgtagaggagagtggtgtggccccttaacctcatctaactttcctgattcagagaatctcgaccctattaaggctgggctcaggaaccccattttccaacttcttccttcttggagtttagttaggtttgtcctatttctcaggcttccaagatacagaagatagtttggagaagggaaaaccattatgtctctttgttccagtgccttccctcagtgcctgaagagctctcaacccattttttagtatttgttgattccaaagagacggaccccatggaattggggcagcttaggcagcagtacgctgagcagtgaggcagtgttgatgatgaaatgcgcagcgtcgtatttggtatagaagctggccagcaggtagctagggagagataaagaaaaggatgacaaggttgaccttccatacccacagtcaagcctttccagtgcttttctattttgaattgctagttttattgcatattgtcc

SEQ ID NO: 413 - DNA, 2945 bp, Cricetulus griseus
tcgccggctcgctgtgcccctgagcagcctctgtccttctgtccaagtcccgcgcccttcttgggacccctgcccagcgggcagcactgccaccctgccggccatggagaccccgtcccagcggcgcgccacccgcagtggggcgcaggccagctctactccgctgtcgcccactcggatcacccgacttcaggagaaggaggacctgcaggagctcaatgaccgtctggcggtgtacattgatcgtgtgcgctccctggagacggagaacgcagggctgcgccttcgcatcacagagtctgaagaggtggtcagccgagaggtgtccggcatcaaggcggcctacgaggccgagctgggggatgcccgcaagaccctcgactccgtggccaaggagcgcgcccgcctgcagctggagctgagcaaagtgcgtgaggagttcaaggagctgaaggctcgaaataccaagaaggagggtgacttgctggctgcccaggcccggctcaaggatctggaggctctcctcaactccaaggaagctgcactgagcactgctctcagtgagaagcgcacactagagggcgagctccatgatcttcgggggcaggtagccaagctcgaggcagccctaggtgaggctaagaagcaacttcaggatgagatgcttcggcgagtggatgctgagaacaggctgcagactctgaaggaggaactggacttccagaagaacatctatagtgaggagctgcgtgagaccaagcgccggcatgagacccggctcgtggagattgataacgggaagcagcgtgagtttgagagccggctggccgatgccttgcaggatctgagggcccagcatgaggaccaggtggagcagtacaagaaggagctagagaagacatactctgccaagctggataatgccaggcagtctgctgagagaaacagcaacctggtgggggccgcccatgaggagctccagcagtcccgaatccgcatcgacagcctctcagcccagctcagccagctccagaagcagttggcagccaaggaggcaaagctgcgtgacctggaggactccctggctcgagagcgggatactagccggcggctgctggctgaaaaagagcgagagatggccgagatgcgggcgaggatgcagcagcagctcgatgagtatcaggagttgctggacatcaagctggccctggacatggagatccatgcctatagaaagctgctggagggcgaggaggagaggctacgcctgtcccccagccctacctcgcagcgcagccgtggccgcacctcttctcactcatcccaatcgcagggtgggggcagcgtcaccaaaaagcgcaagctggagtccactgagagccggagcagcttctcacagcacgctcgcactagcgggcgggtggctgtggaggaagtagatgaggagggaaagtttgtgcggctgcgcaacaagtccaacgaggaccagtccatgggaaactggcagatcaagcgtcagaatggtgatgaccccttgatgacatatcgcttcccaccaaagttcactctaaaggctgggcaggtggtgacgatctgggctgcaggagctggggccacccatagcccccctactgacttggtgtggaaggcacagaacacctggggctgtgggaacagccttcgtacagctctcatcaactccactggagaagaagtggccatgcgcaagctggtgcgctcagtgaccatggttgaggacgatgaggatgaggatggagatgaactgctccatcaccaccacggctcccactgcagcagctcgggggaccccgctgagtacaacctgcgctcacgcaccgtgctgtgtgggacttgtgggcagcctgccgacaaggctgccagtggctcaggagcccaggtgggcggatccatctcctctggctcttctgcctccagtgtcacagtcactcgaagctaccgcagtgtggggggcagtgggggtggcagcttcggggacagcctagtcacccgctcctacctcctgggcaactccagtccccggacccagagctcccagaactgcagcatcatgtaatctgggacctgccaggcaggggtggggccagaggccacctgctcccacctcacctcatgcccacctcctgctctgcacctaatgggagcaggcctgaagccaaagaaaaatttatttcctgcctttgggttttttttttcttcttctatttttttttttttttctaagagaagttattttctacagtggttttatactgaaggaaaaacacaagcaaaaaaaaaaaaagtctctatctcaatcctaagtccttcccatactttccctgtatctgccttaaaatcaatgggcttctttctccaaggagcccagggaaaggactgcttttataacggctagtttttgtcctgctgccttggccttgcgcttatcccagcaccctgtgacatggtgcctgagaggcaggcgtggagttctcttcatcagcctcctccagacagctggcccactgccacgccggctgcagagaaagggggtgcagaggggatggctgagagaggtcaagcccctcctggttccactgcacttggctgagcctcctctgcctgccttatactcttcctgcccctccctagcctggggtcagtggattctcccaggcacccctgccatgcttgctttttctatattttatttagacaaagatgggagtgaggtgggaggaggagggaaggccagtctgagcctgccttttcccagctttagagcctggtgggccctgtccagtcactggaagcaaaatcaagtgggagattggtggttacggtaaacactaaggagcccttcaccccatttcccatctgcacctctgctctccctccaaaatcaatacactagctgtttccatccc

SEQ ID NO: 414 - DNA, 2943 bp, Cricetulus griseus
ctctaaggagacactatccgtgaggatgctagatgacagccaggaccccacaccgctactcaaggagatccgagacgacaaagtgtctaccatcatcatcgatgccaacgcgtccatctcccacctcgtcctccgtaaggcttcggagctgggaatgacctcagcgttttacaagtacatcctcactaccatggacttccccatcctgcatctggacggtattgtagaggactcctccaacatcctgggcttttccatgttcaacacctctcatcccttctacccagagtttgtgcgcagtctcaacatgtcctggagagagaactgtgaagccagcacctaccctgggcctgcgctgtctgcagccctgatgtttgacgctgtgcatgtggtggttagcgctgttcgagagctgaaccgaagccaggagattggcgtcaagccactggcctgtacttcggccaacatttggccccatgggaccagccttatgaactacctacgcatggtagagtatgatgggctgactggacgggttgagttcaaacagtcaaaagggcagaggaccaactacacactgcgtgtcctggagaagtcccgccagggccaccgtgagataggggtgtggtactccaacaggaccctggccatgaacgccactaccctggacatcaacctgtcacagactctagccaacaagacactggtggtcacgactatcctggagaacccgtatgtcatgcgcaggcccaacttccaggccttgtcagggaacgaacgcttcgagggcttctgcgtggacatgcttcgggagctggccgagctgctgcgctttcggtatcgcctgcggctggtagaagacggactgtacggggcacccgagccaaatggctcctggacaggcatggtcggcgagctcattaaccggaaagcagacctggctgtggcagccttcaccatcaccgctgagcgggagaaagtcatcgacttctccaagcccttcatgacactggggatcagtatcctctacagagtgcacatgggccgcaagcctggctatttctccttcctggaccccttctcccctgccgtgtggctcttcatgcttcttgcctatctggctgtcagctgtgtcctgttcctggctgccaggctgagcccctacgagtggtacaatccgcacccgtgcctccgggcacgcccgcatatcctggagaacccagtacacactgggcaacagcctctggttccccgtgggtggcttcatgcagcagggctcggagatcatgccccgggcgctgtccacgcgctgtgtcagcggagtctggtgggccttcactttgatcatcatctcctcctacacggccaacttggctgccttcctcacggtgcagcgcatggaggtgccggtggaatcggctgacgacctggcggatcagaccaacatcgagtacggcactatccacgccggctccaccatgaccttcttccagaactcgaggtaccagacgtaccagcggatgtggaactacatgcaatccaaacagcctagtgtgttcgtcaagagcacggaggaaggaatcgcccgcgtcctcaactcccgctacgccttcctgctggagtccaccatgaatgagtaccaccggcgcctcaactgcaacctcacccagatcgggggcctcctcgacaccaagggctatggcatcggcatgccgctgggctccccgttccgggatgagatcaccctggccatcctgcagctccaggagaacaaccggctggagattctgaagcgcaagtggtgggagggtggccggtgccccaaggaggaggaccacagggccaaaggtttgggcatggagaacattggaggtatttttgttgtgctcatctgtggcctcatcattgccgtcttcgtggcggtcatggaattcatctggtccacacggaggtcagcagagtccgaggaggtgtcggtgtgccaggagatgctgcaggagctgcgccacgccgtgtcttgccgcaagacctcgcgttcccgccggcgccggcgcccgggcggcccgagtcgggccctgctgtcgctgcgcgcagtccgcgagatgcgactcagcaacggcaagctctactcggccggcgcgggcggggacgcgggagcacacgggggtccgcagcgcctcctggacgaccccgggcctcccggggggccccggcccgcggctcccacgccctgcacgcacgtgcgcgtctgccaggagtgcaggcgcatccaggcgctgcgggcttcgggggccggggccccccacgtggcctgggcaccccggccgaagccaccagcccgccccggccgcgcccgggccccaccggaccgcgcgagctgaccgagcacgaatgaccccacgtggacgaggccggccgtgcgccccaactgactgcggggacgcgctgcgccccggccggacaggaagccgcgattttgccttcagttgccggtgaattccgagcccggccccggagccggcctgcgccccctcgcggacccaagccagggtgtcgtggacacccgcgttccatcccgcgctcaggggggggggggcgcgcagagaccgaggactcccaagggccggggaccgtgggggccgctcctggagttggaaagcggtccgcggggaggaccccaacctgggactgctcagacaccccgagacttgacacggctctccacacttctggaggtggggagggcctctggacatgtgggtgtcccctggtgcccctctcttctcttctctctcttttttggggggagaaacctcagaatttctatgagacacccccagggagagggtcagttgggcctctatacctcccctgccacatctcagtccctgttggaataaaaaaaagaacaaaaccccaaaaaaaaaaaaaaaaaaaaaaaaa

SEQ ID NO: 415 - DNA, 2941 bp, Cricetulus griseus
gaagagaaatggctatcttcactggaaagtactcggtggttagaatatgtcagggctttccttcaacattcagcagaacttgtgtacatactagacagccagcgtctctctgtagtcctgcaagaggaagaaggaagagacttgagttgtctggtagcttcccttgttcaagtgatgatggatccacatttcaggacaattaccggatttcaaagcctgatacagaaggagtgggttatggtaggataccagttcctagacagatgcaaccacttgaagaggtcagagaaagagtctcctttattcttgctattcttggataccacgtggcagctattagagcaatatccagctgccttcgaattctctgagacatacttagcagtgctgtgtgacagtacccggatctcactgttcggcaccttcctgttcaactctcctcatcagcgggtgaagcagagcacagagtttgccatcagcaaaaaatattcagctgggtgatgaaaagggcttgaaattcccctcggtttgggactgggctcttcagttcacagcaaaggacccggtacccttttccaccaaccccttctacatcggcaggagcacgccttgtgtgcagaatggctccaggcacatcaaactgtggaaattgtgttatttccgctgggttcctgaggcacagatcaaccttgggggctccatcatggccttccacaagctctctctcctggctgatgaggtggacatgctaggcaggatgctgaggcagcatcgaagtgaccctctagaagcttgctatgcagagttggaccaaagcaggatgtacttcagagccacaggtccacacgacaccctggggacaccagagtttctctcctcttcatttcccattttccccctgtagggaatctgtgcagacgaagcattttaggaacaccattaagcaaatttttaagtggggccaaaatatggttatctactgagactctagcaaatgaagactaaacaaagttattttctagaacatattctaagggcagtgtgacttttgggttttgtcctctaccctttgggtctggctcatttgggtcattttcaggacacattccccattgttacatatatgatcacagtagtgaggtttctctgctgtgtggattttgtcaacatctattttcctactacctgttaaaggttatctgatagtcagattacaacccaaagaaggtggatagggaagttcataaattagtatttaaagcatttccaggtcatctgataaaactcccaacaggcctcagttggcatcatcttaaaggctctctaggcatcagatgcacagctctggctgtggctgagggtgcccagtcatggacaggagcatgccacacccctaccaggggctgctgggagtgttctggcctcccatgatcacatcagctggcatgctgacataggctagaactcctccttagaaataactggtgggcttcgtgacctggacacatgcacagactagagaagaggacttccccaattattgccattttaatacacagaaatgcccccctccggtttgggggggcaatgccaagaggctgagaagctcatatgaagcccttgttccaaaccacactaaacctggtcagctttacaaggccaagttccgaagctcccaagtgctgatgtggggagggcttcttttcctcatttaaaggtggatatttcctaggggacaatggcagtgtcttaaatcaccaccttgcatttcaaaatactttatagtaaagtgctgatttagttggtttcttttcctaaaatgaatttctccagatagtttgacctgtatatgtgctgcatacccatttctacttttttaccttttcaaactgtttaatgatgtctttgtatttaacagaacagatgttcttaaaggactcctaagaagttcagagctcattgctaacctaaggcttccagccatctgtcacctatagaaaaggggctcttgtcaacttatacaaataacatgtcagcagtgaggaagctccagtccctggctgcacagcagccctgggccctgagacatgaccacacccccactggagcctgatagtaattcccccattttcattaagctgctgtgccactactataaattgttctagatttatttgggggttgagaatttatttctttgtaattttcaacacttacatttacttcaactcctttaagaactttgtttttgttaacttacagaaaggtcaggtactattaacactactttctgatggaaattgcatatttttgtatggaaatcaattgtaaatgtttttatatttccactgggtggttgttgtattatgattattgtgccactgcttcctgtgtaaaacagctccaaagtcctagtgtggcctatggtacagctgcttggtacctctgttagcaaaagtgacactgtggtggcagaagaggtaagcatggctgcatgcagcataccaaagagctcagtgccaccatctccaaggccctgtgggcagagcctatgctgttggtgcccatgcataggctgatgacactggacattctagtgctaaccctaaaggtagggtatcttactgttgttttatgatgggaaccaattctaaaaccaaaaatgcctaactatttacagaaaggacattaatttgaactgacagaagatgaaaactgttcaacacatttttcaacaacatcttcttgctgtagcagtaacctcaagtacttaaaacttggtgttgagaaaagctaaaacctttgtgcctaaatacaactgatgagctaaagtaggatgagcaggttgactggatactgctcaacagaaaggatgtaaagggagttctgacagctaaataaaatttccattgaaaccgtttgtagtagtcaccagtatgaa

SEQ ID NO: 416 - DNA, 2939 bp, Cricetulus griseus
  modified_base (229)..(229): a, c, t, g, unknown or other
gctttgagtctcgagccgccgtgaacacccggattccagcgggcgcttgcgagcacgggggcatcgcccgcagcggccaagctcatggccggctgagcggggacgccgcctccgcctcagccgccgccgccgccgccgcctcttcctcctcagcccggcggcggcccggcccagcagccatgccccaggcgccgccgcgccggccccgcggctctgaggttactcgcgngccccctccggttgccatggatcggatgaagaagatcaaacggcagctgtcaatgacactccgagggggcgagaggcatagataagaccaatggtgtccctgaacagataggcctggatgagagtggtggcagtggtggcagtgaccttggagaggccccttcccgtgttgctcctggggagcttcgatctggacggggtccactcagctctgcaccagagattgtgcatgaggacatgaagatggggtctgatggggagagtgaccaggcttcagccacatcctcagatgaggtccagtctccagtgagagtacgcatgcgcaaccacccaccacgcaagatctccactgaggacatcaacaaacgcctgtcgctaccagctgacatccggctgcctgagggctaccttgagaagctgaccctcaatagccccatctttgacaagcctcttagccggcgcctccgccgtgtcagcctgtctgagattggctttggaaaactggagacctacatcaagctggataagttgggtgagggtacctatgccactgtctacaaaggcaaaagcaagctcacagacaaccttgtggcactcaaggagatcagactggaacacgaagaaggggcaccctgcactgctatccgggaagtgtccctgctcaaggacctcaagcatgccaacatcgtcacactacatgacattatccacacggagaagtccctcacccttgtctttgaatacttggacaaggacctgaagcagtacctggatgactgtggcaatgttatcaacatgcacaatgtgaaactgttcctgttccagttgctccgtggcctggcctactgccacaggcagaaggtgctacaccgagacctcaagccccagaatctactcatcaatgagaggggagagctcaaactggctgactttggcctggctcgtgccaagtcaatccctactaaaacatactccaatgaagtggtgacactgtggtaccggccccctgacatcttactgggatccacagactactctacccaaattgacatgtggggtgtgggatgcatcttctatgagatggccacaggccggcccctcttcccgggttccacagtggaagaacagctgcacttcatcttccgcattttgggaactccaactgaggagacatggccaggcatcctatccaatgaagaatttagaacatacaactaccccaaataccgagctgaggcccttctgagccatgcacctcgacttgatagcgacggcgctgacctcctcaccaagctgctgcagtttgagggtcgcaatcggatctctgctgaggatgccatgaaacatccattcttcctcagcctaggggagcggatccacaaacttcctgacactacttccatatttgcactaaaggaggtacagctacaaaaggaggccaatattcggtcttcttctatgcctgactcaagcaggccagctttccgtgtggtggataccgagttctaagccaagttctaagccacagaccaaggccccagcaggcagcagctggagggatgctacacccctcacagggcagcccccatctgcattcctccctgcttgttgcctgcctacctgcctgagccacactttcctaccaacttgtcccctgccacctgcctaaacacccaaccactggcctggcctgtcaacccaaccattggcctgtctgctgggtgctaacaaagctctcaccactactttgcttgatgtgtctctgtcttggtagttgccggcggacaaaatggccatgtcagtctcccacactaaggctaggccttccccttttcatcgcgctctcccccaggaccactaccctatggccagcaagagggttggagccagctctggccatggttcttgattgaccttgactagaaagtggtgatgctttgggtctgaggcatcctctgcctgctgtcccacctgtcccacctgcctctgtatgggccttcttttttgttagttcttttattgttttttattattattttaaatgaggttttcactttttaatgcaatatctctgtatacagactggttggcccctactctgagtgttggccctcctacagtattttgtgcaatgaagtcccactctcagcctttcagagacagggacccagaccctattcagatcctgaccatcactagaccctgggattggctatgggaaagcatgcctcagctaccttcctccccatctagtgtccccagctatagggggacctgagaactaccagagagtagggagatggacattttgggggcctatttttcccttcagtcctgtagctggggcttccttccttctcagggtctccccagcccagctctgcccagccctcctgccctgtcccactcggtgctgttgagtaggggctctgccaggaattgaccagcttagtgaggagccctgtatagtgtgtatatgtgcacaagcaggttgacatgcgggagcttgtgcccagttatatcccaatccctgggaaggtaaggcaaggcaaggacagtcccctggatggatggtttgctcccccttcttccaccctaagccttgggacccttaaatggggtgggagggcaagggagggcacccttctcatggggtttggggggatcgggttcctgaatgcaccgtaatcgctgtatgaaatattaaaaaa

SEQ ID NO: 417 - DNA, 2934 bp, Cricetulus griseus
gccgccgccgccgccgcagcgggggtctgggccttcaccggctcacgaggggtgtggcggcggcggccccgaggcggcccgggccgggtagactacactgccccgcccctccagcgcaagcctaggcggcggactggcttgcaagcatgcccttccagaagcacatctactaccctctggccaacagccccgaggggccggacgcctctgccgcaggcgcggcccccatggcctctgtcccccccggagcggcctcgggccccctgcccttcttccagttcaggccgcgactggagagcgtggactggaggcggctgagcgccatcgacgtggacaaggtggcgggcgctgtggacgtcctgacgctgcaggagaacatcatgaacatcaccttctgcaagctggaggacgagaagtgacccacactgccagtcgggggtagacccggtggctgtccacgcagcagctaatgatagaggccaaagccagctattaccagtgccatttctgtgacaaggcctttatgaaccaggctttcctacaaagccacatccaacgtcgccacagtgcagagtctcaccttgagtataatacaaaggctcagaccgacaggctccagaaggagattgatatgttgaaggagcagctgcagctcaccaggtctcagctggagtctgcccagtacgcccatgcagtccggttctccaaggaacatgaaatgcagaagacaaaagaagatgactttctgaagttattcgaaagatggaaagaggaagaaaaggagaagttgcttgatgaaatggagaaagtcaaggagatgttcatgaaggaatttaaagagttaacgtctaagaattccgcattagaatatcaactgttagaaatacagaagtccaatatgcagatcaagtccaacataggcaccttaaaggacattaatgagtgtaaagaagaccaccccccatgtccccaggatttccagaacatgctgcagctcctcgacagccaggcaagcaagtggtcagatcgatttcaagttctcaacgaggaacacagcaaggagaagggacagctcctgtcacacatagagaagctccgaagctccatgatggaagatctaagtgcagataatgttttctacaagaggcgcgtggaagagctgggccagaaagtgcaggagcagaatgagctcatcctcagtcagaggcaacagattagagaatttaccagtaaaccatgcaacaacgtcggtgagctgaaagggaaccctctgacctggcaagcaatggactctaaaccagctaaccctgctgcacccatgggtgccccagccacacagactctggatggtgcatcaagcctgcccatggtgcatgagcaggggttctcgtcgcacgtgctggagccaatagaagaactttcttcagaggaggaaaaaggacgagaaaacgaacagaaattaaataagaagacgcacttcaggaaaaccctgaggggcaacccctcctcgaaggggctaaggacgaacttggagaaggagctgggcaagaagctgaggagcttcgggattgatgccgacatacacggcatcccatgtgagatcttgaataaatcactcaaagccatgcaattagccagacatgatcttgcaaaacaaatgcccaacattcagcaaatccgagaatcccttgaacaccagctgatctgtaaaatcgaggagaaggtatccctgacctcagataggcacaatgaccctcccatgatcatctctgcagctgaggaagctcccaaagccacccagcttcccccacaaagcaggccactggtcaggcagagagctgtgtttactgataaggtggctgtcccaaaacttaagaaaaataccaaagaaattcctttactcaaaaagttttcagctaccaagacgcctcccttcagctcagaggaggagccggaagaagaggacttgatccaggcgtacgtttcttcagacctgatgaccctgcagccgtgtaaaaacagtatgagtaaccttagaaagagctctgtcagaagcgacacggactggacagagggcagtgaaatggaggactcggatgtttcccccaagccctcaggaacctccattaagatacaaactgaagatgtggagagcatgggttttacacgaaggaagtgggagtaacctagtcactggaatgaatattgctgagacacttgtcaagagggaagaattgcacgaattcaagtgtgcagaagtagataatgatgactgggacgtctcatccttagaggaagaaaaatctttggagaaaaggatggaacagagggagcctctacctgtgaagagagatctaagctccagtcaattgccaagggcctggggcccagtgaaccctcgggaattcaaggaagaaggacttcaagaaaaggaagcaagcactctgaaaagtagcctggtcactgtgactgactggagtgacgtcttggatgtgtaactacaatgccacctgccagagagctgtgccagcagccagcagcctttcgggcaacagcctataggattctaatgctccttactattctccaccttaacaaggaagcccgttcgaatggtaacaattagctaggcccatggcaaatacatttcctgaagtaccattgatcccactgaccttcgaggccctactagcatgttgtgactgacacattattttctgcagtgtaatctttatcttggatattccatgaatgatatgcaaccattgtaaatgccaactggtttttatgagaggatcactagaaaaagaccagccgttcccgagtcacacgtgtgtgtagtttctctggctcccaggacccagcccactataaaatacctcagaaataacttatattcttgaacaacgatctcggcaatgctcagaaaattta

SEQ ID NO: 418 - DNA, 2933 bp, Cricetulus griseus
cttatgattctgtcagatgactggtctgagcatattagctcttctggaaaaaaatactactacaattgtcgcacagaagtttcacagtgggaaaaaccaaaagaatggcttgaaagagaacagagacaaaaagaagcaaataaattggcagttaatagtttcccaaaagatagggattacagaagagaggtgatgcaagcaacagccactagtgggttcaccagtgggatggaagacaagcattccagcgatgccagtagtttgctcccacagaatattttgtctcaaactaagcagacacaatgacaaagactacagactgccaagagcagagactcacagtagctctacgccagtacagcaccccatcaaaccagtggttcatccaaccgctaccccaagcactgttccttccagtccatttacgcttcaatctgatcaccagccaaagaaatcatttgatgctaatggagcatctactttatcaaaactgcctacacccacagcttctgtccctgcacagaaaacagagagaaaagagtctgctccaggagacaaatcagtatcacattcttgcacaactccttccacatcttcagcctctggcatgaaccccacatctgcacctccaacatctgcttcaacagtacctgtttctcctgttccacaatcaccaatacctccattacttcaggacccaaatcttcttagacagttgcttcctgctttacaagccacgctacagcttaataattctaatgtggacatatccaaaataaatgaagttcttacagcagctgtaacacaggcttccctgcagtctatcatccacaagtttcttactgctggaccatctgcttttaacatcacctctctgatttctcaagctgcccagctctctacacaagcccagccatctaatcagtctccaatgtctctaacgtctgatgcttcatccccaagatcctatgtgtctccaagaataagcacacctcaaactaacacagtccctatcaaacctttgattagtactccacctgtttcatcacagccaaaggttagtactccagtagttaagcaaggaccagtgtcacaatcggccacaccgcagcctgtaactgctgacaagcagcagggtcacgagcctgtctctcctcgaagtcttcagcgcttaagtagccagagaagtccatcacctggtccaaatcatacttccagtagtaatgcatcaaatgcaacagttgtaccacagaatacatctgctcggcctgcgtgttcattaacacctacgctagcagcacacttcaatgataatcttataaaacatgttcaagggtggcctgcagaccatgcagagaaacaggcatcgagattgcgtgaagaagcccataatatggggagtgttcacatgtcagaaatatgtactgaattaaaaaatttgagatctttagttcgagtatgtgaaattcaagcaactttgcgagagcagaggatactgtttttgagacaacaaattaaggaactcgaaaagctaaaaaatcagaattccttcatggtttgaagatgtgaataattgcacatggtatcctaccggatatgcccagtcataacattttgagctgcatttaagtagactgtggaccgttaagctgggcaaatgaaatgacaaggggacaggggtctgtgagagtcaattcaggggaaagatacaagattgatttgtaaaacccttgaaatgtagatttcttgtagatgtatcttcacgttgtaaatatgttttgtagagtgaagccatgggaagccatgtgtaacagagcttagacatccgaaactaatcaatgctgaggtggctaaatacctagccttttacatggaaacctgtctgcaaaattagctttttttaaaaaaagaaaaagaaaaaatcggggggttaatttatcattcagaaatcttgcattttcaaaaattcagtgcaagcgccagtcgatctgtgtcttaaggatacaattttgattttgagcagtgtataaatatcatgagacaactgttccgcacttgcacctgatcaagagcagtgctgctccatttgttttgcaaagagatgttttcatttcctgtatgttccattccctctgaagtccttggcctgattttatccattttttatattttttaaggtgccccatctcctttcttagggcactgttgctgtggcacttttctataaccttctcattcctgtgtacagtagctggaagttgcagtgattgagcataacccacatgtttgtataaattattgaaatccatttgcaccctgtaagaatggacttaaaagtactgctgggcaagtgtgctgaaagtacactgactgctcaaacatgaggaagtggcccaatgaacgcggttgtgggaggggaagaggaagcaaagctagtcagatgtgaattgtatctgttgtaataaacatgtttaaacaaataaactttgttactttcttttccttcggtcagtgcatattagaatttgaactacatggggattctttatcaaaaactattcttgttgaatatttatatcttattacagtaattcctttaaagggagattttgtttcaagcatattaataaattgtgcaaaagatatttaatgaatgtgaaattcaacaagaatgacgaagtcactttcaagtggtgtcatttgttcaacctggtttacctgtcttgctgttatgacacttcattttgaaggatgtttgtgttgtagctaactgttcaagtctggtgctgactgctttttcttagccatcacaaaacgctcagtttgtgtaattggagttacctgctgttacacagaaatggtgggaaaactcagctttgtatattgtttcctaaagtatattaaaataaaaaagaaactattgctactataaa

SEQ ID NO: 419 - DNA, 2931 bp, Cricetulus griseus
tcagaggcatgtccagatcatcatggagaaacttctcaggacggtgaaccggacagtcatttccatggggcgggattcagaactcatcggtaactttgtggcttgcatgacagccattttacggcagatggaagactaccattacgcccacctgatcaagacctttgggaaaatgaggacagatgtcgtggattttctgatggagacattcatcatgtttaagaacctcattgggaagaacgtctacccctttgactgggtgataatgaacaccatgcagaacaaagtcttcctgcgtgcaattaatcagtatgcagatatgctgaacaagaaatttctggatcaagccaactttgagctgcagctgtggaacaactattttcacctagctgtggctttcctcactcaagagtccctgcaaaaatgaagacgacatccccacccggggatgatattaagagttctcctggccagtacatccagtgcttcacagtgaagcccaagctagacttgcctcctaagtttcacaggccagtgtctgaacagattgtgagtttttacagggtgaatgaggtccagcgatttgaatattctcgacccatccggaaaagggggagaaaaaaccccagaacaatgaatttgcgaatatgtggatcgagagaaccatttacactacggcctataagttgccaggaattttaaggtggtttgaagtcaaatacgtcttcatggtagagatcagcccactggagaatgccatcgagacaatgcagctgaccaatgacaagatcagcagcatggtccagcagcacctggatgacccgggcctacccatcaaccctctgtccatgctcctgaatggcattgtagatcctgccgtcatgggtggctttgccaattatgagaaggctttcttcacggaccgatacctgcaggagcatcctgaggcccatgggcagatcgagaaactcaaggacctgatagcctggcagattccattcttggctgaagggatcaggattcatggagacaaagtcactgaggcactgaggccattccacgagcgcatggaagcctgcttcaagcagctgaaggaaaaagtggaaaagcagtatggtgtcaggaccatgccctcaggtctagatgataggagaggcagccgtccacgctccatggtgcggtccttcaccatgccatcatcctcccggcctctgtccgtggcttccgtctcttccctctcctccgacagcaccccttccaggccaggctctgatggatttgcgctagagcctctgctgccgaagaagatgcactccaggtcccaggacaagctggacaaggacgatccagataaggagaagaaggacaagaagaaggagaaaaggaacagcaaacaccaagagatatttgataaggaattcaagcccgctgacagctccctgcagcagtctgaggctgtgatcctttctgaaacgataagccccctgcggccccaaagacccaagagccaggtgatcaatgtcattggaagcgaaaggcgcttctctgtgtctccaacgtcaccgtcctcccaacagacaccccctccagttacaccaagagccaagctcagcttcagcattcaacccagtctggagttgaacggcatgacggggatggatgtggccgatgtcccaccccctctgcccctcaaaggcaacatggcagattatggaaatctgatggaaaaccaggatttgattggctcacccacatctccacctcctcctcccccacagcggcaacagccacctccactgcccagcaaaacgccacctcctcccccgccgaagacgacccgaaagcagacctcagtggactccgggatcgtgcagtgaatacactgggttgagaaagctaccctcccttttacatctactgtgcctgccgattacctcctccaggacctgggatgcctcaccttagtgtgatggcttttcccagaaaggagtccttcctagccatgggaccagagaccctaagtatatcagagcacagtgggactggggcccagtcatacatactctggattttttattttgaagttggagcctctgagagtgtcagcttttcagatggcctcagtcttgccctgacatcctctcctttgtgccaaatgacttgtattcatttgcagagagcttagctgatgtggcttagccaagtgggaggaatgaggccagccctcctctcccacccctactcccaccatgagaagctatgcagtaaacttacaaggatcctcctcatgctgcctctgaagcccagactctagctcacccccaagggctgactgctcaacccttccttgctgcatctgtggtgaaactggtgtggtgagtttcacttcagctgacatcaagcaacaagtgtaccccttctgagaagatcttggtttcccttggcataatttaaagtagggacatctctcggttactaaagagatactaatatatggagtagagacaccattaagaatactggatcaaatggaaaccagaggtggttttaattgggtgacttctctgtgttctcattgtgtacagaagtttgtatatacggtggttctcagagctcctgtgagtgtctgtgacccttgtttactccagtgggcctctgaaaatgagctcctgtgtgtcttcttcatgtttaactgctggaaatacttgttttttaaatcccacacattaaattgtttttcagattcccaaggtcctgaaaatgttggtggacaatgaattaaaaaaaaaaacaaaactaactttgtataacctaatattttatttgatcatctatatttttttattcactatgatcatgatactgtttgttctaggagaattcaaagttaatcactgacaaatagaaaaataaatgttaatttaaaaagga

SEQ ID NO: 420 - DNA, 2927 bp, Cricetulus griseus
  modified_base (2494)..(2494): a, c, t, g, unknown or other
tggatactttctgtggcagccctccttatgctgccccagaactcttccagggcaaaaatacgatggtcctgaggtggatgtgtggagcctgggagtcatcctctatacactggcggatccctgccttttgatggacagaacctcaaggagctacgggagcgggtactgaggggaaaataccgtattccgttctacatgtccacggactgtgaaaacctgcttaagaaacagagttgatggtgtcgaatgggttacacacgagaagagatccaggactcactggtgggacagaggtacaacgaagtgatggccacctatctgcttctaggctacaagagctctgagctggaaggtgacaccatcactttgaagccccggccttcagctgatctgaccaacagtagtgccccatctccatcccacaaggttcagcgcagtgtctctgccaaccctaagcagcgacgctccagcgaccaggccgtccctgccattcccacctcaaattcctactctaagaagacccagagtaacaatgcagaaaataagcggcctgaggatgagacggggcggaaagccagcagcaccgccaaagtgcctgccagccctctgcctggcgtagagaggaagaagaccactcctaccccctccacaaacagcgtcctctccaccagcacaaaccgaagcaggaactcccactttggacagggctagccttggccagtcctctatccagaatggtaaagacagcacagccccccagcgtgtccctgtcgcctccccctccgcccacaacatcagcagcagtggtggagccccagaccgaactaatttcccccggggtgtgtccagtcgaagcaccttccatgctgggcagctccggcaggtgcgggaccagcagaacctgccctacggtgtgaccccagcctctccctctggccacagccagggcaggcggggggcctctggaagcatcttcagcaagttcacctccaagtttgtccgcaggaacctgaatgaacctgaaagcaaagaccgagtggagacgctcagacctcacgtggtcggcagtggaggcaatgacaaggaaaaggaagagtttcgggaggccaagcctcgttccctgcgcttcacctggagcatgaagaccacgagctctatggagcccaacgagatgatgcgggagatccgcaaggtgctggacgccaacagctgccaaagcgagctgcacgagcgatacatgctgctgtgcatgcatggcaccccaggccacgagaactttgtgcagtgggagatggaggtgtgcaaactgcctcggttgtctctcaatggtgttcgatttaagcggatatcgggcacttccatggccttcaaaaacattgcctccaaaatagccaacgagctgaagctttaacaggctgtcaggaggggggcgagcagagacccaccagtggacttggcttcttgcgccaaccctgcatcccccgggagaaactgcaggatgaattggtgtgtctcccttgctggcacttgtccccttccaggcccttctcagtttttttcttccatgtttgtgggggataggaaatggttcttcttccctcacattcacccctgcccagaagtccctccttcccctcttcccctacaggaggaagggaaaggggtgggggggcagggctccccctcggtactgcggttgcacagagtatttcgcctaaaccaaagtaaaatttttattaaccaaaaaaaaaaaagaaagaaaaaaatttgccagcggccaccttccctccctgccccattgggacagtcaagactggatctgggggttcctgggagggtggctcagggctggaacactctcaggcaagagtggtggagttccctggcaggccctccgccaggcccactttgggcttctcccctctcccgacttctttcccctccaagcgacccaccagaggtggccttcccctgcccccaggcctttgggctacaggcctttactggggcccggtggggtactgcacagccttggcgagggtgagcggtgggaccctggctccctccataccatatcctctgctctccttccccagagctgggcatttccttcaatgagctgctgtggggatatttgttcccctcctcagaagtctgtgccatcttcccgttctcatctctcagccttgccttttcttcctggcgctgccgcccctcctctcaggagactgtccagggcctccatggctgcctggcggaaggctggattgggcggcaggtccaggagcctctgtcctccatagggtggggcaaagtgactcccgcttgctaacctccaaggccagtgtatgaatgggtggctctaggcgcttggctggtggcggccactgcatcccttaatttatttctctgctgtttcagttcttgagaaattgggggagtcttacagaggctgcccctgccctcacctgagttgtactatttttttttttgngatgggttttattttttattttatttttttttttctttgtattttacaattgactccacctttagccccagtgtctttgtgtcaccccccacccccacccattcatcaccctggctcccagaccaggccagactcagctacatgttgagtccttgggttccaggaagggaccttgccaacctcaaccctccagccccgtgctccactggctatggctcagaccaagggctcctcctcccccctcttcgccctatcggaacagcccgggtgctccaagggggccaggagggcatggcttggctcccagcaaatggggtgggggctgggggcacccaggcaaggtggcccctccctgcctagccccctcttcccctaccctgcacttagtttctcctctggatcaaacacgtaataaagagaatgtttggaatct

SEQ ID NO: 421 - DNA, 2926 bp, Cricetulus griseus
caccacctggctgcacccggtcaccggcgaggccgtagtcaccgggcaccggcggcagagcacagatttgcccacaggctgggaagaagcatatacttttgaaggtgcaagatactatataaaccacaatgagagaaaagtgacctgcaagcatccagtcacaggccagccatcccaggataattgtatctttgttgtgaatgatcagactgctgcaaccatgacatctgatgaaaagaaggaacgacccataagtttgataaacgaagcttccaattacagcatggcttcagactataccgttcatcccatgagccctgtgggcagaacatcacgggcttcgaaaaaggttcataattttggaaagaggtccaattcaattaaaaggaatccaaatgcacccgtggtcaggcgaggctggctgtataagcaggacagtaccggcatgaagctgtggaagaaacgctggtttgtgctttctgacctttgccttttttattatagagatgagaaggaggaggggattctgggcagcatcctgctgcctagttttcagatagccatgctcacctctgaggaccacatcaaccgcaagtacgcttttaaggcagcccacccaaacatgcggacctattacttctgcaccgacacagggaaggagatggagctgtggatgaaagccatgctagatgctgccctggtgcagacagagcctgtgaaaagaaattcccgggatggacaagatcacagctgaaggtgcctcaactaaggaaaccaataacattcccaaccaccgagttctcattaaaccagagctccaaaacaatcagaaaaataaggaaataagcaaaattgaggaaaaaagggccttagaagctgaaaaatacgggtttcagaaggacggccaagagcgaccactaacaaaaattaacagtgtaaagttgaactctgtaccatcagaatatgaaggtggcccagcctgcccacctccgaatgtgctctacagacccgtcaatgtgaatagttcagacggaaaaacagggaacgtcagcttggcagatgcccggggtggcagtcacccacgtgcagggcccctcgccacagaggccgatcgcgtcattcagagaacgaattcaatgcagcagttggagcagtggattaaagtccagaaaggacggggccttgaggaagagcccagaggagtaatttcttatcaaacattgccaaggaatatgccaagccaccgagcccaggttgtggcccgctaccctgaaggttaccgaacactcccaagaaacagcaagactagacctgacagtatctgcagtgtgaccccctctggccatgagaagactgggcctggaacaacggaggagaagaggcggtccatgagggacgacaccatgtggcagctgtatgaatggcagcagcgccagttttaccacaagcagagcacccttcctcggcacagctgcctgggcagccccaagcagcccctggtgaaggtctctgaccagacgatgtactccatccccacctcaccttcccatgggtcagtggctgcttacccggcattctccccacaacgaacatataggtcggaagtgtcctcacccatccagagaggagatatcacggtagaccgcaggcaccgggctcatcaccctaagcatgcctatgtacctgacaggcggtcaatgccagctggcttagctttaccggctgttagtcctcagagcctccaaggcagaacggcacactctacaaatacagacctgaagaagtagatattgatgccaaattaagcagattgtgtgaacaggataaagtggtccgtgccctggaggagaagctgcagcagctgcacaaggagaaatacacgcttgagcaggccttgctgtcggccagccaagagatagagatgaatgcagataacccagcagccatccaatctgtggtgttgcagagggacgacctgcaaaacggactgcttagcacctgtcgggagctctcccgagccaccgctgagctggaacgagcctggcgagaatatgacaagttagagtatgatgtgactgtcaccaggaaccagatgcaggagcagcttgatcgtcttggggaagtacagagtgaatcggcaggaattcagcgggcacagattcaaaaagactttggagaattcaagatgtcatggaggtccagattatagactctacaagagtgagccagagttgaccacagtggcagaagttgatgaatctaacggagaagaaaagtcagaaccggcttctgagacggaagctccggttgttaaaggttcccactttcccgttggagttcctctgagaacgaggtcacccacgccggaatcctcaacaatagcttcctacgtgaccttgaggaagacgaagaaggtggagctaagaacggagagaccaagaagtgcagtggaacagctgtgtctggctgaaagtactcgccctaggatgaccgtggaagagcaaatggagagaataaggagacaccaacaggcctgcctgagggagaagaagaaggggctgaatgtcatcagtgcctcagaccagtctgaaatgctcttcacacctgagccaaatggaatgagttctgagggagtgatggatacagaaaagcataaagatcagacactggaagatgttacgtgcagccctcaagaagaggcggagatgacaaaccatcaggcagaggatcaccctgaggaagcacagagtcttcatgaagaggagggaactcttgcttctttggagtcacctcctgagattcctagagagaatcaaaccacagtgaaaagtctgtccccgtctcccgagtcctccgcatcaccagctccgcccactccaccaaagctcacagaaggatcgcatttcatgtgtgtgtagtctcagaa

SEQ ID NO: 422 - DNA, 2926 bp, Cricetulus griseus
gacaggaacttcattcctccgaagtgtcagggtcccagaaattatgccccttctctcatcatgaactggctctcgagttccccgggagttgtgctaactgcttaccaccccagcggcaaggaccaggtcgttggggagagccatgcaaagggaggcgaccaagccacctccagtcccagatatggccagtacaccataatccaagaaaactccaccaaagttacagagaggcctccctttaatcgatcaagttcccaggattctttggatgacgtttgatggaagactattggacggaactagaaaacatcaagaggtctaatgaaaatcgccaagaaagtcaagaggccgttgttgtcaaagagcctgatgagggagagctggaagaagagtggctcaaggaggctggcttgtccaatctctttggagaatctcctgatgacccccaagaaagcattgcgtttttagccacactgacccggactcaagcggcagccgttcagaaacgggtagaaacggtctcccagaccttgaggaagaaaaacaaacagcaccacattcctgacgtcagagacatatttgctcaacagagagaagcacaagaaaaatctccaggtggctcagaatcaccgtcagccagaacgaaggaaaacaaatgccaaggaaaagatgaccaggcatcaagtggggctgttgataacaaggagctgatccccccacgggtgcctgaggatgcgcctgcctctgaaacagacatcaatctggaggtgtcatttgcggagcaagctgtcagtcagaaagagctcagcagggagaggatgcagaagatcagagtcaatgatgcctcattgcctagtttcagactgccaaaagataaaactggtactacaaggattggggacttggcaccacaagacatgaagaaagtttgtcatctagccctgattgaactcactgccttgtatgatgtgttgggcgtggaactcaaacaacagaaagctgtgaaaatcaaaacaaaagattctggtctttttggtgttccattaaccatgttgttagaacaagatcaaaggaaagcaccgggaactcgaatacccttgatctttcaaaaactgatttctcgaattgaagaaggcggtctagaaaccgaaggcctcctacgaataccaggagctgccatgagaatcaagaacctttgccaagaactggaagcaaagttttatgaaggaactttcaactgggaaagtgtcaaacagcatgatgcagccagcctgctgaagctgtttctcagggagctgccccagccactgctgagtgtggagtatctcaaagccttccaggcggtccagaatcttccaaccagaaaagaacaattgcaggctttgaacctccttgtcatccttctacctgatgcaaacagagacacactgaaggccttgcttgaatttctccaaagagtcattgacaataaagagaagaataaaatgacagttgtgaatgtagcaatggtcatggccccgaatctcttcatgtgccatacactaggtttgaagtccagtgaacatcgagaatttgaaatggcagcggggacagcaaatgtcatgcacttattgattaagtaccagaaacttctatggacaattcctaagtttattgtaaaccaagtgaggaagcaaaacactgaaaatcaaaaaaaggaaaggagagccatgaagaaattgctgaagaaaatggcttatgaccgagaaaaacatgaaaagcaagagaaaactacaaatgaggctgacgttcctcagggagtgattcgagtgcaagctccccatctttcaaaagtttccatggcaatacagctaactgaagaactaaaagccagcgatgtacttgccaggtttctcagccaagaaagtggggttgcccagacacttaagaaaggagatgtttttctgtatgaaattggaggaaatattggggaacgctgccttgatgacgacacatacatgaaggacttgtaccaactgaacccaaatgctgagtgggtcataaaatccaagccacagtagaagactaactagaggactagtatcatcattcattcttgctgagtcaagagtgtaaataaaagtatcaggtttcttaattattcagctgtacccaattattacaaagtgatattgccacgccttaaaattatagatttttgtggtttctgtaattgttaattattattattaaggaaacaagtatttttggagttgagaggaaaggggcgtaattagcttgtgggctgtttatacacaccttaaaatgtgttcagatatgacagctagaactttactcatgaagggcaagttgcttcatgacacctagtgatatccccagcagattaaatcatctttactaatagatttaccaaagaagttttggtttatttacatttttaagaacgttctctcccctttcttacctcttcctagctaccttctctcaataaaacttgcctttttaaccagaaagagacagttaatagcaggtatggggaagctgtgaaggcaaacctaactcaacagtatttttgttaccacaaaatgttagtgtccatggctctggatcctctgtctaaagtattattcccagggcttttcatgcacagaccacactgtgacacaacgtggacctctgctgtaaataagagaaatgaaataagagcattgatttgctgttttataagggtagagtgtcattggtacaaggtggtatggatagatgtggcaccaatatcttgatgacagtgttcatagttctttaggggaagctacacattctcagaagctcttgatgccactctaattaggaaggaaagtgccgttaatgagaacagcgaaatgttgagcatataattacaagagcagcctgtggatagatgctt

SEQ ID NO: 423 - DNA, 2925 bp, Cricetulus griseus
atgatgagctatggcatgatggagtatgcccgtcagtagcaaatccttagaagtttacctcattcccaccatcacctgacaatatcacctttgaagacccatccttagatgtgatcctcctcttaagagttttacacgccatcagtcgatactggtattacttgtatgataatgctatgtgcaaggagattattccaactagtgaatttattaatagtaaattaacagcaaaagcgaataggcagcttcaagatcctctagtaatcatgacaggaaacatcccaacatggctcactgagctaggaaagacctgcccatttttctttccttttgatacccgacaaatgctttttaatgtaactgcatttgatcgggaccgggcaatgcaagatacttgataccaaacccacgaaaatcaaccagtctgattcacaagacagcagagtcgcacctagattggatgaaaaaagcgcactgtgaacagagaggagcttcttaaacaagctgagtctgtgatgcaggaccttggtagttctcgggccatgttagaaatccagtatgaaaatgaggttggtacaggtcttgggccaacgctggagttttatgcacttgtttctcaggaactacagagggctgacttgggtctctggagaggtgaagaagtaactcttagcaatccaaaaggaagccaagaagggaccaagtatattcaaaacctccagggcctgtttgcgcttccctttggtaggacagctaagcctgctcatattgcaaaggttaagatgaagtcttggcctgcccttttataagtggatgctgaggcaggaaacttcactgacatctcatgattttatttgacattgatcctgttgtagccagatcagtatatcacctagaagacattgtcagacagaagaaaagactggagcaggataaatcccagaccaaagaaagtctacagtatgcattggaaactcttacaatgaatggctgctcggtggaagatctgggactggacttcacactgcctgggtttcccaacattgaactgaagaaaggagggaaggatataccagtcactatccacaatttagaggaatacctaagattggtgatattctgggcactcaatgaaggtgtttctaggcagtttgactcgtttagagatggatttgaatcagttttcccactcagtcatcttcagtacttctacccagaagaattggatcagctcctgtgtggcagtaaagcagacacttgggataggcctgatcatgggtatactcatgacagtcgggctgtgaagttcttgtttgagattctcagtagttttgataatgaacagcagaggttgtttcttcagtttgtgactggtagcccacgattgccagttggagggttccggagtttaaatccacctctgacaattgtgcggaagacatttgaatcaacagaaaacccagatgatttcttaccctctgtaatgacttgtgtgaactatcttaagttgccggactattcgagcattgagataatgcgtgacaaactgttgatagcagcaagagaaggccaacagtcgttccatctttcctgatcacaacaagaaatcagtgtctgcctattacagcaaaagaaaaaaatcatgatttcttttctatgtgtcacctgagtcaaggaaacatgttcctccttcttgttgtaggaaaacggcttgcagattataattcataaatggccccgtggacttcaagtgatcaggccctaaaagcgttgttgtgatgaggtttctttagcaagttcttgtttaaattatcatttatttgatgagtgaagtttttaacttgctttgctgtgtgaaatttcaaagggatgttttttcaggctggaacaataaatgtcgctgtgcagtttaaggaagatagtagcttagtttactactgtaactcattctacattgaccttgccttatgtggaaacatcccctgctgacagaaatatctttggtagtttgcccagttcaatgtggaggagttgggtccagtaggtctctgctcacagaggcttgtaaatgagcaatgttacttggaggggagagagagttgggttctgtaacttcaccctgttgtccagaagatctgggcccctttgtctccagttctggtgttttacaaacagcacaaagattttgtgtgaacatagtagtttgtttctcactttttaaagatctgttaaaatgtagacatctgtacaaaacaaagtgatgtttcatattaaaataatctgtatttgcattttatacctgtggtgctggcagatttggcttcattgattccttgcataagttgaatgcatatgatggttctgactggaatgtttcagatttcttttacactttggttttctgacccattttgctttccctgttgtaatgagaatattgtcttgaactgttgtgctctgtatgattctttgagaagtggtgttatataggtgttaggtttgacattgctgtagctggtatccacagtaagtaacctggtgacaggtcactggaaagtcccagttacccaaacagaataccaggcaactcatagcacttaactatgtctaaaaattggcatatgccaagaagttcagatgaacaactaatggcaaaaaagaaattccttaaacgcttacaggcttgttctgtatcaaggtgacgttcttcaataatggaagaggaagatttatttttactacaaatggactcacaaccaaattgataagcaactgctgtactctgtaaagtgttctttctcttttgatctgaatcatttatatgaactgctggaataatggaacttcagactacaaatgtgtatgtaaaattgcatcgatgtcccgactcctgactattatttttaataaatggcattatccttc

SEQ ID NO: 424 - DNA, 2925 bp, Cricetulus griseus
tgggatcttgtgtgtgataatgcctggaaggtccatatcgctaaattctccttgctggttggattaatctttggctacctaataactggatgcattgctgactgggttggtcggcggcctgtgctgctgttttccatcatcttcattctgatctttggactgactgtggcactgtcagtgaatgtgacaatgttcagcacactcaggttctttgaaggattttgcctggccggagtcatcctcaccttgtatgcattacgaatagagctgtgccctccaggaaaacggttcatgattaccatggtggcaagcttcgtggctatggcaggccagttcctcatggccggggctggctgcgctttcctgctcatgctgctctactggtcgatattccccgagtctctccgatggctaatggctacccagcagtttgaggcagcaaagaagctgatcctgtacatcacacagaagaactgtgtgagccctgagagtgacatcaagggagtgatgccagagctagagaaagaactttcacggaggcccaagaaggtgtgcatcgtgaaggtggtggggacgcggaacctgtggaaaaatatcgtggttctatgtgtgaactcgctgacagggtatggaatccaccattgctttgcaagaagcatgatgggccacgaggtgaaggtgccactcctggagaacttctacgctgactactacaccatggccagcatcgcactggcgtcctgcctggccatgtgtgtggtagtcaggttcctcgggcgcaggggagggctgctgctctttatgatccttaccgccctggcctcactgtttgcatcccatgcagtggggagcctcagcgtgttcttctgtgcagagatcaccccctacagtgataaggtgtggtgggctggggctggtgctggccagtgcaggcttcggaatgctgacagcacccattattgagctgcataaccagaaaggctacttcctgcaccacatcatcttcgcctgctgcacgctcatctgcatcatttgcatcctcctgttgcccgagagcagggaccagaacctgcccgagaacatcgccaatggggaacactacacaaggcagccattgctgccacacaagaagggagaacagccactgctgctcaccaacgcggagctcaaggactactccggcttgcacgatgtggctgcagtgggtgatgggctaccagagggggccactgccaatggcatgaagtccatgtagcttgctgggccacaccaccattccaccagtacccccggggcttgaagggctggggaaagtttgcacacagattaacagaccagagagctccctgatcatgaagtggaaccttctgagtgaggcagggtcactctgaggaagtccctgtaaatgaccaatgcagtggccagtcccctccctggaggccagactcagtctccttctccactcacggagacagaggtcatctgtaggccaggacccctacctcccaggctcactgccgtggacagttgtgcctctcagcggagcattcttgggactctattttagacagaggaaaatgtacatgaattgggtttttctcctcaggggaaggctgagtgattctgtttctgcttcagagtatggagacctgaagttgctagaacacctcatgaaaggtagccaaaacacaaaagcctgctgctaggcaagcttgctgtgtggtctgatcaggtcagaaaggcagcaggacacccaggccccaggcactctggcctagctccataggaagatggccacagcctagctccctagtaccaagctaccattcctgaattcagtcctgtgctcctgtgggtagttgcttctcaggtactggtcctttgtgttgagcccctccatctctggggaacattacaaggtcttactctccacctatccctgcacctgtttcataacttatgcacaaatgtgaacacccaaggcagggctggatcagttcttcattttgctctttattaagtcaaatattatgaaatatctaattattagcacccaagacaaataggaaaaaggtttagatgattttgtgttttaagactataatcacccacaactggaggacagggctgataaatgggtttggccacaaaatggaaagcaatcaaaaccagacctcataaagggaatatcacatgcagtcatgactacttcccagagccaagcgagaagtccctgaactggaagtgccattcaaagaatctcatgaccattacacacccaagccctgggtggcacacaggttgaaggaggcccacacttcacctcctccttgttctgaaggacaccacctcactctaatgtattgtgtgtgtttttggagcagtatggtgtgttgtgtctagtgaggaacgctcccctacctctgtcctctttgcaaccccaccatgcgtgcttttcctctaagagccgcgtggctgtacgtgttgatgggggtggtacctgttcatagcacaagtctatgttgagctctgaactgccattcacagctgcgtgtctgcatggtgtcgcatctgttgtaccttcggggaaaatttgtatgtaaatgtacagaaataaaatgttgccccattaacaatttcctctggaatgtcttcctccctacctcacctgatggtatccacaagggcatttcactaccactgaggatgagtaataaaatcctccatgtagacgagacctcccagagtcactggtttcgagggttcatctgtcagtggcttccacttgccctgggggatggtggggcctctcgttctgcttgaagagtcctagtcttaaaaagtagtcagaggttgagaccagattcaactcaaatgtttatgtatgtgattctcaaaccatctaagaattcagcacactgaaga

SEQ ID NO: 425 - DNA, 2925 bp, Cricetulus griseus
tgaaggtttccggagtcggcagtttgcagccctggtggcatctaaagtatttatcatctgggggcttttgaggagtctctgaattatgctcttggagcaggcgacctcttcaatgtcaatgataattctgaatatgtgagactattatagcaaaatgcattgatcattataccaaacagtgtgtagaaaatgcagatttgcctgaaggagaaaaagccaattgaccagagattggaaggcattgtgaacaaatgttccagcgatgtctcgatgatcacaagtataagcaagcgattggcattgctctagagaccaggagactagatgtctttgagaagactatactggagtctaatgatgtcccaggaatgctagcttacagcctcaagctctgcatgtctttaatgcagaataagcagtttcggaataaagtattgagagtcctggttaaaatctacatgaacttggagaagcccgatttcatcaatgtttgtcagtgcttaattttcttagatgatcctcaggccgtgagtgatatcttagaaaagctggtaaaggaagacaacctgttgatggcctatcagatttgttttgatttgtatgaaagtgctagccagcagtttttgtcatctgtaatccagaatcttcgaactgttggtacccccattgcttctgtgcctggatctactaatacgggtactgtgccaggatcagagaaagacagtgaccctatggagacggaggagaagacaggcaacacaccggtaggaaagacaccggatgtgagtccagagcccaaggaccagacattgaaaatgattaaaattttaagtggcgaaatggctattgaattacacctacaattcttaatacgaaataataacacagacctcatgattctgaaaaacacaaaggatgcagtacgaaattctgtatgtcatacagcaactgtaatagcaaactcattcatgcactgtggcactacaagtgaccagtttcttagagataacttggaatggttggccagagccactaactgggccaaatttactgcaactgccagcttgggtgtaatacataagggtcatgagaaggaagccttacagttaatggcaacataccttcccaaggatacttctccaggatcagcctaccaggaaggtggaggtctctatgcattgggtctcattcatgccaatcatggtggagacataattgactatctccttaatcagctcaagaatgccagcaatgatattgttagacatggaggcagcctgggccttggtttggctgcaatgggaactgcacgtcaggatgtatatgatctgctgaaaacaaacctttatcaggatgatgctgtgacaggggaggcagctggcctggccttaggtttggttatgttaggttctaaaaacgcccaggctattgaggatatggttggctatgcacaagaaactcagcatgagaagattctgcgcggtctagcagttggcatcgcattagtaatgtacgggaggatggaagaggctgatgctctcattgaatctctctgtcgtgataaggacccaattcttcgaagatctggaatgtatactgtagccatggcttattgtggctctggtaacaacaaagctatccgacgcctgctacatgttgctgtaagtgatgttaatgatgatgtcaggagagcagcagtagaatcacttggcttcattttattcaggacccctgaacagtgtccaagtgttgtttctttgttgtcagagagttacaaccctcatgttcgatatggggctgcaatggccctggggatctgctgtgctggtacaggaaacaaggaagcaattaatttactagagccaatgacaaatgaccctgtgaactacgtgaggcaaggggccctgatagcctcagctctcatcatgatccagcagaccgaaatcacttgtccaaaggtgaatcagttcaggcagctgtattccaaagtcatcaatgacaagcatgatgatgtcatggccaaatttggcgctattctggcccaaggcatactggatgcaggtggtcacaatgtcacaatctccttacagtccaggactgggcacactcatatgccttctgtggttggcgtccttgtttttacccagttctggttctggtttcccctttcgcacttcctgtcattggcttatacccctacctgtgtcattggccttaataaggacttaaagatgccaaaagttcaatataaatcaaattgtaaaccatccacattcgcatatcctgcccctctggaagtaccaaaagaaaaagaaaaggaaaaggtctccactgctgtgttgtctattactgccaaagctaaaaaaaaagaaaaagaaaaagaaaaaaggaagaagagaagatggaagtggatgaagcagaaaagaaggaagagaaagagaagaaaaaagaacctgaaccaaacttccagctgttggataatccagcacgagttatgcctgcccagctaaaggtcttaaccatgacagagacctgcagataccagcctttcaaaccactctccattggaggcatcataattctgaaagacaccagtgaagacattgaagaacttgttgaacctgtggcagcacacggcccgaaaattgaagaggaggaacaagagccagagcccccagagccatttgagtatattgatgattaaggaccaagggatttcacattctcagctgaagatgtctatcctggcacatactgcgatgtctgtgagggaacccacactagacctactcgatgcacgcatcattgctatgctgacctacagaacctgtgtcccgagtctttggttgagaagaagataacatgactgtttagtgtgctctttcacagaaatttggttttcaaataaatatgttaaaatctcca

SEQ ID NO: 426 - DNA, 2925 bp, Cricetulus griseus
cttgtaccagcccagggtggaagaagccccggcctgagaaagaaggaaggagtgggggaggccaacagtttcctggctgcttgctctgtagacgctgagggggaggaaccgtctttctcagaggaagcgcagtttcattttactcacataaatatatgaatatatttcattggggtgttccagaagatgataaagaaatgatagcagctccagaaataccaactgattttaatctactacagtaattgtatatactgtggtggagatgaacacagctgccgatatacttcaagcagtatatgaagtattataatgattatggagatatcatcaaagaaacaatgagtaaaacaaaggcaaattgacaaattcaatgtgctaagacccttattctcagtttgcagcagctttttaatgagatgatacaagagaatggctataatttcgatagatcatcttcaacatttagtggtataaaagaacttgctcgacgttttgctttaacttttggacttgaccaattgaaaacaagagaagccattgccatgctacacaaagatggcatagagtttgcttttaaggagcctaatccacaaggggagagccacccacctttagaattttcttctaaactgctccgacaagataaaagaacagtgtatgtttatttggaaaagttcatgaccttccagatgtcactccgaagagaagatgtatggcttcctctgatgtcttaccgaaattctttgctagctggtggtgatgatgaataccatgtcagtcattagtggaatgagcagtcggggttcaaccgtacggagtaaaaaatcaaaaccatccacaggaaaacggaaagttgttgaaggcatgcaacttgctctccctgaagaaagcagcagtagtgacagtatgtggctaagcagagagcaaacactgcatacccctgttatgatgcagacgccacagctcacctccactatcatgagagaacctaaaagattgcggcctgaggatagcttcatgagtgtctatccaatgcagacagaacaccatcaaactcctcttgattataatcggcgtggtacaagcctaatggaagatgatgaagagccaattgttgaagatgtcatgatgtcctcagaagggcggattgaggatcttaatgagggaatggactttgacaccatggatatagacttgccaccatcgaagaatagacgggagagaacagaactgaagcctgatttctttgatccagcttcaattatggatgaatcagttcttggagtgtcaatgttttaataccagtacacaatttaaatctgtggtgaagtcattttctaagtggacgaggaagttttaaaataaagtgtggtagatacagtgaaaattctgtacagattttctctaaggagtttatttatgcgctgttagttggcttttaaatgaattatttcatgcttttttaaaaaatataacaatctgaagaagtatttggtacagataagagtcttctcacatttatttactggttgtactaaataatgatgacctctgctggatttctgtttacatccgagaaacaaaagttaaggatgaatttattccctaaccctgaaattgtaggatagaattgtttttagcattcaaaatttaaatgcttaaaacatcagtcaacaaaactttgttttaaatgttgtaattgtggaaaaaagttaaacttataagcagaacttttacaattttttcatctaaaatgtattttaagatattttaaaattcaagagcttctgtatacttttcagaaatatccagatgcagtgaactgccagaaggtaaccagtctcaaacatgcttctcccatatgagccctgaaagtttgcttgtcctttaagataaaaatgtaaatgttgtcatattccttccagtagtgccactgttattttgtctccaaataaaagaagcttattgtagtatgtttgcaaaaaattatacagcttattagagtgtgggaatagggatctaaattttaaataaaattatatatatatataaattggtgctgattttataattgcgcagtttgtttagttttttcttacttttaaattccaacttaaaattatgaggtttcagaaatatattgaaagttttaacaatgtttaaaaatagaaaagcatgactgttcatgctttaaaatgatttttaaatttgtattttatattgttttatctatctgtctttgcaagcagtcttcaggttaaagatacttctaacaggttacagtacatttcctctgtatgtaaattagatgggataatagaattcataacccataatattctttgaaagctaagctttaaacttcattttatgtcctttcacaaatgaattagtttaaaacagaaatggccacttgccattttgacatcaactcattttgcgaggcttaggcagctagacatcgtttaaaacaaaaccttaatatgcttgcaatacaagaatatcttcagatgtgtgaataccaaaaggcttctggttttttgagtcaggaaatcaacaagcattgggctgtggtagccaaaaaaccataggttagctgaaagaacacaaaatacacttattttattaattcatggttaatgaataaaaccagacatgtctaacatactttccatcaacaaacattgttatgtgcaaacgtattgcatatgttcttttacacaccactgcatttcctagaactgctgagaggactgtatatatgatttttaaacctaagttgtatttttttttttctcactctccgaaaagagtacttctttgtgaaagcagttcttacagtcttttgttttcaaccagctaaaaaatgttttatatattactctaacctgttgtcctccacattctattgtcctaattgta

SEQ ID NO: 427 - DNA, 2925 bp, Cricetulus griseus
aagcggcggaggcttcctgtcaggggcagcaggtccggagcgcccggagctccgcttaccttgggccgcagccccgaagccccagcggagccagagcgtggtgcgtcccacctgcggcctcaccatggtgctgttggcagcagcagtctgcacgaaagcgggaaagctattgtttctcgacagtttgtggagatgacccgcactcggattgagggtttattagcagctttttccaaaaactcatgaacactgggaaaagcaacatacttttgttgaaacagagagtgtaagatatgtctaccaacctatggagaaactgtacatggtattgatcactacacagaaatggattctcatgaggagaaagtgttcagagcagtcagagagactcaagaacgtgaagctaaggctgagatgcggcgtaaagcaaaggaattacagcaaaccccgaagagatgcagagagacagggcaaaaaaagctccaggatttgggggattcggtagttctgcagtgtctggaggcagcacggcagccatgatcacagagactatcattgaaactgataaaccaaaagtggcacctgcaccagccagaccttctggccccagcaaggctttgaaacttggagccaaaggaaaggaagtagataactttgtggacaaattgaagtctgaaggtgaaactattatgtcttctaatatggggaaacgtacctcagaagcaaccaaagtgcatgctccacccattaatatggaaagcgtgcatatgaagattgaagaaaagatcacactaacctgtgggagagatggaggattacagaatatggagttacatggcatgatcatgcttagaatctcagatgacaaatttggccggattcgtcttcatgtagaaaatgaagataagaaaggggtgcagctacagacccatccaaatgtggataagaagcttttcactgcagagtctctcattggcttgaaaaacccagagaagtcatttccagtcaacagtgatgtaggggtattaaagtggagactacagaccacagaggaatcttttattcccttaacaattaattgctggccttctgaaagtggaaatggttgtgatgtcaacatagaatatgaactacaggaagataatttagagctcaatgatgtggtcatcaccatcccactcccatcgggtgttggtgcaccagtgattggtgagattgacggggaatatcgacacgacagtcggcgaaataccttggagtggtgcctgccagtgattgatgccaaaaataagagtggcagcctagagttcagcattcctgggcagcccaatgacttcttccctgttcaagtttccttcatctccaaaaaaaattactgcaacatacaggttaccaaagtgacccaggtagatggaaacagccccgtcaggttttccacagagaccactttcttagtggacaaatacgaaatcctgtaataccaagaagggaggaaagccgaaaaggaaggctttcagattaataaagaagaagccaaaagtggctgaagagtttttccaaatttacaagccattggagacccctttttttcctgataaagtgtacatcctctgctcgaaaggaccctcaactcatccccagcgttctggtgtcacagagacattctttgacaaagaaatgacactaacataaagggaaaggctgctgatttctttggccagcaggaaagcatgctctccagggaatggaatgtcccgtaaacacctcttctgccttcatagaagtttcccctttattttaatctctaaatatagttatatttcatacttcgttttaaaacgttttctctatagatttgaatctttcatacccctttcaatattttttcagtacactcggtcacgcactgggatcatctctttgtaggtattgtgtttggcactcctagaacaaggttatctaacccattcttgactttagacagtaccagtgaactgcttaagggatgtagagtctagaagtttgaaatagaaggttgtcttatcctctgctgtgtccatccattgttccatttctttgccaagtggttgacctgcctttccagttgcaagcagtacttcgaatcccactcgtgtcaattgttaaaggtagcagctaaaaagcagctctctgatgaacacaccttttcaagatgcctgataagatggctacatccattcctccccacatggaatcatgtccgctgctagtgctacaaaaacttgcaattccttcccagatgttcttctctctgtcagtcttctttccagcagaaatgagtgaggctactgagtctgtgccatttccacccaccaagcattgcactgggcgggttggatgatgattgctgcaaggctgtaggcactagcagtgggaagcagaaaatgacagaagatgacctccacactctcaggtggctggagagcggggctctcattctgaacagctggccctccgtggcaaaagtatactacccatgaagtagggtagtcacacagaaatggctgtggctggatggcttgccaaagaaagttttggcctttccctttccctaaactgcatcagggaagaatccttatctccagcttggttttcatgtgaggttttctgaggaaggggactgggataagaagtttgtcatgtagttaagtagacaagaaatcttattaatccagttgtatttcagaattgtttgtccctatgatttttaaagtcaagtttaatttcacaaagacttttttctgaaattacttttggggtaatatttaaaatgagagacattttgtaaccctgtaaaatacatagggaatataacattccaatgtacacaacgaaggcaaattctttaatcaaataaaagagtattataaaagaaaaaaaaaaaaa

SEQ ID NO: 428 - DNA, 2922 bp, Cricetulus griseus
ccatgtggctagtgtgtggatccgaatctcattccactgcttggacagagacagccacacaggcggaaagacctttggcctctccaatcagcgctaggtcagctcgctatctgaggcaacaccgggaggtctggtggaaactgagaaaatccactcaggaagaaatcaaatcttcagctccccaaacggaggaagagtgtaccagtgttgagattagctcacccgacagtgaggcccgcccccttaggtatcaatggagtcccagttagacctgagttaagaccaataactaggagctctccgcatgagatggtccgagatgaggggtcctctgcacggccgagaatgttgcggttcccttctgggtccagctctcccaatatcctggccagctttgcaggaaagaacagggtgtgggtcatctcagccccgcatgcctcagagggctactaccgcctaatgatgagcctcctgaaggacgatgtgtattgcgagctggcagagaggcacatccatcagatcgtgctgttccaccaggccggtgaggaagggggcaaggtacggaggatcaccagtgaaggacagatcctggagcagccgctggaccccagtctcatcccaaagctgatgagcttcctaaaactggagaagggcaagtttagcatggtgctactaaagaagactctgcaggtggaggagcgttacccttatccggtcaggttggaggccatgtatgaggtcattgaccaaggccccatccgcaggatcgaaaagatcagacagaagggttttgtccaaaagtgtaaggcctcaggcttagagggccatgtgctccaggaagggaacaatggcggcgggggagcaggaagcacaggcctgggcagtgagaagaagaaagaggagccaaggagagcacaagtccaccccaccagagagcctcagagaaagctggccaccaccaaggcagccattacccaacctcccccaaccccaagggccactacccttcctcctgctccagtcacaacagctactcgggccacgtcccggatggtgacagtagctgcaagacctacaactacgactgcctttccaaccacccagaggccctggacatcccggctgcagccattctcagtcgccaacaggccccctgcaacagctgaggtgaccactgtcaggggcacttccgtttcagagcaactctaccctctacctcggaaggagcaacagagagagaagccacaggctaccagaaggcccagtaaagccaactatgggagtttcacagcagccccacccactaccctctgggagggcagcacaagagctgtgggcacaagtcgtttccgtgacaaccggacagacagacgagaacatggccatcagaacccgaatgtggtgccgggtcttcataagccagcaaaggggaagctgcccaaaaagaaggacaaaattcttagcaatgagtatgaagccaagtacgaccccagccgacccactgcctctcaaggggaggaggagttgcaggtggacaatgttccctcccagaatgcaaaggagtcaaagaagcacgaaaaactcgggaaacctgagaaggagaagaaaaaaaagggaagggtgtgaaaccagacaagttactcaagagtgacaagcaaacgaagaaagccgagaaaaagagcaagcaggagaaagaaaagaataagaagaaaaaggcgggtaagacagagcaggatggctatcagaagcccacaccaaagcagatcactccaagtcccaagaagtcagtgagtgacctgctgggatctttcgaaggcaaacgacgacttctgctgatcaccactcccaaggctgagaacaacatgtatgtgcagcagcgggatgagtatctggagagcttctgcaagatggccaccaggaggatctctgtggtcaccatcttcggacctgtcaacaacagcaccttgaaaattgaccacttccagctagataatgagaaacctatgcatgtggtggatgatgaggacctggtagaccaacatctcatcggtgagctgagaaaacagtatggaatgacctacaatgacttcttcatggtgctgacggatgtggatctgagagtcaagcaatactatgaagtgccaatagcaatgaagtctgtgttcgatctgatcgatacattccaatcccgaatcaaagacatggagaagcagaagaaggagggcattacttgcaaggaggacaagaaacagtccctggagaatttcctatccaggttccgatggaggaggcggttgctggtgatctctgcccctaatgatgaagactgggcctattcacaacagctctctgccctcagtggtcaagcatgcaattttggtctgcggcacataactcttctgaagcttttgggcgttggagaggaagttggaggcgtccttgaactgttcccaattaatggtagttccactgttgagcgggaagatgtaccagcccacttggtgaaagacattcgcaactatttccaagtgagcccagagtacttctccatgcttctagttggaaaagatgggaatgttaaatcttggtatccttctcctatgtggtcgatggtcatcgtgtatgacttaattgattccatgcaacttcggagacaggaaatggccattcagcagtcactggggatgcgctgcccagaagatgagtatgcaggatatggttaccacagttaccaccaaggctaccaggatggctaccaggatgactaccgtcatcatgaaagttaccaccatggatacccttactgaacagaaatatgtaccctattcccatccagtttcctctttatctgctaaagctgtgtgtggcaggctacaagggaagtcctccatactctacattccctgcccttttctttcagtg

SEQ ID NO: 429 - DNA, 2919 bp, Cricetulus griseus
gccaccaccgccgccaccaccaccaccaccgccgcagcagcagcaacagcacaacagccggcaccacagcctcccccaccaccagccgcagcagcaacagcagcccccaccacctcagcagcagccccagcccccaccaccaccacagcagcagccgcctctgtcacagtgcagtatgaacaacagtttcactacagctccgatgatcatggagataccagagtctggaagcactgggaacatcagcatctatgagaggattccaggggactttggtgctggcagctactctcaaccatcggccaccttcagtctagccaagttgcagcagctgactaacaccattatggaccctcatgccatgcgagaagatgaacgagatggactcgcagtttaaagcttacatatatatagataaagggactttttatactgacaaaccagagaaaaaatggaccttttttccagttaaaatatttactgtagacgtagtaggtaatttttctttggttttatttattattattattactgtttttgttttgtttctagaaaacctgatctctttttgggggttcaatgttgttttgggtttttgttttcttcacagtcttgaacattttacagtagaactcatctaaaaatggatttgggtaggggaaacatgcacaaaatcttttcataattaaaaggagccttactttctttatacaccacatggacagaatttatgtaaacgtgaatttattttattttaagatgtgtgtttcccctcactgtctgcagctcccaatgttgtcatttttaaatgttatatatacatctcaagggtcaacctggcccttttcctccagacccgaccttttcatttccccactcattccaacaggaggcacttaggggagactgggatggggacatggagagcaacccaagctccttaaacttaatgttattgttattattactactaataaagtgaggcaggaaatgcttctccttgtaaaactccctcccctccagagtgtttctaggtagacttcattgaaatacctgtttttcttgaatcaagtgtaatatatatatatattttttaatattcccactcagcactcagagacacaaaatactgtaagtctcacttaacagcagaatctcagaggacagctgtttgtaatcctactccagcctttggaggatacagatggtcagttaccaatcaaaaagaggaatgaacctcttgggtttttaccacctggtgaatcagccataacatgcacactccactcacctcttgtttttaagtatgtacttggaaatgtggactaagggtcttgtgcttgcacctttgactctggtaaccctcagagcaagcccctgtgatttgcctgtcacattttagccacacagtttcatgaatgactgtagtatcagtgacttagaaaatgcctggtgcagagtaagtccaaagggagataatggtgtgacttttacagctgcataaatgatgcatacctcttgttttttgttttgtcttgagatcctgaacttatccccatgaaccagtgtgcactagccgctctcctgtgagcaatgagcaaggagagcctcaccaccagcaaagtagggcacatctgggccgcagggcttcgggacactcgcctgtcgtttaactagttcgcccattctcttctccacttgctccagggatataattatatatatacattatatattccatcattagaagatggaaactattataccacttggtatgtgcagtcaaatatccaaaaggaggacataatgcttaaagaaatacctgtaagcataaattctctcctttatttgtacattttatatagataaatttttaaagtactaattaggcattacatttttttcaaatgcacaggtttgttgggcttttttatataccttaattggctttctcaattaagtgtgttagatagaaaagcagaattccacactgtaccactatcaactctgagcatgtgcaaggctgcgtaggacccagtttctctgtatatactgttccagttcccagtcatctctgtagaatgtgcactgtgctgccctctcctacatcttcagctatgtcattgcttcctggatgggatggggcagggatggggggagggaaggggaggtctgtttgggaggagggtgggtcaaggcagaaggagagcctgttgaaatgagggccgtgaattcagtttctatggtttgcagttgtgtttgtttttttttttttcttttctaaattcaatcaggcagctccctttttccacaagcctctgtgactgtagaactattgtagaaaaatatgttcttttctatattataaaagaaattatccaacacggtaatattggtacctgtcattttttcacttctgttttaaaaaaaatgtatttttagcaagataacttgggtaatcttctaaaaaaagaaatttaaaaactcacttgttagtgactttgatgccttttaaaataagagctttttcatttcattccatctttaaaattttttatctttgttgtagaatattaaaaactattttaagaaagataaaaattctctttaaagagatctctagagagtgtgactagagccccagatgcctctaaaagccgcatgtacaaactaagtctattcctgtctgtttatatttgcttttcctgttttgtaacctctttgtactgttcctggtgactcgtaagcgaccggaggggcctacatgccttcggatctctccatgtcatgcgctcctggccaggcagcctcccttctctccttgtatgtaatatcttttccccctttctagcaagtactttcaaaagaactctgtacattttaacataaaaaaaataaattatgttgagccattttgga

SEQ ID NO: 430 - DNA, 2919 bp, Cricetulus griseus
  modified_base (566)..(566): a, c, t, g, unknown or other
ggatgaacttgcgtcctttcttttaatccgccatggaattctgctccgtgcttttagccctccagagccaaaagaaaccccagacaacagacgcccatacgcagcgtatagcagtaacttcccagctcggtttctgtgccgtagtttacagtatttaattttatataatatatactatttattatagcattttgatacctcattccgtttacacatctttgaaagccgcgcagtaattctcttattaattaaagaaccactacactaaaaaatggcatctacagtggcaccgattactaatactctagctactgttgctactgctgctagcatcggtggatgacaaagtatggatggtcatcctgggctttatcattgcatttgtcttggcattctccgtgggagccaatgatgtagcaaattcgtttggtacagctggttctgctgtgtggcactaatggctcgtttttgaagctgcccatttctgggaccattgtattgtcggtgcaaccattggtttctccctcgtggcaaagggcaaaagggtgtcaagtggtctgagctgntaaaaatcgtgatgtcttggttcgtctctccactgctttctggtattatgtctggaattttattcttccttgttcgtgcattcatcctccgtaaggcagatccagttcctaatggcttgcgtgctttaccggttttttatgcctgtacaattggaataaacctcttttccattatgtatactggagcaccgttgctgggctttgacaaacttcctctgtggggtaccatcctcatctcggtgggatgtgcagttttctgtgcccttttcgtctggttctttgtatgtcccaggatgaagagaaaaattgaacgagaaataaagtctagtccctccgaaagccccttaatggaaaagaagaacaacttgaaagaagaccacgaagaaacaaagatgtctcttggggatgttgagaatgggaattccgtgtctgaggtagcttgtgccactgggcctctccgggctgtggtggaggagagaacagtgtcattcaaacttggggacctggaggaagctccagagcgagagcggcttcccatggacttgaaggaggagaccagcatagatggtaccatcaatggtgcagtgcagttgcctaatgggaaccttgttcagttcagtcaaactgtcagcaaccagatcaactccagtggccactatcagtatcacactgtgcacaaagattctggcttgtacaaagagttgcttcataaattacatctggccaaagtgggagattgcatgggagactctggggataagccgttgaggcgcaacaacagctacacttcctacaccatggcaatatgtggcatgcccctggattcattccgtgccaaagagggtgaacagaagggagaagaaacggagacgctgacatggcctaatgtagatactaagaagcggattcgaatggacagttacaccagttactgcaatgctgtttctgaccttcactctgaatctgagatggacatgaatgttaaggctgagatgggtaacaggaaaggaagtaatggctctcttgaagagtggtgtgaccaggataagcctgaagtctccctcctcttccagtttctgcagatccttacagcctgctttgggtcatttgcccatggtggcaatgacgtcagcaatgccattggtcctctggttgctttgtatcttgtttatacaactcaagatgtgtctacaaagatagcaacaccaatatggcttctgctttatggtggtgttggcatctgcatagggctgtgggtttggggaagaagagttatccagaccatggggaaggacttgacaccaatcacaccctccagtggtttcagtattgaactggcatctgcccttactgtggtcgtggcatcaaacattggccttcccatcagcacaacacactgtaaagtgggctctgttgtgtctgttggctggctccgatccaagaaggctgtcgactggcgactgtttcgcaacatttttatggcctggtttgtcacagtccccatttctggggttattagtgctgctatcatggcagtattcaaattcatcatcctgaaagtgtgaagctggggttgaaatttttgtcagcatctgggaccatcacacacattcctgttcctagaagaatgctcacagtgttgccgaagacagacaaggggtctaaagtttgggagccatgggagggaagtgtaatttacactataattgcttttgtgctaaatatgacttgtctcaaaattagctatgtaaaatagccaggtttccattggttcatcctaaggtcccttttcttctggactatgaattcctgtacatatttctctacttttgtatcaggcatcaattccattatattttaatgttgtctgtaagataacttatgtgggttctttttaaacagccaggcagagccatttgatggcaagaactctgctttgttggcctcaccagcttcttccccaacatgcacagggatttaacaaacatgtaactgaagcttccctcgtagtctctcatagaaatagtcacggcactctgcctccctgtcagctgtagcaggttctgttgacatatgtgggaacttcttagagggccaagaatctttggcacagtgaaaataaaaatttatagaaacttctttgcaaacaactcctggacatgttgctaagaagtataaagacaaagcctcctggcggttgtgggtataccttttgagatttttggcagtgtgggatgggtgaatgaagtgcaatgtgaactttgggcaaattcaatgggacagccttccatgttcatctgtctacctcttaactgaataaaaagcctacagtttttagaaaaaaaaaaaaaaa

SEQ ID NO: 431 - DNA, 2919 bp, Cricetulus griseus
  modified_base (131)..(131): a, c, t, g, unknown or other
gcagtgtccggagcgggctggggggagcgagccggagagcggggttcagtaccttctcctctgtcccagccggagcccggagattcagtcagatcggaccctgtaaaaagctgtaaaaatgataacagagnaacccgatagcagaagggtcaactcttctgttggattttctgttttgcagcatacaagcaatgatccatattgctttgtggaattttatgaacacagagatgcagctgctgcattagctgctatgaatgggagaaaaattttgggaaaggaggtcaaagtaaactgggcaacaacaccaagtagccagaaaaaagatacttccaatcacttccatgtgtttgttggggatttgagtccagaaattacaacagaagatatcaaatcagcatttgccccctttggtaaaatatcggatgcccgggtagttaaagatatggcaaccggaaagtccaaaggctatggttttgtatctttttataacaaactggatgcagaaaatgcaattgtgcatatggggggtcagtggttgggaggtcgacaaatcagaaccaattgggccacacgtaaaccacctgcccctaaaagtacacaagaaactaacactaagcagttgagatttgaagatgtagtaaaccagtcaagtccaaaaaattgcactgtgtactgcggaggaattgcttctgggctaacagatcagcttatgagacaaacattttcaccatttggacaaattatggaaattagagtttttccagagaagggctattcgtttgtcagattttcaactcatgaaagtgcagcccatgccattgtttctgtgaatggtactacaatcgaaggacatgtggttaaatgctattggggtaaagaatctcctgatatgactaaaaacttccaacaggttgactacagtcagtggggccagtggagccaagtgtatggaaaccctcaacagtatgggcagtatatggcaaatgggtggcaagtgcctccctatggtgtatatgggcagccatggaaccagcaaggatttggagtagatcaatcaccttctgctgcttggatgggtggatttggtgctcagcctcctcaaggacaagctcctcctcctgtaatacctcctccaaaccaagctgggtatggaatggcaagtttcccaacacagtgagctgggactctaaacacaattgtaactcaccataggctgcagtttcctgtgacactctgaagacatgaaaagtaaacatcggaaagtgaaaatatttattttaaaaattgaaatgttggaacctttagcacagctttgcttggtgaaggacacgtgtcttctagttctgcctttttaagtttttgttcatgatggatatgaacatgatttttctttgtgtacaaaaactaaaataaagtcaataaagacaattctgactaaattttgatataataggagaaatgggtaatacgttttgattcttagacactattccgtttttatcttgctgttcagtattttaactcactgtgtttttaaaagagcaaaaagggagtgggaggtgtgtgggtgacaagcctgaacaggcctgagttgtatgtgtgcagtttgtaaatgaatcaatgcgttgggaaggtgcaggagttccagttgtgcttccacggcctttttcagtctatgtggatacagtctgcctcatatttctttaaaatgggaatgtgacatagatagaatcctatgtgtttcagttgtgacagctagggggtgcaaatgttctgggagtgtattcaacctgttggcctgtgtatgcacaagagcaaacaaccccaacagttcagtggtacaggaggcaaaaaataaaccagtagccacaacaagcagcaaccaaagccaaagattaagataatgtggttttagatattgatgaccacaaaaattctatttcctcctttcttcacttagaaatatagccaaatgtattcagcataaaaatttacagggtctgaagttcatttttgagccaaaatcttaatgtacccccagtttttggggggttttttgtttttgtttttttaaaccactagcaatctctgttgttgtacttgtctatgactacatagactacctttgggggatgttctggaaaaggtactttatattttataagaagaaaacaagaagctatattctgccccaagttaagattttcattaacctttatgaaactcaaacatcctaaagattttctaagttgatgaattgataagagcttattaaattaaaatttcagtttgcgttcttttttcccctctgccagtaaactgtggcttattgaaataagtaatggccaactctagctgtagtcttttctgttatatattctgtgatttaataaaattatccagactagttacattgccatagtgagcatgtgactgacatgtcttaatttggatgaaggaaaaaaaaaaaaggtttcttaaataagtcagtcacagtcatttcacagcaaatagtttagtttaagatagaaagggacatgtaccaaaacaaaaatgcactattttagaaagtacaatgatcaagttaacacaggttcagactgtcttactacacagattggagtttgtgccgtctcggtccacttagcctaagaactgttgccttttccttcctgtgttcattaagaacagcggagagactctttggcatgcaaggaaatgtctcttcatagtttcttgagatttatcttggtgtgtttctgcctgccatcgtctgtgctcgaatccttttctactagcatttcctcggtgccagtccgtctgatctttatgtctgccggcagtgagaggccaactaaagccaaagctgtaaaccacagttgaagtaagtctttcaataaagactagactatgtaa

SEQ ID NO: 432 - DNA, 2919 bp, Cricetulus griseus
gacctgcgcgccctccgtgtcttacttcaagtgcgtgcagagggagattgtgccgtccatgcggaaaatcgtggccacctggatgctggaggtctgcgaggagcagaagtgcgaagaggaggtcttccctctggccatgaactacctggaccgtttcctgtctctggagcccctaaaaaagagccgcctgcagctgctaggggccacctgcatgttcgtggcctccaagatgaaggagaccattcctttgaccgccgagaagttgtgcatctacactgacaactctatccggcccgaggagctgctgcaaatggaactccttctggtgaacaaacttaagtggaacctggccgccatgactccccacgatttcatcgaacacttcctctccaaaatgccagaggcggatgagaacaagcagatcatccgcaagcatgcgcagacctttgtggccctctgtgccacagacgtgaagttcatttccaacccgccctccatggtggctgccgggagcgtggtggctgcaatgcaaggcctgaacctgggcagccccaacaactacctgtcctgctaccgcacaacgcactttctttccagagtaatcaagtgtgacccggactgcctccgcgcctgccaggaacagattgaggcccttctggagtccagcctgcgccaggcccagcagaacatcaaccccaaggccaccgaggaagagggagaagcagagggagagactgacctggcctgcacacccaccgatgtacgagatgtggacatctgagagccaccgggcaggcgggtgccaccaaggagtggcaacccgcgatgaggaaggagccagcccggggtgctcctaatgatgtccctcttggggacattttgttaccagaaggggaagttttgttctctttgttggttgtttttctttaatctttctcctttctatgtgacttaagcaaaaaaaaaaaaaatacctgaaagctctctagagagagagatagagatagaagggataagatagtgacatcatatattctatttttgtaaccttcctattttgtagttcctgtttaaagagacgctggtttttgcctggcggccctgcagcccactcacatcaggttaaacccacagcttttctttcgtgtgtgtggttctgttttgttgtgttttccttctccgtgttccaaatcattccatttcaaagcactttcggtcagctagctggaggcagtgttgctggtatgtgtgtgaggggggagttcctgatggaatggttggaggatatccacacattcattcagatggctgcacagtagggctagtagcatggggtgcttgggaagttttgttgggtcaagaagagagagctctgttcttgcaccgccaggatctgtcctacagaggagtttaagggatcctttggtgccagctagtgtttggaagtaggaactatggtggcgttacctggacagtgaggagattctggatgacttttttaaagtctttcatacaggaggcttttaaacactaaaatgtctaatttatacttaaggctacagaagagtatttattggaaaggttgcccatggccagtgtgattttataaagcaatgtgatctcccttgattcaaacatacaccttctgcccttgctggtgaaggtttagtgccatgtttgagagattggtcttttatgggtaaggggggggggggcagttttcaaaaactacataaagacgggcatttggtttgcttaactttccaaacccaaacggccccattggagagccatccaaactgaggaaaactggggggtcccaaatgagttggattccggcacattcttgccgctgccacccctgtcccccacaacagtaggtaattcgtatacctggttctgtgcttttctatttaggagagaggacgcgagggaagaagtgtggagggtagggaccacatgggacagacctgcggctcctgctgctaccgatgacgcccccacatcccagacgttcagaaccagacttgtgtcgctttgtgtctttcacattgttttcgctgctattggagggtcagttttgttttgttttgttttactaatgtcatagactgccatgttcaagttttaatttcctcatagaagattgtatttacagatgccctttttttgtacttttttaaaaaattgtgatcaattttggcttaatgtgattaccgctgtattccaacaacaaaaaaccaccaggttcctgttcacaatacctcatgtttcacctagccatgcacgggcctagcaggcaggtggtctgcctccagagactggtctggtgggatcatcctcctacacctgtcatgctgggcccttcatttgatctgggacatagagcatcacagcagtcgggacaactgtatttttctttgttaattatcaatattgttatttttgtagcggcctgttgtgcatgccaccatgctgctgggcccggaggaatcagttctgagtctccggtgcatcattgattctgttaggttctagtgttctgtcttgttttgtgttaattacagcattgtgctaatttaaagacttcagccttggcaaagccagctccagtgctgcaggcctccaaattccctagctagctgccaaaccaaaatggtcacctccagcctagctgaggcatctgaaccgggcaggacccttgaggcccactgtgttcatggtgatgggtgagggtctggccaaaaggccaaaggctggtggtgggtccacggagtctgccctgtgacatgaaaggctttgaaggggctctggctggtggccaggttgggtttgtgtatttctggttgacataccatggcgcttcccagcacggacatgtgaccagcgtggtccagacaaaaaaaaaaagaaaaaaaa

SEQ ID NO: 433 - DNA, 2916 bp, Cricetulus griseus
actggaaattaagccgaagagccttactcagtcaaaatggaacgttttgtagtaacagccccacctgctcggaaccgttctaagactgctctgtatgtgacccctctggaccgagtcactgaatttggaggtgagcttcatgaagatgggggaaaactcttctgcacttcttgcaatgtggttctgaatcatgttcgcaagtctgccattagtgaccacctcaaatcaaagactcacaccaagaggaaggcagaatttgaagagcagaatgtgagaaagaagcagaggccgcttactgcatctcttcagtgcaacagtactgcgcaaacagagaaagtcagtgttatccaggactttgtgaaaatgtgcctggaagccaacatccccctggagaaggctgatcacccagcagtccgagcattcctgtctcgacatgtgaagaacggaggatccatacctaagtcagaccagctgaggagagcctatctgcctgatggatatgagaatgaaaatcagctcctcaactcacaagattgttgacaaggcagttatgaccattgtgatcaagataaataatgtggagtattaaagttaatgtgttgattgtgtggttctattttattatttatttcatttaaaatcatgtgatacagagtagttttgcaatgtgtatatagttgcaggacaaaaaaaaaaaaggtggttatctttaaaactgatgggttttctcctgaaatgtttgtgcatggaagaactaactaccctgaattgtagccctgttgccatgtatgattatttcttgtgaggttgcttaattgtttgggttgagaactagcctagaaaattgaagctgctgccaggctatgcccatcacaggaacttaaagaagtttaagttctcttcaaaaatagaatggaaggcgggaaatcttagagcttgcgatctctaggagaaataactgttcaaaactacattttatttgtatgtgaaataattgcctaaccttcacttcctctgggattcaaggcgtgtatcaccacgcccagcaataacttgtgtttttaagaacagcttgtcttaagggtcttttgtagatttaacatccccaattcaggttgtcaaagtgaccacttgcttctttctattttaaaagcctgctatggaagaaaaaaaaacagttctcaaaatttgtagtttccattttctaatgtttggttagattcatgtagcacataaatgcctagactaattgtttactaactgtagtcggtaaaacacagacacagcagcagaatataaaaatgtaatgcttctacttcctcaaagaaagaatttgcaggcaaccatgtttaaattgtcttacgatgataggacatctaagcaactaaagaaataattgagttttgtacccctattttcagaataaaaccaatcattctaattttttaggattccatgtgatttggactattccctattgtctgggactatgcactatcagtaaacatggcagaagagcttctagtaatctagtaacatgtttgatgttgcactaggaaaacaattcacctttgcctttcttgcagttattactgacttcacagtcacttagttcctctagaactgcttttccaagcttgtttcttcactgattatgaaagtttgtttcttggaactggttaaatttgtctcataaataataaaagtggttatagtagcctgctgaaactagtaaagatttgcaaaactatgattggcatgttagataacaaatgagactgtctaaggcatgtgctacttgggaggcaaagtgatcgtgtgtacagaagctttcaatcttagttatataatagtagtattgatgctatactattggaccaatagccgctcttttttataagttggatgcattattacaagctttgtaatgtttcatttataaactgccttcaacacatgcttacctgttaatgttttctcagagtattgtatgtcttccggaacctcacctcactatatcctgacagtaaatagttctagcttgttgaattttctgttggtttctttttcattatctgtggcatatagcaagcctgaaagaaattgtaatcagtttttaaagagtgagaaattagaaagattgtgtatgagagcctatatagttattttatccattatctctaaggctttcaaatattatttagtaaatgctacttccagttaattgcctgtggccctactgaattttaagggaccagaaaactttcaacaagttttacatcttactatgtaaacagttaagtgtctgcttgggaatgttctgaagttggacatacagttggcaaggtttccaagctaaaactttggcctgaaaagaatttgtacatgaatgttagcaaatacataaaagcaaattcaatttaagatgacctaaagcaaagactagagacaagttttcatttggttcttagtctttgtaagggctttctgtgtttgacttacctcaactgccattaatgaggacagatcaccttaaaataattgattcacgtggaaggttagtcctatagtttccaaatagaatactttggcttttggtcagcagggatgaaaatgagaagtggctatcttaaaccttggatgatctcaacccatattcaaagatcgctgaggtaactccggtccttacctagtgctattctacttgtatccagaatactgtatataaaattttactatgttaattttcgtcttcctgtgtctttattttttacttttgctcatgcacgtattttagtatgaatgtgttgctttttaaaagtttgtgacatttagaaataaatttaaaaaaagttaaaaaaaaaaaaaaaaaaaaaaaaaaaaaaaaaaaaaaaaaaaaaaaaaaaaaaaaaaaaa

SEQ ID NO: 434 - DNA, 2913 bp, Cricetulus griseus
tctgagaggaaaagctttcattgtggagctccggcagttatctcgtgtgaaccatcctaacattgtgaagttgtatggagcctgcttaaatccagtatgtcttgtgatggaatatgcagaaggaggctctttatacaatgtgttgcatggtgctgaaccattgccttactacactgctgcccatgccatgagttggtgtttacagtgttcccaaggagtggcttatcctgctacagcatgcaacccaaagctctaattcacagggacctcaagcctccaaacttgctgctggttgcaggaaggacagttactaaaaatctgcgattttggtacagcttgtgacatccagacacacatgaccaataataaaggggagtgctgcttggatggcacctgaagtttttgaaggtagtaattacagtgaaaagtgtgatgtcttcagctgggggtattatccctttggggaaagtgataacacgccggaaaccctttgatgagatcggtggcccagctttccgaatcatgtgggctgttcataatggtactcgaccaccactgatcaaaaacttacctaagcccatcgagagtctgatgacccgctgttggtctaaagatccttctcagcgcccttcaatggaagaaattgtgaaaataatgactcacttgatgcggtactttccaggagcagatgagccattgcagtatccttgtcagtactctgatgaagggcagagcaactcagccaccagcacaggctcattcatggacatcgcttctacaaataccagtaataaaagtgataccaatatggaacaagttcctgccacaaatgatactattaaacgcttagagtcaaaactgttaaaaaatcaggcaaagcaacagactgaatctgggcggctgagtttgggtgcctctcgtgggagcagtgtggagagcttgcccccgacttctgagggcaagaggatgagtgctggacatgtctgagatagaagctaggatcattgcgaccgcaggcaacgggcaaccaaggcgtagatccatccaagacttgactgttactgggacagaacctggtcaggtgagcagtaggtcgtccagtcctagtgtcagaatgatcactacctcaggagcgacctcggagaagccagctcgcagtcatccatggactcctgatgattccacagatacaaatggctcagataactccatcccgatggcatatcttacactggatcaccagctacagcctctagcaccatgcccaaattccaaagagtccatggcagtgtttgaacaacattgtaaaatggcacaggaatacatgaaagtgcaaactgaaatcgcgttgttactacagagaaagcaagaattagttgcagaattggaccaggatgaaaaggaccagcaaaatacatctcgtctggtacaggaacataaaaagcttttagatgaaaacaaaagcctttctacttattaccagcaatgcaaaaaacaactagaggtcatcagaagccaacaacagaaacgacaaggcacttcagtgattctctgggaccgttacattttaaaatatgcaaagacttttttttaagaaaaagacaaacaattatgacaagtcatgagtgttagctttttggcgtgttctgaatgccaaatgcctctatttgctgcatttgttatgtcatttatttctttttatggtggatattcagtccactgtcctgttgtgtaggatgatagcacctgtgtcctggaaaggcaagtgttctcagcttcaggcacatgcagtgaacgtggctggatatgcatgcccctggtgtgagctagctgacaggtggggtatcacactagctcctgtgcacaagaatcatccttttctccatagtaaaaggtggaaccttgaggattttcttcttagagctcatctcaaatgctgtttttccaaaagatagtatgcatcaacataacgacagggtaagctgtgcttaatgaaagcaagttcagtgatttttcattaggctgagcatcgtttatgagcaatgaatgtgtgctcttttacagcctgaggattttcgaatctgtgtagacagaagcttttctgtcttttaatattagtatccgagaaaattgagagaacatggtctagcttaaatgatccttcttacaacaattaccgaattttgttatgataaatttaaagaaaattgtaaaataatagaaacataaatgattggcccagccaaaagcagacaagtcaggaggcctgagtaaggaagatgaagtgaaaataaacccactttctggagatatttggaggattgatttctctaagtccgatctggaatgactgctgccttcccatgcttttaagagaatttcaacacttacaaagaaaatatttatattgttaacaataagtttactaccaaccttcagaataactaaaaggtaaataataaaataccattaaagaaaaaaatccctaagctctattttttcagtccatgttaccacattttgataccaatccaagcagaatgtcctttaaataaggctgccatcagtgttgtttttgtagtgttcatgtttataaagagaacacttgggaactgaaagcatgatggctgcctgtggtccttagatgtctatagtgcccctgctctgttttagatgagcacgagaagctgtcaaaactgttaaatgctgacgtgggtaactcctcttccattactttctcctatctgagtttataacaaatccctctgtatacacataaaggtaaggaacagtatatagtaacatgtgtcctttctcaatacctgttactaggaggtctacctgggagctaaccttcccggtgtgtgtgtgtgtgtgtgtgtgtgtgtgtgtgtgtgtgtgtgtgtgtgtagt

SEQ ID NO: 435 - DNA, 2913 bp, Cricetulus griseus
cacaataatggcggctgctcccatatctgcactgacctcaagattggctttgagtgcacatgtccagcaggcttccagctcttggaccagaagacctgtggcgacattgatgaatgccaggacccagatgcctgcagccaaatctgtgtgaattacaagggctactttaagtgtgagtgccaccctggctatgagatggattcacagaccaagaactgcaaagctgtagctggcaagagcccatccctaatctttactggtctgactgggggttccaggcaaagatcgagaaatctgggctcaatggtgcagaccggcaaacactggtttcagacaatattgaatggcccaatggaatcaccctggacttgctgagccagcgtttgtactgggtggactccaagctgcaccagctatccagcattgacttcaatggaggcaacagaaagatgctgattttttccactgacttcctgagtcacccttttgggatagctgtatttgaggacaaggtattctggactgatctggagaatgaggccattttcagtgcaaatcggctcaatggcctagaaatttccatcttggccgagaacctcaataatccacatgacatagtaatcttccatgaactgaagcagccagcagctgcagatgcctgtgaactgagtgcccagcccaatggtggctgtgaatacctgtgccttcctgctcctcagatctccaatcactctcccaagtacacatgtgcctgtcctgactcaatgtggctgggcccagacatgaagagatgctaccgagcacctcagtctacctcaactacaacgttagcctctgctatgacaaggacagtacctgccaccacaagagccactggaacaactatccatgaccctacctaccagaaccacagtacagagacaccaagctggacagctgctgtcccaaactcagttagtgtccccagggctcccagcatcagcccatctaccctaagccctgcaaccagcaaccactcccagcactatgggaatgaagacagccagatgggctcaacagtcactgctgctgtcattgggatcatcgtgcccatagtggtaatagccctgctgtgtatgagtgggtacctgatctggagaaactggaagcggaagaacaccaagagcatgaattttgacaacccggtgtacaggaaaaccacggaagaagaagatgaagacgagcttcatatagggaggactgctcaaattggccatgtctatcccgcagcaatcagcagctttgatcgcccactgtgggcagagccctgtcttggggagaccagagacctggaagacccagcccctgccctcaaggagcttttggtcttgccggggaaccaaggtcacagctgcaccaactcccgaagaaccctctttccgagctgcctgtcgtcaagtgcaagcgagtggcattaagtcttgaagatgatggactgccctgaggatgggaccacccacgtcgtacctcatggagttcagtcctatgcactactctctctggatggggtgtgactggatgatgaatgccatttctatatatgggtctgtgtgagtgtgtgtgtgtgtgtgtgtgtgtgtgtgtgtgtgtgtgtgtgtgtgtgtgtgtgtgtgtgtgtgtgtgtgtgtaactttttttaaatttatgttgcggaaaggtaaccacaaagttatgatgaactgcaaacatccaaaggatgtgaaagtttttatatgtataatgttttatacactttttaactggttgcactacccatgaagaattcatgggacagctactgctgagtgactaacatgatgtatataaccaaacgggggccaatggtacaaactttactcatcatttgaatactatatttacagaggatgtttgatttgagggcttttttaagtttgaggggcttggtttttttgtaaataaaattatgctttgtggctatccatcaacataagtataaaaagaaaggacacttcaactcccttcctcatttagattatttattaacatatttcaaaagtaaggttagctctataaataatttagagaagtgagagtatttatttttggtatgactggcccactgcacagactctgtgtttatgtgtgtatgtctgtatgaaagaaaaaaatctgtagagaagaggcacgcttatgactattgttcaaatacataaaaacaaattattttaaaatggtccacaagaggggtgtctggtttccagagacaccttcagaaacatcattcagaaaatagatgccacagtttgcacacacatgtggcagaaagggtagatatgttctcctctggctacccctgaggacttggtgagctaacaagaagcttttcagctcatccatggctgtcatgacaccacctaggctttctgatctgtggcttaggtcagtgtccagaagcctccaggagctcaagatagcagagaaaatactaaacatgtttcttaagggtatcccagtcacagtacaattgggtgctattgggtgaaggagaaaacaactctaatcctacagcaatacaaagaccactcccaccctgacacactcaccacttcacaaaacatcagtaagttagtaatttctaaatatataatttccttccccataaatgcatgaagatagagtgtcagagtctccttacactatatttttagggtatttaggaattttcaggacgtgaagaatttaaaaggtgaaggaaattaaagctccaaattttcagttaactaaaggaagcttcacacagactgttcaccatgtgcacagttttaagaatcagcaggaaccgcatttgcaaacattttgtgctctcaaactaaattttaaaaaagctacctgtataaatatatatatatatat

SEQ ID NO: 436 - DNA, 2912 bp, Cricetulus griseus
gtaacgccattaccgccggagccaccgacagccctagcggacgcgcggtggacgctgaccggccgcaccatgagactccttccccggctgctgctgctgttcctgctggccttccccgccgccgtgctgctccgcggcggccccggagggtcattagcagtggctcaagatcttacagaagatgaagaaacagtggaagattcgataattgaagatgaagatgatgaagctgaagtagaagaagatgaacccacagatttggcagaagataaagaagaagaagatgtgtctggggaaccggaagcctcaccaagtgcagacacaactatcttatttgtaaaaggagaagattttccagcaaacaacattgtgaaattcctggtaggctttacaaacaagggaacagaagattttattgttgaatcgctggacgcttcatttcgttatcctcaggactaccagttttacatccagaatttcacagctcttcctctgaacactatagtaccaccgcagagacaggcaacttttgagtattccttcattcctgcagagccaatggggggaaggccttttggtctggtcatcaatctgaactacaaagatttgaacggcaatgttttccaagatgctgtcttcaatcagacagttacagttattgaaagagaggacgggttagatggagaaacaatttttatgtatatgttccttgctggtcttgggcttctagttgttgttggccttcatcaactcctagaatctagaaagcgaaagagacccatacagaaagtagaaatgggtacgtcaagtcaaaatgatgttgacatgagttggattcctcaggaaactttgaatcagatcaataaagcttctccaagaaggctgcccaggaagcgggcacagaagagatcggtgggatctgatgagtaaatgttctgtgtgcaacagttcagtctgtgcttcccctgccctaatgtgtttcggcctgatgggaattagtgcagagaagccatatcaccacagaaggcaactactgcttaggtgtggactgagcaatcagagtctgtggcgatactattgctgaaaaagcactgcatttggttttctaaagtaacaaatttggggttttttttttttttttttttttttaaaccattaaactgtgtgggtgtgaatgtctgagcagttgtcttaccagaatcactgttaaactacctgaaacacgcctttagaatactcagcaaaacgctgttgccgcttcccttgtgatattttctgatttttgcccccaagctcaattaatgcttgtccccagtgtggttttagatgttctgccatgaattattttgaggaaacaatttgtttatttcttggaatctatcaaatccaaacggatggcacaaactggccttttgcttgctgtctgctgcagcttctattctaaaggcaggagcaggagtggctgctgtctgagcagcagaggcatgttggctgcttgctgctgtttactgtgtgcacaccttcaagaacttaccaatggagtcaaggaactttggaatctctagcaacaaaattgtaaaacctgacaattctactgatgctggtatataaatcctaattccacgcctgtttttgttttgttttgtttttaacaaaaaatagtctgtctgtgcaaactgggctgttgtgttgtctatcgttgtgtgtgatctgggagagctctggactgacctcctttctttgcttctttgcttgtttgttgttggctctaacagagtgtttgttcttaggaatcggcctaagagaaattatcctggtctacagaccaaggggatccaattttagaggcagggatacattttagttaatcctagtctacaagaccattaattggaaagtttcaagggttacgaggtttatcttttaacctgatctttggggttttgaggcctgaggaactgtatggtttttgactcgatgtaatataggagacccttctcattctcaagaaacattttccagaaccttctgtgaatatcaaagtttgttagctactgtaacatgctacagtaaggtataagtaattaaaacctttaaatggcccgtagagtttgactaaacacctggtagaaacattggcagttgcagaaaccacacttacagctgccacgctcttatcccggagtaaattgccttatacaccagctctttgtttctgaggcccagattagagcctcaggagtgtagaatgtattactttttagtggagactagggacagctgataactcgagtcttcaagtgccaggcgtctactatagcatcagtaagtatttagcagaaactaactccataatgaatggaattcaattccacacatggtttgttcaagcacacttaataagtagtctacttttaaatgtctttttaaaatgtaaatatttggatgaagcgttttttttgtttaaggcaggtggctctttgtgagtttgaggccagcctggtctccagagtgagttccaagatacacacacacacacacacacacacacacacacacacacacacacagtcacgctgtatgttcctcacaggaaggtcacttgactacaggctgccaacttggagaatctgactttataactcatgttttcagtctcctgagaaagaaaaaacttgctctgaagatcagaaaaagcaaggactgcacgaaccagtattttaatgttttcctctaaatgcttggaacagtattaaagttcagattaacctttaaatgctaaacctagggagagacataccaaaatgctgatgcagtctttgtgctagggtggggaattcttttccttttcaaaatgtttgtaaagtgcttatattttataatgaaagcaataaatatgaatgttgacttta

SEQ ID NO: 437 - DNA, 2904 bp, Cricetulus griseus
accaagactgcagtgttctttggacgctcatgaaatttgcctgcaagacattcagttggatccagaacgaagcttgtttgaccaaggagtgaaaacagacggaactgtacagcttagtgtacaggtaatctcttaccaaggaattgagccaaagctaaatattcttgaaattgttaaaactgcggaaacggttgaagtggtcatcgatccagatgcccaccatgcagaagcagaagcgcatcttgttgaagaagcccaagtgataacacttgacggcaccaagcatatcacaactatttccgacgaaacctcagagcaagtgacgagatgggctgctgcactggaaggctacagaaaagagcaagagcgccttggaatcccctatgatcctatacagtggtccacagaccaagtcctgcattgggtggtttgggtaatgaaggagttcagcatgactgatatagacctcaccacactcaacatatcgggaagagaattatgtagtctcaaccaagaagatttttttcagcgggtccctcggggagaaattctctggagtcacctggagcttcttcgaaaatatgttctggcgagccaagaacaacagatgagtgagatagttaccattgaccagcctgtgcaaattatcccagcatcagtgcagtctgctacgccaactactatcaaagttataaacagtagtgcaaaggcagccaaagtacagaggtccccaaggatctcaggagaagacagaagttcacctggaaacagaacaggaaacaatggtcagatccaactgtggcagtttctgttagaacttctcactgacaaggatgctcgagactgtatttcttgggttggtgatgaaggtgaatttaagctaaatcaacctgaattggttgcacaaaaatggggacagcgtaaaaacaagcctacgatgaactatgagaaactgagccgggcgttacggtattattatgatggagacatgatttgcaaagttcaaggcaagagatttgtgtacaaatttgtttgtgacttgaagactcttattggatacagtgcagcagaactgaaccgcttggtcacagaatgtgaacagaagaaacttgcaaagatgcagctccatggaattgcccagccagtcacagccgtagccctggctgctgcatctctacaaacagaaaaggacaattgaaacctaggacctcctgggcatccatggcttttcttaaatatttggagcaagctttgctctcacctttattactgaatttgaatcttatttctagactgtacaatctgatgcatgattttttataaatatttcatactcttgtgaatttggatctttttactttgagcatatattttagaaaatgtatagtaaaggatctccgcgatgcctgaaatgtgagagtgggttcatcgtggggtagtttgctaacagtcaggaaagctaaaactggtcagtattaatgtctagccctaccaaaaaacagccaaaggaattctcagctaagcatgtgtgcctgtctcacctaatcaagcagagctagatgttcatatcaaataaaattatatggataattactgaactatcaggttattaatttatatatttacaaggaaagaagaggttaactggcagaagagagtgttgaatgagacccaggtttaaagctggcttaactcaacccattattaatggttttctgtatagtttattcattatgtcagaccaaggacttaaattattttgagagaggtgtttaattctaatgaaccagctattgcaaaaatttcaaaatgataccattctttcagattttaaaaagcatacctcagtaagaaaataaaaatttggtttagtttgacttcctatttttttttaaattaatctatagtagcagattattatgcaataccaattatatattcattcctgtgtttgctaaaatgaagactttagatcagactccgtctccacttagataaaaaatatttgttatccttatggggccacagtttgctagtcttttattataaaaacaactcaagttgtacaagaaaatattaattttgtggtattctttgctcagttttatcatacacttttcatagaatttaagatacagtcaaacaaaaagaacataaaattgtttgaccatcttttgtaccttgtaagttcaagagtaatgaaacgttcacttttgttttaaaacagcttttccatgtgatgttttcatggagctcattttctctgtgtgctagcctgaagtctgagctagcctgaagtctgaacattgtattggcattggaaaagtccagctagttaggcagaattgctgtgtgtgcttgatctctacatgatcaattaactggttacattcattttggtgtcaatccatgtaaataaattaggaagaaatatttaagttttctccccagataaatggtgatgctcgagtatgattatttttttaaaggagtgtacctctaaatatttttggcaagttctgtcgttttctgcatttgccatttatgctactgccttttgtaaagaactagtgtatccttgagatagcacaaaaacgttttaaaatttatagctgcaaaacaaacctgtgactgacttaatgtcttcggatctaaaggctataaaaatgttatttcaatatttcacttattcccaagaaaaaagtattctcagtcttttgtagaagggaggagaatttttgcatacatttttactctttaaataaagacacttatactatcataataacaattatgtatttctttgtttttttgtaattttacataaaacagttattttctattttctatttactcagataaaatatttgtgcataaaatgtaaaaatagtaaatgagaaaaat

SEQ ID NO: 438 - DNA, 2904 bp, Cricetulus griseus
tcccacttgttcctcttgctcctcgtccttggcaagcctgagttctccatttctaggcttaacacccatccactcccttgacctcttccgggtctcctggctgcagccatggagttacagaagggaaaggggaccgtagcagctgctgcatcaggagcagcgggaggtggaggaggaggagcgggagcaggagccccaggagggggaggctgctactttcaaccagtttggatgccaaggatgagttagaggagaggttggaaaggtgtatgagtattgtgacgtcgatgacgacgggtgtctctgagcgagaagccaacgatgctctcaacgcctatgtatgcaaaggaccccccagcatgaggagatctgcctcggcctgtttacccttgtcctcactgagacaacatgcacgtccaacgttgctgcctctaacgccaagctggctttgttttatgactggctgttctttagcccagacaaggatagcattatgaacatagagccagccatcctggtcatgcatcactccatgaagcccccacccagccatcactgccacactcctggacttcatgtgccgaatcattcctaacttctacccaccattggaaggccacgtgcggcagggtgtcttttcttccctcaaccacattgtggagaagcgagtcttggcacacttggctcccctatttgacaaccctaagttggataaagagctgcgggccatgcttcgagagaaattccctgagttctgcagctcaccctccccgcccgtggaagtcaaaattgaagagcctgtttccatggaaatggacaaccatctgtcagataaggatgagagttgctatgacaatgcagaggcagccttcagtgatgatgaggaggatctcaatagcaaagggaagaagagagagttccgcttccaccccatcaaggagactgttgtggaggagccagttgatgtcaccccctacctcgatcagttagatgagtccctaagggacaaggtgttacagctacagaaaggaagtgacacagaggcccagtgtgaggtcatgcaggaaattgtggaccaggtcctggaggaagactttgactcggagcagctgtctgtccttgcttcctgcctacaggagctcttcaaggcccactttcgaggggaggtgttacctgaagaggtcactgaagagtccctggaggaatctggtaaggaaacctctctacctaatatttaggaacctgtgtcagatgcaggaggacaacagcagcttctcgctgcttctggaccttctctccgagctgtaccaaaaacaacccaagatcggctatcacctgctctactacctaagggcaagcaaagctgccgcagggaagatgaacctgtacgagtcatttgcccaggctacccagctgggcgatctgcacacctgcctaaggatatgtgcgcctgctctgccacctcacaccatccatctacacagagtttccagacgagaccttgaggagcggggagctgctgaacatgatcgtggctgttattgactctgcacagctccaggagctggtgtgccatgtgatgatggggaacctggtcatgtttcgaaaggactcagtcctcaacatactcattcagagcctggactgggaaacctttgagcagtactgtgcctggcagctcttcctggcccataacatccccttggagaccattatccctatcctgcaacacctcaaatataaggagcacccagaggccttgtcctgtctcctgcttcagctccgaagagagaagcccagtgaggagatggtgaagatggtgctgagcaggccctgccatcctgacgaccagttcactaccagcatcctcaggcactggtgcatgaagcacgatgagctgctggcagagcacatcaaggccctgctcatcaagaacaacagccttccccgcaagaggcagagcctcaggagctctagcagcaagctggcccagctgaccctggaacagatcctggagcacctggacaatctaagactcaacctggccaacaccaagcagaacttttttagccagacaccaatcctccaggcgcttcagcatgtccaggcaagctgtgacgaagcccacaagatgaagttcagcgacctcttctccctggcggaggaatatgaggactcttccactaagccacccaagagccggaggaaggcagccctgtccagccctcgaagtcgaaagaatactgcccagccccccaatgctgaagaagagtcgggctccagcagtgcttcggaggaggaagacacgaagcctaagcccaccaaacgaaaacgaaaaggctcctctgctgtgggttctgacagtgactgaagccaggtgttcccagctgcctcagcctgagaaacttccatgcagctccacccctcctcttaccccagggcctccagctcttttcatcccctctccactgctgctcccccggggcggttctcacagcagccagaagctgtgcaaaaccaggccatggtggaagtccttagcccttggctcctccagtctccagagagccatttgcagtctgtggacggtggtctattcaccagtgtgaaatgggcacctgacctggtgtgggcagtgcccatctgggcagatgccacagctctcagacacgaacctgatgacagcgtgagagccttttattgcacctgggacgcttgggttggcccaacattggcacttcaagctgagccagagcccaggggagtcccagaggcaagttcctcagaactgtcaaatggcctgatttctgtggttctgtttttgtctttttcttttggcaaagataatcgagttttaaaattgtttttaagtgataatgaaacaagccagagcatcttttgtgc

SEQ ID NO: 439 - DNA, 2903 bp, Cricetulus griseus
tgaaggaaaaagaaaaggtgatgaggtggatggagcagatgaggtggccaaaaagaaatctaagaagggaaaggacaaggacagtaagctggaaaaggccctcaaggcccagaatgacctgatctggaacatcaaagatgaactgaagaaagcatgttccaccagtgacctaaaggagttgcttatcttcaaccagcagcaagtaccatctggagagtctgcgatcttggaccgagtttgctgatggcatggcgtttggggccctcctgccctgcaaggagtgttcaggccagctggtctttaagagtgatgcttactactgcactggggatgtcactgcctggaccaagtgcatggtcaagacacagactcccagccgaaaggaatgggtgacaccaaaggaattccgagaaatatcctacctcaagaaattaaaggtcaaaaaacaagaccggatattccctccagagaccagtgccccagcgccgccggcacctccaccctctgtcacctccgcacccacggctgtgaactcctctgccccagcagataagccgctgtctaacatgaagatcctgactctcggtaaactctctcagagcaaagatgaagcaaaggccacgattgagaaactcgggggcaagttgacgggatcagccaacaaggcttccttgtgtatcagcactaaaaaggaggtggaaaagatgggtaagaagatggaggaagtgcaagcagccaacgtgagggttgtgtgtgaggacttcctccaggacgtggctgcctccactaagagtctccaagagctgctctccgcccacagcttatcctcttggggggctgaggtgaaggtcgagcctgttgaagtggcggcccccaaggggaagtcagctgcaccctccaagaagagcaagggccctgtcaaggaggaaggtgtcaacaagtctgaaaagaggatgaaactaactctaaagggaggagcggctgttgatcctgactctggtctggaacactctgcacacgtcctggagaaaggcgggaaggtgttcagtgccacacttggcctggtggacattgtgaaagggaccaactcctattacaagctgcagcttctggaggatgacaaggagagcagatactggatcttccggtcctggggccgagtgggcactgtcattggcagtaacaaacttgagcagatgccatccaaagaggatgctgttgagcacttcatgaaactatatgaagagaagactggcaatgcctggcactcaaagaacttcacaaagtatcccaaaaagttctaccctctggagatcgactatggccaggatgaagaggctgtaaagaagctgacggtaaaacctggcactaagtcaaagctcccgaaggcagtgcaggagctcgtcgggatgatctttgacgtggagagcatgaagaaggccttggtggaatacgagattgaccttcagaagatgcccttggggaagctgagcaaaaggcagatccaggccgcctactctatccttagtgaggtccagcaggcagtgtcccaaggcagcagtgactcccagatcctggatctttccaatcgattctacaccctaatcccccatgacttcggaatgaagaagcccccactcctgaacaatgcagacagcgtgcaggccaaggtggagatgctggacaacctcctggacattgaggtggcctatagtcttctcaggggggggtctgatgacagcagtaaggaccccattgatgtcaactatgagaagctcaaaactgacattaaggtggttgaccgagactctgaggaagctgaggtcatcaggaagtatgttaagaacactcatgccaccacacacaatgcctatgacctggaagtgatggatatctttaagatagagcgtgagggagagagccagcgctacaaacccttcaagcagctgcacaatcggaggttactgtggcacgggtccaggaccaccaactttgctggcatcctgtcacagggtctgcggatagccccacctgaagcacctgtgacaggctacatgtttggaaaagggatctattttgctgatatggtgtccaaaagtgccaactactgccatacatctcagggagacccgattggcttgatactgttgggagaagtcgcccttggaaacatgtacgaactcaagcatgcgtcacatatcagcaagttacccaagggcaagcacagtgtcaaaggcttgggcaaaacgacccctgacccttcggccagcatcaccctggagggtgtagaggttccactggggacagggatcccatcgggtgttaatgacacctgcctactatataacgagtacatcgtctatgacattgctcaggtgaacctgaaatacctgctgaaactgaagtttaattttaagacatccctgtggtgaagtgtgaggggtgtgctgcacccagcacccaagcctaggggtaaacttccccctggtgcctccacaccacagacaccacaaaacctcagccacaccgctgcctaatggtggcaccctcacccgatctccttagggttctatatagacaggttaaagggctctgggttcaagtcccttgtccgtgttgcactcggtgggagggttgttaggggttttatcctaccaggcatagccctgatagacacggctgacagtagagggaaagttggggagaggtttttgttttgtttgcctagactagtcttgagggggaaaagccacgtcacagccacaatgtctgccttactggttcccacagggaagggaaatgtgcttcctcccttttttcaaaggttcgtctttggtttgattttggcaaaatgttaagcatttattttaagctaaaaataaaaactaatttcatactaaata

SEQ ID NO: 440 - DNA, 2902 bp, Cricetulus griseus
accgtcagcacgcagcgcggccggtgtacattggtgaactcccccacggacttcctccgtactaacacccacacagcagcagcagcagatccagctggatgcccaggcagcccagcagctgcagtatggaggagcagttggcactgtgggccgcctcagcattactgtagtacaggcaaaattagcaaagaattacggcatgactcgaatggacccttattgccgtcttcgtctgggctatgctgtttatgaaactcccacagcacataatggtgccaagaaccctcgctggaataaggtcatccagtgcacggtgcccccaggtgtggactcgttctaccttgagatcttcgatgagcgagccttctccatggacgaccgcatagcttggacccacatcaccatccctgaatccctgaagcaaggccaagtggaggatgagtggtatagcctgaatgggaggcaggggctgccatgatgatgcacctcagcctgtggcctgatgccaactgtgtaccagcagggtgtcggctatgtgcccattgcagggatgcctgctgtctgcagtcctggcatggtacctgtggccatgcacccaccagccgtggctcctcagccccgctgtaatgaggaggacctcaaggctatccaggacatgtttcccaacatggacagggaagtaattcgctctgtgcttgaagcccagagagggaataaggatgctgccatcaattccttgctgcaaatgggtgaagagtcctagacccactctgtggcccttggcttcacaccactgacccttggacttgcccacccaaggctccccagggtcaccatccccaaaagattccaatgaaagaccatccacgtaccccttccttggacatctgtgccgccctttcccacctatttcggggatgcatgtggattgccaggacattagagtttgtacagcatctttctgagtcagtggatgtcatgaagttatttagcctaactgagatggtttgttgaaggtgcactgagctcatggtgcacttacttgcaggttatttttagaactttaaagctaaaagttccttccttctgatttcgtatgtgaacccaggccctcacctagtcctgggcccgtaagatatgcttcccagccataatccagcaggtctgacctcttgtctagtttacctgtcagtgtctggctaggcctcagccacaggaatccaatgggaacacagaaggtgtccagacttggctggacaggcctcaccttggccctcactgctagaggttgctttccacctccttctgttttgtaccagcactataggagttactctaggggccactcttgttgatagactgtcttcacacagcccagagtcaagtgaaggagagagatgggcaggtgtggcactatgtgtttactactaaaaggcattcagacattgtgatactactgacctgcagtagactctgttgatccatactgtagctcggcttgagtgataaaaatacccatgtttaaattaaaccttaatggaggtagagggtgctttttgtcaaatgtattgttcctaagtatttatttttgtaagcccaaaggcagtatgtggtgatggtgggcatgggatggtggtaacaagcacttttctttagttgtaggtctttaaaccttttaactgcaaaatggagaagaaagaccaatgtttgttaaatagattcaaccactcactgtaatccagccaggcacaggaagtctccattctagactcttgtgcttggtaagcagacgtcctcttgtagggtggatgagtcaagcaggacggaacctccttaagtggttcccttagtgtaaccagcagacttgagacactgcaaagcagaaatctcagcacctgtctctaggtctcaggttgcatcagcttctgccttaaggaggtaagggttgagcaaggaccacttcattcatgtgaggttctggagggagcatcaccatttgctgccaactcctgagcagcccccatggcactcagaggcagcattcactaacttgtacatgctcaaatggggaagagtgatggttttaagacagatttaagacttgagctgaatacagactcttccctttgtcatgaacattttattttttaatagattgaagaaagatcacattttataaggcctgagaccccactcttgtaagttttgtgctgtcttgtcttggaatttcattgtgtcagagcccatctagtataagagaagaagcatgcttgtcagtgcctgcctaggcatcagagcatgacttgcttagcctttcatcccatcctgggacttcttgagatgaaaagttgatacacctggaaggagtagctcaaaggcagaggccatagcagatacagacaggcttctcggtggggtctagactctcactgggtgtcattgctgctcttgccaagtttgaaaattcagagtggtagcaaagtttcacaaggtgatcactggagcccctgccctcaagcccaatctagggtgggcatgcatctgggtatagcccaggctaatttcttctctggacatgttggttggctgaagttgtaacctgctgcacgtctgtggtctgacgtggcaccatgtgaatgacacctacccaattgagagaagtgttgtgtgactgggttctgccctctccctcccaggtcactctttacagatactggtgtcatctgatgcactgtctggaggttggtggaaatggttctcagaactctatgtctgtggttatcttggggatggggtccatgtccagatttttctttgattatatgatatatttttacttttcagccttctaatttaataagtggtctatatataatagaaaaataaagtcctctaaggaaat

SEQ ID NO: 441 - DNA, 2901 bp, Cricetulus griseus
gcagcagctgctctcaaacgggctggccagtcagtcaccattgtggcccagtacagacctgaagagtacagtcgctttgaatccaagatacatgacttgcgagaacaaatgatgaacagcagcatgagttctgggtctgggtctctccgaaccagtgagaagaggtccttgtatgtcagggccctgttttgattatgatcggactcgagacagctgcctgccaagtcagggactcagtttctcttatggtgacattctgcacgtcattaacgcttctgatgacgagtggtggcaagcaaggctggtgactccacatggagaaagtgagcagattggtgtgatccctagtaaaaagagggttagaaaagaaagagcgagctcgattgaaaactgtgaagttccatgccaggacagggatgattgagtctaaccgggataatctctatgggaccagcatccagtcagtgcgagcagttgcagagaggggcaagcactgcatcttagatgtttctggaaacgctataaagagactgcagcaagcacaactttaccccattgccgttttcatcaagcccaagtccattgaagcacttatggaaatgaaccgaaggcagacatatgaacaagcaaataagatctatgacaaagccatgaaactggagcaagagtttggagagtactttacagccattgtacagggtgactcactggaagagatttataacaaaatcaaacaaatcattgaggaccagtctgggcactacatttgggtcccatcccctgaaaaactctgaagaatcccctccaaccattctcttgtgaacagaagaaatcaagcccttcttccctccctcctcttcattcctgtccccatggggagaacaaatgactactgttcttgtccccccccccctttttagatatgtcagaaattgagttttctagtcctgttcttttttaaaattttttgttttgttttagtttattttttgggatgatgccatctcactcatcatgtgactgtgcccattcctgcatggacctttcccacgcgctagcacaggtgcaaatccatcagagttgttttcataaacacccagcagaagcgaagagccaagaggaggactgatggaaagacagactctggacaactgcacagcttgtgaagtgagcgaaacagcccacaggatgaggtgctcccgggcatttctaccctgtactgctggcttgcagctctgaacgatgcaacgtaatggcaacagaaagtatcttatttatatatagatatatatatatatgtaatttatataaaatatatagaaattattatatatatatattatacactccactataatatatatatatatatattcacatacattgggactagaaaatctatggagctgtccatcaatggtacttactatgttattagagaaatgctttaattttcatattccaatcagatgacatcttatgttccacctggttgggaaggggttggcagcggtagtaagtgctataccaaagcactcactcaaatttggtcactctcttcagagctaaggtttgctccaagtgggccaacctgcagcatgagagaagggactttggctgggagtttgagattggagacttgactgaaagcagttgctgccccagcagggcaatcattcctgtgcagaaagagagaatgaatggctaatgatgctccggatgaaattgcctattgttttatgccgcctgatgtgtctgcatgagaggtttcctttttgttcatttttaagctgctgttaaaccaaaaccatgttgtgctactgtgtcagccttttcattattccaaattttacttttactatttaagtgaatgcgtagaatcctatttgccagtgttctaaaggcttgcaaggttctgaaggagtcaggcctgggatacagcaggtaacttaggcctggccatccagtcaacagagggaaagcaggggctggtgagggcagagaatagaagctggggctcagagttaccatgctggacttagctaggggttccttcatggggccactgacagggatagggaggtgcttgccttccggctctgtgctgggacagtggaagagcaccaggcttggccagccatgtattgagttggatttgggttcttttcttttgcaactgctccatttgccctaccccagccccctcaccaacagctggtagcttactgtttcttcaagaagaaagtagactttaatgctgtaaatttgagctgtagagctaagactcacttactggtgagctgtgaaatcttgttgcttttttcccagagtctgatggcagtgactggtccaggtagttttcctcccgccgccagtgcaggcagcaggtgtggtccaggccctaccccaccccactgtgctccttcgaagccaacgtgcctccctcacctccacactggagggatgatgcaggggagaacatagaattgcttggccctcaactgggttaggaccattgcaggtgacgcagtgttgttgacactttaaagcactaccagccacattcaggaactctctgttcacaggtatcctaccagcataatgaggctaactgtgacttgtggggcccagatttaggagaaagaaaaggcagcagctttctcttgggcagtacactggattgaaggcaaagagggataaagcgacagatgattgtgactctcatgagggggggtgagcagggagtgttgattctctgatggtaactgacatgtctgaataatgctcagccctccctcccagggaagaaaagcaaagattcaaagtaagcatgataatagttggtttaccagtgttccttccaaggagacatatattttttaataaatgatagttgcaatg

SEQ ID NO: 442 - DNA, 2901 bp, Cricetulus griseus
agctggcggagggagaagctggaggctggctgggagataaagggaagcgtcccctcagcccgcgctcgctcctcagccacgggctcctggagcgcgccgcggaggacgctggggccggtctgacccgcgccgaggaggcgcagccctcggcggggaccgatcggcgacatctgaggcccgtctcccacgccacctcgaccgccgccatgtcctccacctcctcctcgcccaaggaggagacgtacgaggaggaggaccgcgagttcgagagccaggccaagcgcctcaagaccgaggagggagagatcgtctactcggcggaggaaagcgagagccgccaggaagcgacgcctcaggcggggagcgacagcgacagcggcggcggcgacggaggcggcggcgacggcggcggcggcggcgacggcgaaggcgaggaaggtgacggcggagaagaaggtgacggcgacgacggtgatgaaggaggtagcggcggcgacgaaggctgcagcggcggcggcccccggagcatgccccagtccctggagggaggtggaagtcatcacaaagtttctgtttcccctgttgttcatgttcgagggctctgtgaatctgtggtggaagcagaccttgtggaggcgctggagaaatttgggacaatatgctatgtgatgatgatgccatttaagcgtcaggctctagtggagtttgaaaatatagatagtgccaaagaatgtgtgacatttgctgcagatgagcccgtgtacattgctggccaacaggctttcttcaactattctacaagtaaaagaatcacacggccaggaaatactgatgatccatcagggggcaacaaagttctcctgctctctattcagaatccgctttatccaattacggtggatgttctatatacagtatgcaaccctgttggaaaagtacaacgaattgttatattcaagagaaatgggatacaagcaatggttgagtttgagtcagtcctttgtgcccagaaagctaaagcagcactcaatggagctgatatatatgccggatgttgcacactaaaaattgaatatgcaaggccaactcgtctaaatgttattaggaatgacaatgacagttgggactacactaaaccttatttgggaagacgagatagaggaaagggtcgacagagacaagccattctgggagatcacccttcttcgtttagacatgatggctatggatcacacggtccattattgcctttaccaagtcgttacagaatgggctctagagatacacctgaacttgttgcttacccattaccacaggcttcttcctcttacatgcatggaggaagtccctcgggttccgttgtaatggttagcggattacatcagctcaaaatgaattgttcaagagtcttcaacctgttctgcttgtatggaaatattgaaaaggtaaaatttatgaagaccattcctggcacagcactcgtagaaatgggtgatgaatatgctgtggaaagagctgtcacacaccttaataatgtcaaactctttgggaaaagacttaatgtttgtgtatctaaacaacattcagttgttccaagtcaaatatttgagctggaggatggtacaagtagctataaagattttgcaatgagtaaaaataatcgctttacaagtgctggccaagcatctaagaatataatccagccaccctcatgtgtgctgcattattataatgtccccctgtgtgttacagaagagaccttcacaaagttgtgtaatgaccacgaagttcttccattcatcaaatataaagtgttcgatgctaaagcttctgccaaaacactctctgggctgttggagtggaaatgcaaaacggatgcagtggaagctcttactgcactcaatcactaccagatacgagtcccaaatggttccaacccttatacattgaagctttgcttttctacatcatcccatttataagaagagaagagcatgttagaatttatgttcatctttattacagttttaaagctaaacttcattaaaaataatctaaaatggttgatctaatgttgccttgcttactataagatcctcttctgtaataaacatattttgcctcaagtaaatttgttgttaacttaaatattgttttcaccttacgatagaataccataatgtagattgtctacaactttgttgcagatttatacaaacatatgatttctaacattacagttttgttccatggtaaaatatatttgcattcttagtgctaattatctgcaaatgttcttccattgtgtttgagattaatgcaggtgaaagtattgcattttaatacagaattcctacaatagatagattgattgaatgttatagttactcatattaaacataatcaaatttgggaatgacattgcatttgttggctctcaagaactacatacttagttgatttcaatttctaacaggcttaatagacacaaacacacttgtatagtatgcactcaaacccaattggtgtgtttcttttaaacagtcatcatccaatttgtattgacatgcttctgttcctagttccagtttgaaggttttataaagttataataataagttaatgtgttcatcttcattattttgcatgtgacctaatcttagaagtacatgtaatatttgacattgatatttaatactatagaagttaaaattaatgattcctcttctatataataatctggttccatagatgggtttcagagaacttgtcagacctcccaaaatgtgtgtagaatttgggattaatttgtcatttttattttcttaaattctttgaattttatttttgatcaaaacagctatttgtctcaacaccatttattaaacattctccctctgg

SEQ ID NO: 443 - DNA, 2901 bp, Cricetulus griseus
aggccgcaggaggcggcgagcagcggaaggcgcgtccggaggagggtggccatggtccagccctgaagtcatatcaacaaggccaacttgagaagctgcccacaatgaatggctctgaaggtcgccccgagttctatgacttcgacctcatcatcattggtggaggctcaggaggactggcggcagctaaggaggcagcaaaatttgataagaaggtgctggtcttggattttgtcacaccaactcctctcggaactagatggggtctgggaggaacgtgtgtgaacgtggggtgcatacctaaaaagctgatgcaccaggcggctttgttaggacaagccttgaaagactctcgaaactatggatggaaagttgaggacacagttaagcatgactgggagaagatgacagagtctgtgcagaatcacatcggctcgctgaattggggctaccgagtagctcttcgggaaaagaaggtctactatgagaatgcctatgggaaattcattggttctcacaagattaaggcaaaaaataacaaaggaaaagaaaaaatttattcagcagagcggtttctcatcgccactggggaaaggccacgctacctgggcatccctggagacaaagagtactgcatcagcagtgatgatcttttctccttgccttactgccccggtaaaaccctagtggttggagcgtcctatgttgctttggaatgtgcagggtttcttgctggtattggcttagatgtgactgtaatggtacggtccattctcctgagaggatttgaccgggacatggccaacaaaattggtgaacacatggaagaacatggtatcaagtttataaggcaattcgtgccaattaaagttgagcagattgaagcagggacaccaggccgactcagggtaactgctcagtccacgaacagtgaagagactatgcaaggcgaatttaacacagtgttgctggcagtaggaagagatgcttgtacgagaacgattggcttagagacagtgggcgtgaagatcaatgaaaagactgggaaaatacctgttacagatgaagagcagaccaatgtgccttacatctatgctattggtgacattctggagggaaagctggagctgacgcctgtggccatccaggctgggagattgctcgctcagaggctgtatgggggctccactgtcaaatgtgactatgacaacgttccaacaactgtatttactcctttggagtatggctgttgtggcctgtctgaagaaaaagctgttgagaaatttggggaagaaaatattgaagtttaccacagtttcttttggccattggaatggacggttccatcccgagacaacaacaaatgttatgcaaaaataatctgtaatcttcaagacaatgaacgtgtcgtgggctttcatgtactgggtccaaacgctggagaagtgacacagggcttcgcagctgcactcaagtgtggactgaccaaacagcagctggacagcactattggtatccaccctgtctgtgcagagatattcacaacgttgtcggtgacgaagcgttctgggggagacatcctgcagtctggctgctgaggttaagccctggtgtggatgctgccgccaagactacaggccactgccttgcttccttgcccacatctaggtgaagttcaggctcttgggctcttggcgcctgtccaaggtgctgtcctaaggccaccaggctgcagcatcacactggggtcaccttgacggactcagacagacattcggcagtgtatcagggagatacattcatgaagtcaccagcctcaagcccaaagtggtaggcagtgacagatcaactgtcggatctgttcagctagatctcccctttaggttgtgtaatcttgttttcaagctgtcttatgtcaattctagttttctttttttctccatggggtcagtgatactaaagctagggaatgttagcaatcagttttgtctaaaagcatgccgtggctggatagccacagtcttactgtgtggaagggggatgaattcatttatgaaagccacacacgtttgtcctgagaaagagcaattaccctatgactaaaatacactgttcattttactgacctgtgtagcttcgtctcttttaataagtcatatgtccaaaacaagaaaaaccatagtccactttttgcaagtttccaatttgctttaaacttcttgtttttgtaaggtggatttagttttaagcttctgtcccctgagaactacattcatagacaagtcgctttttccagacatagcatataactcttctgaggtaattacttttgtaaggaagctgttcataacataagttattattattattgaacgcaggtggatgtgaaggatttttattgaaaaaccaaatggtttttcctttttctgttcgaatgaacccatgtcctcacctgtagcactgagtggtgtttcacagtacacttctgggccacctcagggaacgtgtgtttgcctagtgttcagccagcagcactgtccctgccccacaaggctccctcatgacctcctcccatcagcttatgtgaaaacagtaggaagaggagagaggatggaacagagggagttgactctgttcagttttatttatttattttttaaaacttttcacccaagtctgccagtctctgagattagaacgacggtgtagggttaactgtgcctaatcatgttgtgattatcttagtggaatggaatgttctgcccccacgagaaggaatagtcttcattgtttatattctgtaatcgcacaatgtactgtaactccaattccaattccatgtatttttgttacaaattttctggggaaaaaatgtgaaacaataaaaggtgttcatgcaca

SEQ ID NO: 444 - DNA, 2900 bp, Cricetulus griseus
atgtcgctgtggcccgcgccggcggcatcgagacgatcgctaacgagtatagcgaccgctgcacgccggcttgtgtttcttttggtcctaagaatcgttcagttggagcagcagctaagagccaggtaatttctaatgccaagaatacagttcaaggctttaaaagatttcatgggcgtgcattctctgatccatttgtggaggctgaaaaatctaatcttgcatacgatgttgtgcagttgcccactggattaacaggcataaaggttacatatatggaagaagagcggaattttaccaccgagcaagtgactgctatgcttttgtccaaattgaaggagacagcagaaagtgttcttaagaagcctgtggtagactgtgttgtttcggttccttgtttctatactgatgcagaacgccggtcagtgatggatgccacacagattgctggtctcaattgccttcggttaatgaatgaaacaactgcagttgcccttgcgtatggaatctataaacaagatcttcctgccttagagaaaaaccaagaaatgtagtttttgtggacatgggacattctgcctatcaagtttctatatgtgcatttaatagaggaaaactgaaagttttggcgacagcttttgatacaacactgggaggcagaaaatttgatgaggtgttagtaaatcacttctgtgaagaatttggaaagaagtacaagctagacataaaatctaaaatccgtgctttattacgactgtctcaagagtgtgagaaactcaagaaattgatgagtgcgaatgcttcagacctccctttgagcattgaatgttttatgaatgatattgatgtatccggaactatgaatagaggcaaatttctggagatgtgtgatgatctcttagcaagagtggagccaccacttcgcagtgttttggaacaatccaagttaaagaaagaagatatttatgcagtggagatagttggtggtgccacgcgaatccctgcagtgaaagagaagatcagcaaattctttggtaaagaacttagtacaacattaaatgcagatgaagctgtcactcgaggctgtgcactgcagtgtgcaatcttgtcacctgctttcaaagtgagagaattttctatcactgatgtggtggcatatccaatatctttgagatggaattctccagctgaagaaggctcaagtgactgtgaagtctttcctaaaaatcacgctgctcctttctccaaagtcctcaccttttatagaaaggagcctttcactcttgaggcctactatagctctcctcaggatttgccctatccagatcctgctatagctcagttttcagttcagaaagtcactccacagtctgatggctccagctccaaagtgaaagtcaaggttcgggtaaatgtccatggcattttcagtgtgtccagtgcgtccttagtagaagttcacaagtctgaggaaaatgaggagcccatggagactgatcagaatgcaaaggaagaagagaagatgcaagtggaccaggaggaaccacatgctgaagagcagcagccacagaccccagcggaaaacaaggtggagtctgaggaaatggagacctctcaagctggatcaaaagataaaaagacggaccaaccacctcaagccaagaaggcaaaagtgaagaccagcactgtggacctgcccatcgagagtcagctgctgtggcagctggaccgagagatgcttggcctgtatacagagaatgagggtaagatgatcatgcaggataaactggagaaggaacggaatgatgccaagaatgctgtggaagaatatgtgtacgagatgagagacaagcttagtggtgaatatgagaagtttgtgagtgaagatgatcgtaatagttttaccttaaaattagaagatactgaaaattggttatatgaagatggagaagaccaaccaaagcaagtttatgtggacaaattggctgaattaaaaaatttaggtcagcctattaagacacggttccaggaatctgaagaaagaccaaagttatttgaagaactagggaagcaaattcaacagtatatgaaagtgatcagctcttttaaaaacaaggaggaccagtatgagcacttggatgctgctgacatgacgaaggtagagaagagcaccaatgaagcgatggaatggatgaatagcaagctgaacctacagaacaaacagagcctgacggcggatccagttgtcaagacaaaggagattgaagctaaaattaaggaactgacgagtatttgtagtcctataatttcaaagcccaaacccaaagtggaacccccaaaggaggagccaaaacatgctgagcagaatggaccagtggacggccaaggagatagtccaggtccccaggctgccgagcagggtgcagatacagctgtgccttctgatgcagacaagaagcttcctgagatggacattgattgattccaacacttgtttatattaaaacagactattataaagcttgctgcaggagtgcctgctggccttgctgtgaggccaatacctatttcaagtgcaggctgcaggattaagccaactcttatgcaactgactgttcttaatgaccatttctcataaacattgtgtgggtacgtgggagggttcgggtgttggggtggggatgagtttgaagtttaaagttaaagctagaaatcagatgatctgcttcctctctgtctagacataccaattggatttatgtggaggcaggccagagtggcaactgatgacttgtgtgcaaacaagcatttatccaggttgcattatccaaattggtttgttaaaaactcaagatcacattcttacactaagaaaacagtaaacatagagacaaagttta

SEQ ID NO: 445 - DNA, 2900 bp, Cricetulus griseus
caaggcgagcaccccgaggcgggcacgccgggcaagccgaggcgtgcccttaccgcggtggcggcgagccgggtagccacagtccccgccgggtcccggggccccgcggcccatgctgggggcggagccagggtggagggcggcggcgcggccggccccgcgcggtgattggcgggcggccggcggtggctgaggtcctggcggcggcacgggcaaggcaggcggagtcgcgcctggcgagccgagaggatgctgctgtccctggtgctccacacgtactctatgcgctacctgcttccgagcgtcttgttgctgggctcggcgcccacctacctgctggcctggacgctgtggcgggtgctgtcggcgctgctgcccgcccgcctctaccagcgcgtggacgaccggctttactgcgtctaccagaacatggtgctcttcttcttcgagaactacaccggggtccagatattgctatatggagatttgccaaaaaataaagaaaatgtaatatatttagcaaatcatcaaagcacagttgactggattattgcggacatgttggctgcacgacaggatgcccttggacatgtgcgctatgtgctgaaagatgggttaaaatggcttccattgtatgggttttactttgctcagcatggaggaatttatgtaaaacgaagtgccaaatttaatgaaaaagaaatgagaaacaaacttcagagctacgtgaacgcaggaacaccaatgtatcttgtgattttcccagagggaacaaggtataataaaacacacacaaaactgctttcagccagtcaggcatttgctgctcaacggggccttccagtattaaaacacgtgctgacaccaagagtaaaggcaactcacgttgcttttgattctatgaagagtcatttagatgcaatttacgatgtcacagtggtttatgaaggaaatgagaaagggtcaggaaaatactcaaactcaccgtccatgactgactttctctgcaaacagtgtcccaaacttcatattcactttgatcgtatagacaaaaatgaagttccagaggaacaagaacaaatgaaaatatggcttcatgagcgttttgagataaaagataagttgctcatagaattctatgattcaccagatccagaaagaagaaacaaatttcctgggaaaagtgttcattccagactaagtgtcaagaagactttaccatcagtgttgatcttgggtagtctgactgctgtcatgctcatgacagattctggaaggaaactgtatgtgggtacctggttgtatggaaccctccttggctgcctctggtttgttattaaaacataagcaagtaatgtgctccggtcatttgtctcttactgatggctacacattacatcacattgtttcctgaattaaataagaagtttttttaaaaccttgttgattgaacactggataaaatagaattagtgaccacagccaacatgcagttgatttggggcagacacacatggcttttcaggtgctggagttgctggacacatgcaagctaagtggagtttatgctatttttttgatgttctccatgaactaatgtccacttgtgaagattatttggattgtataatttaatgtttgtaattcagatggctgtattttaacattactttgtagcatatttcactatattcattaccttacattttggttacttggcagctcaaactcctatcactaaggtattttatattttgaagctatgtgatactgggtttttgtttgtttttgttaaattctgcaagtcaatgaaagatactgtaattatgtgttgaaaagttcaaagaaaaaaggtgaaaagtattcatggtgaaaatctgtctagtgtatatttttattatattgttctatttagctagttttctttatatttgcaaaataacaaacatttctaatatttattaaaattgattaatttgcattcccctcttctgcagagaataatgtgtaaagtgtccgaatggagttgaagctctgttatgactctgtctcatttggcagagctttaaataacccagcgtctgagctactgagttagtgcctcctagcatctgtgctggactgcttttaaacacaagggttcctgttattttcatattggaatggacatccacagaactctaggtgatggaagtctgccagcatcctgactatctgtcctggcacgtgccttctgcctgtctccctttgctttggcgctgcatttggactggagcgtgtgcactcatggttgcttgctgcttgttccagcccttgccctctggcttggtgtcctccagtggtgctgttcattgttgggttgcaggcagtgctgcccggctcaaagaggcatttccctgactcctgtgggtaagcctccttggctactgcagaagcattttgcatttgtttatgtcaagaagcatcaggattgggtaaatgttatttctcttcagttttcatggagccacactgttgatacatatcacctgtgaacaagagctaccttctaggaccaaatcacactgttctcagtcatggaacagtgtatcctatggaaggaggctttctaaagtttgatttgctgtatttttatgttgtaatttaagtgtgattgcctaccagtcctttaaggtaacatttctgcatacttcatgcagatttttgtcacagaattatataccattaatcaagttgaaatagacatttaaatcacaataaataaattttgtttaagttgagggaaattttgcctcttatatttgttttcttaaaaccaggaaatgagtcatttcaaacatctttgaagagtcatgtgctgtcacttggtttctgtgcatttgtatattcatatatggata

SEQ ID NO: 446 - DNA, 2899 bp, Cricetulus griseus
tgaggacgatcgtgaacacagcccggcccgacgagaaggacataatgacctatgtgtccagcttctaccatgccttctcaggagcgcagaaggctgagactgctgccaaccggatctgcaaggtgctggctgtgaaccaggagaatgagcacctgatggaagactatgaacgtctggccagtgatcttctggagtggatccgacgcaccatcccctggctggaggaccgcgtgcctcagaagaccatccaggagatgcagcagaaactggaggacttccgagactatcggcgtgttcacaagccccccaaggtgcaggagaagtgccagctggagatcaacttcaacaccctgcagaccaagctacggctcagcaaccggcctgccttcatgccctcggagggcaggatggtctcggacatcaacaatggctggcaacacctggagcaggccgaaaagggctatgaagagtggctgctgaatgaaatccgcaggctggagcgactcgaccaccttggcagagaagttccggcagaaggcctccatccatgaggcctggactgatgggaaggaggccatgctgaagcaccgggactatgagacagccaccctgtcagacatcaaagctctgatccgcaagcacgaggccttcgagagtgacctggccgcgcaccaggaccgagtggagcagattgctgcaattgcccaggagctcaatgagctggactactatgactcccacaatgtcaatacacggtgccagaagatctgtgaccagtgggatgccctgggctccctgacccacagtcgcagggaagccttggagaaaacagagaaacagctagagaccattgatcagctgcacctggagtatgccaagcgggccgcacccttcaacaactggatggagagtgccatggaggacctgcaggacatgttcatcgtccacaccatcgaagagattgagggcctgatctcagcccatgaccagttcaagtccaccctgccagacgctgacagggagcgtgaggccatactggccatccacaaggaggcccaaaggatcgccgagagcaaccacatcaagctgtcaggcagcaacccctacaccaccgtcaccccccagatcatcaactccaagtgggagaaggtgcagcagctggtgccaaagcgggaccatgcactcctggaggagcagagcaaacagcagtccaacgagcacctgcgccggcagtttgccagccaggccaatgtggtggggccctggatccagaccaagatggaggagatcggacgcatctccatcgagatgaatgggaccctggaggaccagctgagtcacctgaagcagtatgagtgcagcattgtggactacaagcccaacctggacctgctggaacagcaacaccagctcatccaggaggccctcatctttgacaacaagcacaccaactacaccatggagcacattcgtgtgggctgggagcagctgcttaccaccatcgcccgcaccatcaatgaggtagagaaccagatcctcacccgagatgccaagggtatcagccaggagcagatgcaagaattccgggcatccttcaaccactttgacaaggaccatgtcggggcactggggcctgaggaattcaaggcctgcctcatcagtctgggctacgatgtggagaacgaccggcagggcgatgctgagttcaaccgaatcatgagtgtggtcgaccccaaccatagcggcctcgtgaccttccaagccttcattgacttcatgtcaagagagaccacagacacagacacagccgatcaggtcattgcctccttcaaggtcctggcaggcgacaagaacttcatcactgccgaggagctgcggagagagctgccccccgaccaggccgagtactgcatcgcccgcatggcgccctaccagggccctgatgccgctcctggtgccctcgactacaagtccttctccacagccctctatggggaaagtgacctgtgaggccctcagacaccctggtcagactccctcagcctcccggaggggctgaggagccctgccccaaccctgactctgtatctatgcaaagagctctttgtggtccttctaagggggtcaggcaggaaggggctaggcaggcctctctttctcagtcttgcaggggagggaggcttagagatcagcacttctggtctgctaaatatatacctgtgtcctagagacacctttccaaacccgggtcccctcctttgcccctgaggccccttcagggcctctcacatccaggccaaagccccatgtgccttgtccagggaccacctgccctgcagagtccagcagagggcaccccagctcccctggaccagacgccagtggcccctctgggctctaggtctcagatttcctaaggaccaaaaccaacaaaaacacaaagaatggaacagaaacaaaaaaaatacaaaaagtaaaaaaaaaacttattaaaaaaaaaaatcctataaaaatgaaaacctcccagagaattactatttcctttattaacttacggatttattctataaatatatatccatctagctgcatatctccgccacctctctttcactcgtaatgaagacatagttgattcagtgccctcccagcccctcctgaccctccccttgtttgcggtgggcaggggtctctggggacctcctgaggtggaggtgggctgctggcctgcctgcctggtagtgagtggatgggtttctccctttgagtttattctgattgatttttattttcttggtttctggataaaccgccctttggggatgggagaataaaacatgtaatatttttaaaaaaaaaaaaaaaaaaaaaaaaaaaaaaaaaaaaaaaaaaaaaaaaa

SEQ ID NO: 447 - DNA, 2898 bp, Cricetulus griseus
atccaaacaagaaataatgaatgaccagcgctttaggcgggtttcaaaggatcccagattttgggaaatgccagaaaaggaccgaaaagtcaaaattgataagaggtttcgagccatgtttcatgacaaaaagtttaagttgagttatgctgttgacaaaagagggcgccctatcagccacagcactacggaagacttgaaacgatactatgacctttccgactctgattctgatctctctgatgaagaaagcaaagttctgaaccaaaagaaagtgaagcagaaaaaaaagaaactggaaaagaagtgaattcaaaagtgctgggtgaggaaaaaaagaaagaaaccaaaaaaactgaacaaaaggatcctataaataaaaatgagttcaataattctgaaagaattcagaaaatgaaaaacttgtgtaaatctcagaagataggttcagaaataagtcccaagaaggatagtgaagaatttctggaaaatacaaaaaggaaaaagaacatcattgaccacagtgcagactctctacaaaaaaggaaaagcaaggaccaaagattctagtacctctgaaattgtgaaatctccaacagccgcttgttctaaagacaaaaaagagaaaagcaatcagttcagttataatggcaagagccgatgatggtgaaatgctcgacaaagatgccctggaggaagattcagacagtggtagtgaaataggaagtgatgaggaatctgaagatgaagtcacaagtgatgatagaacttcaactgatgatgatgagaatgaagacaatgaagaagaggaagatgaagatagtgaggaagatgatagatagtgaggatgatgatgaaagtgacagtggtcctgatcttgtcaaggggttaaaggaaatagtagaaactagttctgaagatgaagatgatttcacagatttatttccagaagaacctggttttgaacatgcttggagagaattagataaagatgctcctcgggctgatgagattacacatcgactagcagtttgcaacatggactgggatagattaaaggcaaaagatttgctggctctgttcaattcatttaagcccaaaggaggagttgtattttctgtaaagatatatccttcggagtttggaaaggaaaggatgaaggaagaacaagttcaaggaccagtagagttactgagtattcctgaggatgccccagaaaaagactgggcctctagagagaagctaagagactatcagttcaaacgattgaaatactattatgcagtagtggattgtgattctcctgaaacagcaagtaagatttatgaagattgtgatggcctggaatttgaaagcagttgttctttcatagatctaaggtttataccagatgatactacttttgatgatgagcccaaggatgtggcctcagaagttgatctaacagcatataagccaaagtatttcacatctgctgcaatgggaacatcaacggtggagatcacttgggatgagactgatcatgaaagaatcacaacacttaacagaaagtttaaaaaggaagaactattggacatggacttccaggcctacttagcctcctctagtgaggatgaagaggaagaggaagaagcaccacaaggtgaggatggagtcagtgtagaagatgggaaaacaaagaaaaatcagaaggatgatgaagaacaaattgcaaaatatagacagctcttgcatgttattaaagaaaaagaaaagaaaggaaaagaaaatgatatggaaatggaaatcaagtgggttccaggccttaaggagagtgcagaagaaatggtcaaaaataagttggaaggaaaggataagctgaccccttgggaacaatttttagagaagaagaaagaaaagaaaagactgaaaaagaaacagaaggctcttgctgaagaagccagtgaagatgagcttccttctgatgttgatttgaatgatccctactttgctgaagaagttaaaaagttaggtgtaaagaaaaaatcaatgaaatctacaaaagacagcttatcttccgaggaagaagctgacctagaaaagcaaaaggctgaaatggccttgcttgtaatggatgaggaagaggacagtaagaaacacttcaactatgacaagattgtggagcaccagaatctgagcaaaaagaagaagaaacagcttatgaaaaagaaggagttacttgaggatgactttgaggtaaatgttaacgactcacgatttcaggcaatgtacacttcccacttattcaatttggatccctctgatcctaatttcaagaaaacaaaggctatggaaaaaattcttgaggagaaagcccggcagcgagaacgaaaagaagagctacttattcaagcagtagagaaagctgagcagaacacaggaaagtcggcacagaagcggcccatagatcctgccttgtctttgctgattaaatctgtgaaaaacaaaacagagcaattccaagccagaaaaaaacagagagtcaaataacaattgtaaatgactcacattttatactgtgcatttccacagatttgtcataatataattatgtgaagtgtaaaatttataaaatttttatattgtatgaagttcgtttcctacaaatacagtgtgactctaatttagcttccaaagagactatttacaatatatgtaaaattagtgtccatttttctgtacaaagattaaaaacaaatttaaaaatatatatatgtagtaccttattctgtgaagacaggtggcagatctaagtaactgttaagataacttattttcctatcataaggatagaagctgtgaattattttttccatgcttagtaatttgcatgtagaactaatttatgaataaaaagtg

SEQ ID NO: 448 - DNA, 2897 bp, Cricetulus griseus
cccgggatagcggccgggcgggcagcagcgagccgcaccgccgccatggagctgagggtcgggaacaggtaccggctgggccgcaagatcggcagcggctccttcggagacatctatctcggtacggacattgctgcaggagaagaagttgccatcaagcttgaatgtgtcaaaaccaaacatcctcaactccacattgagagcaagatctacaaaatgatgcagggaggagtgggcatccctaccatcagatggtgtggggctgagggggactacaatgtcatggtgatggagctactaggaccgagcctagaagacctcttcaacttctgttcaaggaagtttagtctcaaaactgtcctgttgcttgctgaccaaatgataagtcgtattgagtacattcattcgaagaattttatccaccgagatgtgaagccagataacttcctcatggggctgggaaagaaaggcaacctggtctacatcattgactttggtctggccaagaagtaccgagacgcccgcacccaccagcatatcccttatcgagagaacaagaatctcacagggacggcgcgctatgcctccatcaacacacatcttggcattgaacaatctcgaagggatgacttggagtctctggggtacgtgctgatgtacttcaacctgggctctctcccctggcaggggctgaaggccgccaccaagaggcagaagtatgagaggatcagtgagaagaagatgtccactcccattgaagtgctgtgcaagggctatccttctgaatttgccacatacctgaatttctgccgttccttacgttttgatgacaaacctgactactcctacctgagacagctcttcagaaatctgttccatcgccagggcttctcctatgactatgtgttcgactggaacatgctcaaatttggtgccagccgagctgcagatgatgctgagcgggaacgccgggacagagaggagcgattaagacactcccgtaatccagccacccgtggcctcccttctacagcttccggccgtcttcggggaacccaggaagtggctcccccaacgccccttacccctacctcacacacggccaacacctctcctaggcctgtctctggcatggaacgagaacggaaagtgagcatgcggctgcaccgtggggcaccagtcaacgtctcctcatctgatctcacgggccgacaagatacctctcgaatgtccacctcacagaatagcattcctttcgaacaccacggcaagtagctgctcgtctccatcggaaggcagcactggattcccggtcgggtggcttccagtggtcttcagtctgtcgtgcaccgatgagaactctcctttttgctgtgaagggcagacaatgcatggctgatctactctgttaccaatggctttactagtgacacgccccccggtctaaacctgaaatgttaacgccgggagctctccaggccactcacccagcgacgctcatggggaatcaaaacacaaactaaatggacaggctccaagagctgccatcgccaggggctgcaccatggccccatgtgagctcagttatcatggggctggaacgaagagcagaggctgggagaccattgcagagagaatccgactccctgtgaagagcctctctgctcccaccagtggtggcggacctgcactccctgacgatcccaccgcagctaccagtcttctacttggttaagacagttttgtatcattttgctaaaaattactggcttaaatctgtgtaaagaaatctgtctttttattgtttctttcttgtctgtttttgcggtcttaaaaaagatgttgaccttaatcctaagacatgctggcttggcgcttctgtgtaaaatggaggcaggcaagagaggggcacatgttgtgggctcccatcagcctcatttgggcatcttgcttactcttccccactgaaaactgacaagcctgccaaccccgaagtgccaagaagcaggtacctccagaaaggtgtggtgccgcgagcttcatcatcttcagctggacacgtctgcgggctgggctgctctgccgctggcggttaggatgccaacaagctcttccccaccatgtgcaccggatatgaagagatagcaggacctgagctccctgtctgagaaatggggggcagtacatgtgtgtgggtccatctcttgttttccctgtcagcctgtggagagttatgctgggtacttggctccttctttaggtttaggctcaaatggtgccgccatggcttatccttcttcccagagttccccggtactgtgagcactggcctggggtgggggaccacactgctgctgtggcagcatcccagaatgtggctgtcggttttgccagccagctgtctgagcctgtgggtgcttctttctgagtcctgagctggttactctgcaagcattttagggtgcagggacttggtgggactgtgtgtctgggagtgcagagggcggttgggagggttgggcaagtttgagatttttgttgcaaatcctttatcaaagttgggcctcctctccagtagcaggcctgcctggcaagtgttctttgtagatacctgtggtgctggaggggtatcggggtgaccttgagactgatccaggttcagcctggccctgttggggttgtgctgagattaggcccattggaagtcctccagggtgtggctctgacggttcttgcctaatatttaatcccatcatcacgtgcaggaagtgtagttagaatgtgtgtatcaacctgtgtcttggtgaccagtctctgagctgtgtgtttgtactaccactgtatttgtgtactttaacaattgtgtaaataataaattcataatgacttctaccttt

SEQ ID NO: 449 - DNA, 2895 bp, Cricetulus griseus
gactctggttttatcggtgaaagtgctgtggaaaagcttattctcaaatcaggaaaaacagatcaaatttttttgacaacacaagggttccttacctctgcataccactatgtccagtgtcctggtacctgtgttaaagtggctgtttcggatgatgtcagttcacacaaattgtgtgcagatgaagccttctgatttgttgaagaaaaatggtcttgaagaaaaaagactgaagaaccaaatggaactattgatgacagccttcatttagaactagaaaagcaggcatattacctgacctacgttcttcttcatttagttggggaagttagttgttctcattctttttcttctggacaacggaaacacttcgtgctgctttgtggggctttggaaaagcatgttaaatgtgatattcgggaagatgcaaggcttttctacagaactaaagtgaaagatttggttgcccggatacatggaaaatggcaggaaataatccacaactgtcgacctactcaggggcagcttcatgacttctgggtgccatcatagcacttggatcatcacagaaaattaggaaaagtgtggaccagcttgaggagttggacattgaaacaaaggccaaggtccatctggttttcatttccctcttggttattttaggatacaaagggaaagcctagagtagagttctataatcagaggtgtgggtctcttctgtaactctgtaaaccataggcagtttcagtccacacattgtccctttactattcaagattacaaatctgaagtttttaaacctatttaaagtcaattaaggaacaaacaagctgtcagattgcccttagaggaagagatgaagctacaaagtagtggctgtttttaaaatgccagaacattcatgggcagtttgtttaagatttcttgtaaatgcatatatttttaaaatactggttcaatcataaaatcttagctaagccagaattctggccattggtaactatattacaaaagtctctgtataaaggcttaaaaatctggaagtttccaaaaccttgttcccacaagtatataatttagcagagaccttgatgatgtttattttggggacactgtgtgtatgtgtgtatgtgtgtgtgtgtgtgtgtgtgtgtgtgtgtgtggtttgtatcttgaagttgttgcacttgaaaaccacagctgctctaaattcttttaaacactggaaagccatcctttagtttagatggtagagggttagcagaggtgcacatgctagattgagcctgaggctctctgaaacatttggtagtaacactcttaattgaccgatgtctgtctagggagggttgcttcctgaaaagggatgccagttgcttattctttgaaaactggctgaagtggcttgctccctcctgagcatgctcatgtctgtgtgggtccaggttgggggtgaaaagggacctgggctcaaagtttatggtttgagaggagaaaataagttctgagagctaactttctacctctaaattgaggcttaggaataaaaaccattttatcttaaatttatcatttaaaataacattagtaacttttgagctcatgtcaagcattgggcagttagagattttatagtgaagactgaacaaatcaaattttcaagaactgaggctgattgaggctccaagagtcagaccaacaaaagttttcttctgtgttgagtttactggtaagaatagtatcttgatgctacctctcaagggtattattacaaaatgccactatggttaaagagatagatacaaagagttatatttgacagaagcttgaaactctggcatctatctgcccaacaatgggggctttcactctgtaatttaataccttgtagatacattatttgtgtgtaattttataagtgttcatatttttctcattttgcattgtgtaaagtgtacaaaatctcaaaagtataaaaatctgcttatattgcttgtaattacagtgtgtaaatattttctattgtgtacattgacggggacaagtgggttattcaggtttttaagtgacccttttatattgcagtttcaactgataaccacccatcaaatttaaaaccactttgatacattcttatttagcagttccaataagagtaaaatctctattttcaattgtctttctccatgagagaaaaatactttatccttccctttaaaataaatggccagacaacagtttaggcccttgtatttatgactctggtagcagtcttcagtctccgggtcagagtccagtcagtatttgcatttgggttctcatagaaactttgtgattctattttagcacaagtagttcatggtttttctcccaaatcaagtgttttccatctccttctgagtccccatgctttgtctccctccagctgttgttgcccagaaaatgggatggtaaagagggagaaaatgctcattgcacaaagactgtcaggccacctttgggacttggcaaacaaagcttgcactgagtggtggtgtgtttggcaatcttactgtgccaaaaaatcaccttgtctaattttctggatgtatatgtcaaacttattacccttactgcaagctgaaaattaaagtacttgtgtttatgcttttgtgtgtaactgtttgccttttctaacctgcttctcttgttatctgaaaatacagttctgtaatatcgttccgtgaagaggctccgtacacaagtcatctgtgttagcactgaagtcagcatttgtgcatttgtttgtcttatctcctcctggtggcagtggtgcctttgtcacctctcggaaggttgttgtttttgttttgagtgcaagtagtagcttgcttttgactttacaagaaaaaaaaa

SEQ ID NO: 450 - DNA, 2894 bp, Cricetulus griseus
ccgtggcatctacctccgagatcctgttcaggtggctgctccttcagatcatggtgttggcattgagcctgtatttccagagaacacagaaaactctgaaaaaaatatcccttcagcttcatttagctttaacatcaaattcatcttgggttcagtgcccccagccatttggaactcatgaatcagtgtcggcacataaatatacgtgtggatccccaggggcttaagagaagggttgcattatacagaggtatgtggctatgatatagcatcccccaatgcaggtcctctattcagagttccaatcactgcagttatagcagcaaaagtaaatgagtcatcacattatgatctagcctttacagatgtacattttaaacctggtcagattcgaagacattttgttgaggttcctgagggtgcgacttgggctgaagttactgtgtgttcatgttcttctgaggtatcagcaaagggtttgttcttcatgcagtacagcttgtgaagcagagagcgtatcgaagtcatgtaattttataagttttcgttcccttccagaaaaaggaacactgattgaagcctttcctgtcctgggtgggaaaacaattgaattttgtattgccgtcgttggtggggcaagtctcagtgatgtcaatattgattataccatatcattccatgggatagtgtgtactgcgccacagttaaacattcatgcatctgaaggaatcaatcgttttgatgtccagtcctccttaaagtatgaagatctggctccttgcattactttgaagagctgggtccaaacactgcgcccagtaagtgcaaaaaactagacctttaggatcaagagatattttgccaaataatcgccaactttatgagatgattctgacatacaactttcatcagcctaaaagtggagaagtaacacctagttgtccacttcttgtgaattgttatatgagtcagaattttgtacaagccaactgtggattatttttgaccagaacaaaagacagatgggctcaggcgtcatgagcaaatcagtgatttggatcgtcttaaagatcttccatttattgtttctcataggttgtctaataccttgagcttagatattcatgaaaatcatagccttgcacttctaggaaagaagaaatcaagcagtttgacattaccacccaaatataaccagccattctttgttacttccttacctgatgataaaatacctaagggggcaggacccggatgctaccttgcaggctccttgacattgtcaaagactgagcttggaaagaaagctgggcagtctgcagcaaaacgacaaggaaaatttaaaaggatgtgatccctgttcattactatctaattcctccaccaacaaagacgaagaatggcagcaaagataaagaaaaggattcagaaaaggagaaagatttgaaagaagagtttactgaagcattgcgagatcttaaaatacagtggatgacgaagctcgattctagtgacatttacaatgaattgaaagaaacataccctgcttaccttcctctgtatgttgcacggcttcaccaattggatgctgaaaaggaacgaatgaaaagacttaatgaaatcgtcgacgctgccaatgctgtcatttctcacatcgatcaaactgctctagcagtttacattgcaatgaagactgaccccaggcctgatgcagctactataaaaaatgatatggacaagcagaaatccacactggtagatgccctgtgcaggaaaggatgtgctctggcagaccaccttcttcacacacagcctcatgatggggcagcagccggagatgcagaagggaaggaagaggaaggagaaagtaccttggactctctgtcagaaaccttttgggaaactacaaagtggacagatctttttgacactaaggttttgacatttgcatataagcatgcattagtaaataagatgtatgggagaggccttaagtttgcaactaaacttgtagaagaaaaaccaacaaaggaaaactggaaaaattgtattcaactgatgaaattacttggatggacccattgtgcatcttttactgaaaactggctccccatcatgtatcctcctgattattgtgtattctaaaatgagaaccaagactttaaatttccaaaagaaaattttatagtgaactaatgcatgttttcatccactatccaatactgatcattaaaactatgtgtatttatcagagaactcactggcgtgtggcttaatacatgtaaatctagacctctgacatcaagctgttttcctactgcctaccacacttggcaagggcagggcctatcctacctgccagccccagcattatgagttgagtgcagctgctcacatgcatgaaaggttttcatctgtgaattttaactgtaaaactgttaaatcctgtttttattttataaatcaaaagggttaaaacatgctcaacttttgccaattatataaaggccttaaaaaaagctgcattaggggtagctaaattatttatttgactaaaaattaagagaacttcatttccagacttttttttctaatgagaaactcaattaatgggaggcagggtgtcattaacacatggcagctgagggaggacgcctgttacagaaatcttcaccaaggagtcataacagacaagttgttttttcagtatcctcaagtacactgcatcagaatgcgttaaaatttcatgtgtcagtgtcagacagctgaatctatcaggtattgtaaagatacacacagtatgttcataaccttgaaatcatgtaaaccacatgaataaatgtgcaaaaccacaggcacagtacactgtttgcactctgataccttaatttttt

SEQ ID NO: 451 - DNA, 2894 bp, Cricetulus griseus
tcactgaatccaaagatacaagcatgcagcttaagtgatggcttttataattgttgcagaccaacagttgatattgcttgacaggacatgcagaacacttcagttgcatcttatatttgatactgtcgtggatgtggtgggcctgtgtcaagaaggaaagttcttttggtcggtgaaaggagtggcaacttacatcttatccatgtaacatcaaagcaaacattattcaccaaagctttgtgaagagagataatgatgagtatcagcgtacttaccacaatttcattatcgagaaagatggttcaaatgaaggtacctattacatgctgcttctaacgaacaatggatttttctatattacaaacctccagctttcacaaattgaacaggcaattgagaacacagacttggatttggccaagaagttacaaggacaattcaaatgtagtttcatttctactgaaaattaccacaaccttggttgtcttaatcttgtggctggagaatttgcaagtgaaactcccgtgataattgggggagctgggagttgtgcattctcaaaatgggaatcagattctaccaagaaagaaatgtcccttaagaactttgtggacacagagattgttaaaggtgcaaagtcatttcaactgatcgacaacctgctttttgtgctcgatactgattcagtcttactgggatcctttattaagctggacccatatgattatgaatgattgaagttgtactgaaagttatagaacaagccaacgaaaagataaccagtgtgaacattaatcaggctctgaatcttctgagacacttgaagtcatacaaaagaatctcccccccagtggacctcgaataccagtacatgctggaacatgtaataactctgccaccggctgcccagactagactgccttttcacctaatattatttggcacagcacagaacttctggaaaattctctcctcagagctcagtgaagagtcgcttccaaccctgctcttaatttctaagctaatgaagttctccctagatactctctacgtgtctacagccaaacatgtttttgaaaaaaacctgaagccaaaagctcttgaagttagcacaagcccagtcagccctgatgagcaaggaagtggataagctcacacagaccatcgagtcatacctcctgtccatagtcaacccggagtgggccgtcgccatcgccatcagtcttacccaggaaatcccagaaggccccttcaagatgactagtttgaaattctgcctgtatttggctgaaagatggctgcaaaacatcccatctcaggatgagacacgtgaaaaagcccaggccttgctgaagaagctttatctccagttccggcgctcaggcaccgaagcagtgctcatagcccacaagttgaatgttccagaatatttaagagtggtaggaaagccagcacatctcattgtgagcctctatgaacatcccagcataagcggaagacttcgtaatacatctggcaaagattatcctgatattcacgaagcagctaaagaaatagctgaagtcaatgaaattaatttggaaaaaatttgggacatgttgttggagaaatggttgtgcccctcaacagtacccagtgagaaagcatcagagttctttgaacttgaagaggatgaagtgctgcatagagtcgtgtatctcctacagtctcgtccgatcgattatagttcaagaatgctgtttgtatttgccatctcagccacaagtacactgggcatgcgccagctaacctttgcccacaaaacacgagctcttcagtgtctcttctatttggctgacaaggaaatgatagaatctctcttcaaaaagcccactgaagaaattaagtcctatctgaaatgtataacattcctggcatcatttgagacattgaatattcccatcacatatgaattattttgcaacagtcccaaggaaggaatgattaagggcttgtggaagaaccatagccacgaatctatggcagtacgattggtggcagagctttgcttagaatacaaaatctatgacctgcagctttggaatgggctcttgcagaagcttcttggcttcaacatgattccttacctaaggaaagttttatcttccatttctagcgtccattcattatggcaggttccctacttcagcagggcttggcagtgtgtgatccagatccctctgctctcagcttcctgtcctttaagacccagccagttatcagattgctgtgagagtctcgtcgccatcctagaatgcccagtttcggatgaccttgacatgatcggagtcgccaagcagtatgtacagctagagcttccagcttttgcactggcttgtctaatgctaatgccccactctgaaaaacggcagcagcagattaagaatttcctggattcatgtgatgctcagatcattttacagcaattagaagaacatatgagcactggccaactagcagggttttcccaccaaattagaagtctgattctgaatcatgtcataaataagaaggaatttggaattttggcaaagacaaagtattttcaattgttgaaatggcatatgataaacaccaacaatatcactgaattggtaaactatctggcaaatgacttgagtttagatgaagcatcagctttgataattgagtattcaaaacattgtgggaaatctgtgccatcagatgcagctccttgtgaaatcctgaagacatttcttggtggatcctcgtaaatcaaacaatttttttcaaaaacaagaggaagtttggagtctgcgactaatttattgcagtatataaattgtgcaatctatatttcattatcctgaaatgaatatctaagacattcaata

SEQ ID NO: 452 - DNA, 2894 bp, Cricetulus griseus
atcaaatggtgtataagttatctgtgaaatgagtctttgaagtttcgtacagaggttttttgttcaatttaaaaaaaaaattcccatgttttgtaaaagtcactgttttgaacacatttcccagaaaaatgttgggatttttgtgattatttattttcgtaatttctttttctttttgcactacaggttttaggaatcctgaaaaaaccatgtaacaactgcattttgcagcacaagagtcaaatggtctttagttcttattagaccaacttcttaaaagaagaccaaagtggtgattttgcagtttttcttagctcccctaaagagtgactctgcttttatgggtacttgccaattttctaacatcagctgtcttgtttcatcactctgagattctgtgtgcagtgagcaatttttgtgtcagaaattctatcataacatatatatttaacaaattcatcttgctgttaaactgctcatgttttgttgtaaaactttcattgattatataatgtaagactagttgaaagtagaccaaaaagacaatttgtgacttcattatcttgcctgtgtagaatagtattgattgaggaaaactcttctgattgagagcttggcttggcattttctatcttcactatggcgctaaaggtgagcataatgacacagcattgaatgtttttcaggcacggtaatcttactcttaggaaaattggagtagctttttctgctaggaaacttagaagctcaacattactttgtagagattattgctttccacaagcatcaacacattaattttgttaaattgtataggtgtaaagggaataactgcagattttgataggaaacccacctgtttgtttcaagcagggtcttgatatacagatactcctacacttgctggcataattttcattaggaatgaacctcagcctttctacccaatgaggcccagcctcaaaggacaagattattttttcattgtatttgttggtttttgtttttgtttgtaaacaagatttcacataacctgatctagcctcaacctcactatgtagccaaggatgatcttcatgcctccacctcctcagtgctaggattataggtgctgccactatacctggttttctgggtcctggggattgagcccagggccttatgcatgctaagcaagcactctagaaactgagctatatcccagccccttggcattggattgggattcttgaaatctactgatcgcctaaaataatttataaacagtctaaaaatgtgaagtcaagccaggtgtggtggcatgtgcatgtaatcctagcacttaggaggctgaagcaggatcacaagtttggggcaaatctgggctatcttagtgaatccctgtcttaatcctaacccccccaaagtgaatccaaggactaacatgatgatagtgaaatcgaaatggcatgcaagaagcatgctgtatatcaggctttttctactgttctccttgactactactgttttcttctcttgggggactgtcttccttcttaatgtgttttcataacaatgttactgagaattaatctacatgctttgtaatttcattcttttaaagggtagagttgccagatgtgactcatacctgtaatcctaacactcatgaggccaaggcaggaaagttgtcacacaaattcaaggccagattgagatacacattgagaccttatctttaaagaagttatacaaatttaaaagagtacaattaagtaacttttaatatactcacaaaattgtgcaactacatgataaatctaggtcattttactacccctaaagaagccctgtattctttagtagtcacctctgatttcctcccagtgtgtcccacctacatcctagggagccaatagtctatatttgtataatctgatcatttactaaaaatgaattaatgcaatatttagtctttgcaaataatttcctaaatatggtttcctatgtggagtgaacagtcatcttgagaacccagaacccaatacagtgatttggttttgagacaggatttttctgtgtaacagtccaggctgtcctgaactcactttgtagtccaggctagcctcgaactcacagagatccatttgcctctgcctcccaagtgttgggattaaaggtgtgcaccaccattgcccgtttgtacaatggatattaaaaaatctattcttgcctactcagccaggaaaatccttaaaaataatgctaaatatttgtcagataattgacatagtaaattttaaatgtgtctaccattatggacagcttgtatacctcagaccaggtaaacgtcccaatttttttaaatcaacttcattgaatttctgctatcttgaaatacggtactataaagctaaataagatttgggtgcattgtaacagtgctaagtgtgttcagtacagaattttatttacagtactgtgtgatagttcattactgcctagggtagttcaaaaacagcaatgtgagctagtactaggtaagcctaaaattacataatttcagtgacattaaaaagtaggagacacatgcaatcaaagttctccagaatgcaggaacactcttcataaccagggaactagccaaatcctatgagctcatagctcagctgcagggaataaatattgtgaattggtggcaagtatgcacagtaactccctaatgattgcttcctaagcatgcatacttttgagtgacacgacagcatcttcctggctgtatgtgacctatttccatgatgtattgaatactgttgtttgtgagccttgatgcctgtaacaccaataaacccatttttcaatatgtttcctctctttaaatgaccttgacctgtccaataaataagtggttgtct

SEQ ID NO: 453 - DNA, 2893 bp, Cricetulus griseus
atgagcaatgtttctgtgcagcagttgatgactttagaaatgaatttaaagtttctccatttcaagattgcattttaagttttctgggattttcagatgaagagaaaaagagtatggaagaaatgactgaaatgcaaggaggtagctgtttaccagttggagatgaaaggtgcactcaccttattgttgaagagaatacagtaaaggaacttccgtttgaaccctcaaagtaaactttttgttgtcaagcaagagtggttctggggaagcattcaaatggatgctcgtgctggagaaactatgtatttgcttctagaagttctactccagttcctccaaagcagtcagccaggtggcaagtggcaaaagagctctaccagacggagagtaattacgtcaatatactggcgacaattattcaattatttcaggtaccattagaagaagaagggcaacgtggtggacctattcttgcaccagaggagatcaagactatttttgggagtatcccagatatctttgatgtacatatgaagataaaggatgatcttgaagaccttattgttaattgggatgagagcaaaagcattggtgacatctttcttaaatattcaaaaagatttggtaaaaacctaccctccctttgtaaacttctttgaaatgagcaaggaaacaattattaaatgtgaaagacagaagcccagatttcatgcttttctcaagataaatcaagctaaaccagagtgtggacggcagagcctcgtggaacttcttatccggccagtgcagcggctacccagcgttgctttacttctaaatgatcttaagaagcatacagccgatgaaaatcctgacaaaagcactttagaaaaggctattggatcactcaaagaagtaatgacacatatcaatgaggataagagaaaaacggaagcgcagaagcagatttttgatgttgtttatgaagtagatggatgtccagctaatctgttatcttctcatcgaagcctagtacaaagagtggaaacagtttctctaggcgagtatccctgtgaccgaggagagcaggttactctcttcctcttcaatgactgcctcgagatagcaagaaaacggcataaggttatcggaacttttagaagtcctcatgaccgcacccgaccaccagcttctcttaagcatattcatctaatgcctctttctcagattaagaaggtgctggacattagagagacagaagattgtcataatgcttttgccttgctggtgaggccaccaacagagcaggccaacgtactgctcagcttccagatgacatcagaggagcttccaaaagaaaactggctgaagatgctgtgtcgacatgtcgccaacaccatttgtaaagcagatgctgagaatcttatgtatatggctgatccagaatcatttgaagtaaatacaaaagatatggatagtacattgagtcgagcatctagagcaataaaaaagacttcaaaaaaggttacaagagcattctcattttccaaaactcccaagagagccctgcggatagctctttcatcgtcccatagctcagagggaaggagtcctcccagtagtggcaaacttggtgtgagccgtctctccagcacctcatccttagcaggtattccgtctccctcgctcgtcagccttccttctttctttgagcggagaagtcatacattaagtagatctactactcacttgatataaacttaacaacccaccgacctcacacttcaacaagatgctgacataaatggtacttctaattagcacttggtcaaagtcctaaagaagatagtaacactaaccattgctgttgcatgttcttgaaattttcaagataatccatgtaaaaaatacattgattttgctgtaatttatctttttgactctcacatctgaaggccagtaccttaagttattcatgataatcagtagctttgtaacctgatacagtaaacttcctgctgggtgtaaaatactgttgtctatttgtatagtatcttgaatgaatttttggaagtacgtatttgtgtatctcagtttgtgaagagactaaatggcaatgcagtacttaataaaaacctctggttaaattctaggggctaattcacatgtatttgatgtgcttaactgctctttgcagtttattttcttttaaaataaaagatgtagcacatggattttaaatgatacacaagtattacccgtataattaagattgtttgaaaatattttttgcaaattgagataaggacagaaagattacaaaacattgtatatgctgcaaagatagatattagtatgtacttttagttgtttcagagactttattttttttttatttttttgttgtgccactattaaattttgctttagttttgactgctgtattgaattttatttcaaaggagaaggccatgggaaaactgttaagaattgcttctgttctctatacagttggtctgagtttgccttcaggtttgctaatctgctgtgaaatgcatagttataatgtgtggtcaactttttattgtggtcatgtcattaaatataagattggaaacttattgtcaagtatgtaaatctgccattatcttctactgtggtattttttagagtcagtaaagaagaatgatcaggttcctatggcccagtgtattatttcccacatgttcaagggggtgttataagtctccttgctacttagttttcagtaatctgctttagtggtttaattgactatggatttttttctgtgctgtgtgtgccacctcacaggttagttatacggcattgttttgctatattttaaaagcagttattagcaagaactttgtaaataaacagacttaaaaacaca

SEQ ID NO: 454 - DNA, 2891 bp, Cricetulus griseus
  modified_base (805)..(805): a, c, t, g, unknown or other
  modified_base (2615)..(2615): a, c, t, g, unknown or other
gttcggcggcactccagtcccagctcgccaacaagtcccaagtttggaaaagctgactcctatgagaaactggagaaactaggggaaggatcctacgcaactgtctacaaaagggaaaagcaaggtaaacgggaagctggtggctctaaaggtgatcagactgcaggaggaagagggaacgcctttcacggccatcagggaagcctctctgttgaaaggattgaagcaagccaaacatcgtgctgcttcatgatatcatccacaccaaggaaacactgacgcttgtctttgaatatgtgcacactgacttatgtcagtacatggacaagcaccctggaggactccacccagagaaatgtgaagttgttttaatttcagttgctgcgagggctgtcatacatccaccagcggtatattttgcacagggacctgaagccgcagaaccttctgatcagtgacgcgggggagttaaaagctggcagacgctttacggtgtacagctctaaaagcctcagacaagcatggaataagctcagctatgtaaatcatgccgaagatctggcttccaagcttctacagtgttccccaaagaacaggctatctgcacaggctgccttgagccacgagtatttcagcgatctgcccccgcggctatgggagctgactgatatgtcttctatttttaccgcccaaatgtgagattgcaacctgaagctggagagagtatgagggtcctttaggaaaaaacaatagttatggacaaaagtctaatacaaaacagcaagcactgacaagctgacattcncaggagagcacttttttaactggagaaaatagtaaggaatatctttcttaaaacttgggtgcaaattaaaagaaaaagtctgtctgtcaagggttagtcttggaagccatcttggccgattaacgcttaaaaagcaaatttaaaaattatctagagttaaaaattttgctcacttacaacaaagcacctttgaattagattgctcagaaacattccaagccgttccgaagtcatcactgggtgccagactttcaaccagtctcctgcaataactgttcaaattcagttcttaaaaagcaatgtgggaattttgctttaaaatagaaatggcaaaagagaactggcttccctttttttgaaggagcttgggaaccttggaagatgaaggcaggtctgtcaaacccagtgtgtccctggaagcagagccaggttcctagatttcaaaggcattgcctctgagtcataggcataacccacccccttgtctatccagagggagcagtaactgcaatcttgcagatgctaagcaaggaattgcttcctgaatgggttgaaagaaggcaaaaagtgtcacgcaagttgacagtgtttactgttagctgcctgggaatgattctcagtcccctttcataattccttccatgggaagtctttacaggtattttgagttaaagtataattaaattgggagttctttaagtggggagaaaaccttatgtgtaattaaaaaacagcctcccctgtgatttgcttagaatcctccattcatctggggaggggagcccatcatgtgtatatttcactaagtataagtcaggagctccatgctaatgttgaaaggtttcaagtaagaatgtaaagacaaccagagatccgtgcccttgtctagacagcttctgggaagtgagacacagcactgctcagtgtgaggtctgcctcaagtcaggcacacctctctggttagaagggtttcagtttccggtccttgtcatcaaggaaggaaatccaaagtgtctgcccaactccagcctagcacagtcatattccccctcccctactttcctctcccaccctctctgagggtattgtgaaaattggtagagactgtgttcattaacatgttactatactatcgaaaaagcactggaatgcttggcgagattatttttctatgaaggaatagcttgagtttggacagctggtaagaatagcatgaacaccttggcatggtgattgtatcaactcagcctcactacacacagtatttggaaaggtagtaggggacttaattttcatcttcttaaggggaacagtttaattaaaaattagaggtgtaaggcagggccagctgtctacccaccatgcaaggatgagaattcatttctagctctcaagtgactagaaaagtttccaagggagcctgtgggaatgtaggaaaaccagtacctcgtggtaccctttcctctgtgtgcatacgacaccactgtaatcagtaccctgtgtatgtgtccatggcagacacccatctgtgaatattactggtttgtaatcttctgttatataagaggatgtctaggttgtacataccagggtagattgttgcctgcccctatacatagaaatatgctgcataattgtgtataacttccttctctgttcctggcttgtacacagaggaaactattagtcttctgtttcctcatataccaagctgaaaattttaaaatctcaaatgaaataagcaatttcctattctcactgccccctctcacggcagcatataatagaggcacatataaaaaaaaaaaanaaaaaaaatttatattctcttttttttttttttaattttttgttatttcccccccttgtttatatgatgcactgagatgtgtactttttaatggggttagtacctctgagactcattatgcttcaacatgacacatagcaaggagaatggaatactacgtgtcgcatatgtgttgccaattgtaatttgtctgtgttatgaaggatgtaatggtttgtcagctgtcattgttgttttctgtaacatgatatggaataaagtatagccgaatctgca

SEQ ID NO: 455 - DNA, 2889 bp, Cricetulus griseus
cttgagaagaaggtctcgatcaagaggtggtcataggagacggagcagaagcaaagtaaaggaaagacaaatttaaaggaagtctctctgaaggaatgaaagttgagcaagagtcttcatctgatgataaccttgaagattttgatgtagaagaagaagatgaagaagctctgatagagcagaggaggatacagaggcaggcgattgtgcagaaatataaatatcttgccgaagacagcaatatatctgtgccatctgagccgagcagcccacagagcagtacaagatcacgttcgccttctcctgatgatatcttggagcgagtggctgctgaatgtaaaagaataatgagcgggagaatgttgacacattcgaggcctcagtaaaagccaagcataacctaatgacggttgaacagaataatggttcatctcagaagaagcttttggcgcctgatatgtttacagaatctgacgatatgtttgctgcttatttcgatagtgctcgtctccgggctgctggcatcgggaaagatttcaaagagaatcccaacctcagagataattggacagatgcagaaggctattaccgtgtgaacagttggggaagtcctagataagcgctataatgtgtacggctatactgggcagggcgtgttcagcaatgttgtacgtgccagagataatgcaagagccaatcaagaagtggctgtgaagatcatcagaaacaacgaactcatgcaaaagactggtttaaaagaactagagttcttgaaaaaacttaatgatgctgatcctgatgacaagtttcattgcttgcgcctcttcagacacttttaccataagcagcacctctgtcttgtatttgagcctctcagtatgaatttgcgagaggtgttgaaaaaatatggtaaggatgttggtcttcatattaaggctgtaagatcctatagtcagcagttgttcctggcattgaaactccttaaaagatgacaacatcctgcatgcagatatcaaaccagacaatattctggttaatgaatcaaagacaattttaaagctttgtgattttggatcggcttcacatgttgcagataatgacataacgccttatcttgtcagtagattttaccgtgctccggagatcattataggtaaaagctatgactacggtatcgatatgtggtctgtaggttgcaccttatacgaactctatactggaaaaatcttgtttcctggcaaaactaataaccatatgttgaagcttgccatggacctcaaaggaaagatgccaaataagatgattcggaaaggtgtattcaaagaccaacattttgaccaaaatctgaacttcatgtacatagaggttgataaagtgacagagagggagaaagttactgtcatgagcaccattaatccaactaaggacctgttggctgacttgattgggtgccagcgacttcctgaagatcaacgtaaaaaagtacaccagctaaaggacttgttggaccagatcctaatgttggacccagctaagagaattagcatcaaccaggccctgcagcatgcattcatccaggaaaaaatttaaacgagatgaagaaactccaagggtttgagtaattaaatacaaagactgaagaaatttcacagcagtttattattaatgtatataaacttataaatatttccgcagcaaatttgaggaagcatgatatatttgaattaacaccaagggtgatatttcttttagaaatgttagttaatctgttttgtgtcttatgtgaaatttcactgtagaaatgttttaattgccaagactgcacaaaattacagtgctaatgtatatggttgcagttcacataaaagacaaaagcatctgttatgagtagcagtgctgggtggttgatttgtttttagcagacttggcttcattttggtcttcagatacaatggccagcataaatgctgtttatattcacgttttcctaggtgtgtgtgtgcaggccacagcagcatgcccttggtgtagtcagtgccgaagggagtctgttccttcttgagcctgcctgcagggatgtctcctcttttaaagcaggttgtgtacaacattcagtacactgaaggtaagctaaaccatcaacatcaccagtgttttaagatgttattttattggaataattgaaaataagggatagctttgtggcagaatttcctgcatgtgtgataactgatcttgttttatttttggcattgcgactgtggcatagttacagttttctgttctgttcatcacatttaaaatttgaagcgaatgcgcttgatggatagagcgccttcagtgtactgtttcttattaacttactttttttaaatcaacttgctatagactttataaacattttgttaatacagttcttagtgacatagaaactgcatagttttcatttactaattaaaatgttgaggtctacttctgaaagtcctcatatttaaaagatagacaacataatgagatttttaactatttgtatgtcattttgaaagtgtactgctttatggtaaaagtgtttttcatttgttcattgtttgcattatttgtgatcatgttgtctttcaatacaggcataaaccttccactcttgaacaaagcagctgctttttaaaagcggtaattgcttctttaccttttatttcttttgtaaatgaagcttttctttaaaaatgtgactttaaggtgttgtctattgcataaacagttgacactcacttactgtaaagtggagattgttctactgcatgggaagtggaccgtgcaggtttctgtatgttctcagtatgcatcactagataataaagtcttttgtgaacaagggaaaaaaaaaaaaaa

SEQ ID NO: 456 - DNA, 2889 bp, Cricetulus griseus
aagatgtgtgtgtgttcaagtgctcagtgtctcgagagacagagtgcagccgagtgggccggcagtccttcatcatcacactgggctgtaacagcgtcctcatccagtttgccacaccccacgatttctgttctttctacaacatcctgaaaacctgccgaggccacacactggagcgctctgtgttcagtgagcgaacagaggaatcctcagctgtgcagtacttccagttttatggctacttgtcccagcagcagaacatgatgcaagactatgtgcggacaggcacctaccagcgtgcaatcctgcagaaccacaccgacttcaaggacaagattgttctcgacgtgggctgtggctctgggatcctgtcattttttgctgctcaagcaggagccaggaagatttatgcagtggaggccagcaccatggctcagcatgccgaggtcctggtgaagagtaacaacctgacagaccgcattgtggtcatccctggcaaggtagaagaggtctcattgcctgagcaagtggacattatcatctcagagcccatgggctacatgctcttcaatgaacgcatgctcgagagctacctccatagccaaaaagtacctgaagcccagcggaaacatgttccccaccattggtgacgtccaccttgcacctttcaccgatgaacagctctacatggagcagttcaccaaagccaacttctggtaccagccatccttccatggagtagacctatcggccctccgaggcgctgctgtggatgagtacttccggcaacctgtggtggacacatttgacatccggatcctgatggccaaatctgtcaagtacacagtgaacttcttagaagccaaagaaggagatttgcacaggatagaaatcccattcaaattccacatgctgcattcaggcctggtccatggcttggcgttctggttcgatgttgcttttattggctccataatgaccgtatggctatccacagccccaacagagcctctgacccactggtaccaggtccggtgcctcttccagtcaccgttatttgccaaggctggggacacgctttcagggacatgtctgcttattgccaacaaaagacagagctatgacatcagtattgtggcccaggtggaccagacaggctccaaatccagtaacctgctggatctgaagaacccctttttcaggtacacgggcacgactccatcacctccacctggctcacactacacatctccctccgagaatatgtggaacacgggaagcacctacaatctcagcagcggggtggctgtggccggaatgcctactgcctatgacctgagcagtgttattgctggcggctccagtgtgggtcacaacaacctgattcccttagccaacacagggattgtcaatcacacccactcccggatgggctccataatgagcacgggcattgtccaaggctcctcaggtgcccaaggaggcagcggtggctccagtgcccactatgcagtcaacaaccagttcaccatgggtggccctgccatctccatggcctcacccatgtccatcccaaccaacaccatgcactacgggagctaggtgcctccagcagcaacaccactgcgcactgacagcaccaggaaaccaaatgaagtccacgcccagtgcagctggtggctgtcccccttgttctggagaagcgtgaacacccggtcacagccctctttgctatgggaacttggacacttttgtacacgatgtcgccgctgccctcaagtaacccccagcccaccctttggccctgagtgcgtgtcgctgccatattttacatgagatcctgtcagggcagccctcatcctgttctgccctctccactctgacctggctttgacatctgctggaagaggcaagccccctcccaccccaccccactcttacagctgcacctgaacaggcaggaggaggccagtagctgccaccataagacctggcagcacccatcccccaacccgtccttgcacctacccctcacctagggtggcagcacagccagctggacctctcaactaccaggccacatggtcaccatgggcgtgacatgctgctttttttaattttatttttttacgaaaagaaccagtgtcaacccacagaccctctgagaaacccggctggccgggcccagccagcagcccctgtccctaggcccagaggttctaggtgaggggtggccctgtcaagccttcagggcggacgtaatcccctctcaccaaagggttcacctcacacttgaatgtacaaaactcccagctgtccaaaggcctctagcctctgcttcctgctactgtcctgtcctgagccctaaagtccccctccaccaaaacctggaacaggcagcccagagggaaagtcacctagggccagtggggtagacaaaaacctcaaggatctgtcacagaaggaaggagggcatcctctccctgatagctaacataggcctgtgtgtgcactccacattcatgctctacttcctcctctcaagacagcacccctgagaaggggcctagcaggaacctctccctccagacagaacaagaagaaaagcaaacaaggaaggaaaggcagtttctcccctgctcctttgccctagagtccccacctcagtggccagagccccacaggtactcctggcaatggctggacctgccctgtgccaccccctgacctgtaagggaaacagggcccacaggcaggctgggaaaccgggctcttctgtccatcagtaatatttcctgctcggctgccccccccacctttatataaattctctggatcacctttgcatagaaaataaaagtgtttgctttgtaaaaaaaaaaaaaaaaa

SEQ ID NO: 457 - DNA, 2888 bp, Cricetulus griseus
  modified_base (794)..(794): a, c, t, g, unknown or other
ggaaattcatttagtggtccatcgaatcctttagtgtctagatctagtaagtttcagaattcatcaatggaagatgatgatgatgtgtttttattgaacctgtacaacctcctccatcttctgcacctttggtcgctgatcaaagaaccataacatttacatcttcaaaaaatgaagaactaacaaggaaatgatcccaaaatccttccttcatcaaaagagttggcttctcagaagggcagtgtaagtgagacaattgtcattgatgatgaagaggacattgaaacaaatcaagggcaagagaagaattcctcaaatttattgaaaggagaccttctgaaactaaaaacagaacaaatgatgtggatttctctcctactttttcaagaagtaaggtaaacacaggaatgggtaatagtggtattacgacggaaccagactctgaaattcagattgctaatgttacaaccttagaaacaggcataagctcaccccatctttaacttcacagaccaagtctggataggaccttttaatcctggcaggatgaatgttgcaggagatgtatttcagaatggagagtcagcacctcatcataatcctgattcttggatctctcagtcagcatcatttcctcgtaatcagaaacaacaaggggtggaattctttatcaccagtggcctcacttcctaaacagatattccagcctcccacccagcaacaacccactaaaccagttaaaagtcacttgtgcaaactgcaaaaaacctctacagaagggacagacggcttancagcgcaaaggatcagctcacctcttctgttcaaccacctgcctttctctttctctcataaagatataactacaatgaaaggaacaattgttgctcaagtggattcaagtgagtccttccaagaattttgtagtacatcttgtctatctctctatgaggacaagcagagtcctgccaaaggaactctaaataaatcgagatgcacaatctgtggcaaactgaccgagaattcggcaattctttgcaaaccttttaacaatgacaaaagcaacttactgtaagcctcacatgcagaccaaatcttgtcagacagatgagaatttggaagacagaatatgtcccagtgcctattcctgtgcctgtagtaatgtccctgtgcctatgcacatgtacagccagaatattcctgtccctaccacagttcctgttcctgtgcccgttcctgtgtttctgcctgctccattggatagcagtgagaagatttccacctcagttgacagatcctcttgatacagaattgcttacaatgacagatatgatgactgaagatgggaaaacagaagcatcagatgtcaacagtgtaattattgagactgacataattggctcagatctcacaaagaactctgacccagatatacaatccaacatgcctgatgtaccatatgaaccagatttggatattgaaagagaaaagctgtatcaggataccagtctcatgatgatagttctgacaactcagaatgcagctttcctttcaagtatacatatggtgtaaatgcatggaaacattgggtcaaaactaggcagctccatgaagatcttctggtgttagatgagctaaaatcccctaaatcagtaaagttaaaagaagatctactctctcataccacagctgaactcagctgtgggttagcccattttgtcaatgagatccgacgcccaaacggagaaaattacgcacctgacagcatctattacctctgccttggtatacaggagtacttatgtggtagtaatcgaaaggacaacatatttattgatccaggataccagatgtttgagcaagaattgagtaaaatactccgaagttggcaaccaagcatccttccagatgggtcaatattctctcgggttgaagaagactatctctggaggataaaacaactaggatcacactctccagtagctcttttgaacaccctgttctactttaacactaagtattttggcctgaaaacagtggaacaacacttaagactttcctttggcaccgtgtttaggcattggaaaaaaaatcctttaacaatggaaaacaaagcatgtcttcgttaccaggtgtcttccttatgtggaacagacaatgaagataaaattgctactggaaaacgaaaacatgaagatgatgagccagtatttgaacaaattgaaaacacagccaacccttctagatgtcctgtgaaaatgtttgaatgctacttgtctaaaagtccacagaatcttaatcagagaatggatgttttttatttgcaaccagaatgttctagttctgcagatagccctgtgtggtacacatctacttccctggaccggaacaccctggaaaatatgcttgtacgggttcttctagtaaaagatatttatgataaagacaattatgaactggatgaagacacagactaaaaaggaccgtttcagaagctatgggataacacagcattagatagtcatgctgctagatctttacaggaaaacatttcaagtttactctttctgttttaagttttgtagcagtgtacccacactgggtattaccgtgtaaataatctgtgagtgaaagttaccattattctatgtagtggttttaggatacttaacaaatacatcaaattctttttattattatttatttgattaggtatgtttgtaactttttacattacaaaatatgaagagaatgtgccatgtataagttttcttgttgcactgctctactgtggcaaagctccctccaaagggcgtgctttactgcgttcttgaccagacggttgtgtaatgggtagcactactcaatttagaacttgcagtgtcttt

SEQ ID NO: 458 - DNA, 2886 bp, Cricetulus griseus
tgggagttggaaaccaagtccatcttgggtctcctccgacatggagatgacgtggatggctccttggtggacaccttgcagcatcttattgctaaaggctctatgtatgaggaacttctggccagaactgaagatactctacacatggatgttgaaagtgtttcgaacctggagtccttccaaaatgtcctcagagctgggcttcaggcaaagattcaagatgctaaggagggagtccagatcacgatggtagaattgtctgccctgtggaagaacttaagtggtgaatcaccggaacaagacgtgaggctgcagctggaagaggcaaagaagaaccttgagtcctacatcatgagagcccagcagttacttggtcagagagcacaccctggtggactcatttcaaagtacaaggaagcactggagattttttaataccaacagtctggccaagtatctacaagctgttgaagaactgaagcatcatgccccgagtgatgagaagctgcgcctggaagagcagtatcgcgatgcatgtgccaagtgggagcctctccatcatgaaatttctttatatatccaacaactaaagatagccaagggaaagaaggaaagcttagagacaatattgctaaaactttgaaaagcaaataaataaagagaagaagcacaactgagaatggcagaagggatgcccacagtgaggcactgcttgagataccagaaaaccagccgtcaactgaaaaggcaatggagccccttaagaattttagccagacaccagaattaaagacctccagcaagaaggaagcattgtggagaaggaaggaaaggactgcaaggcactgagtgacttatgggagaggtaggagaaggagttgtgctctcctttgtgtctccacctccccttctgcacagtgtctgtccaggacctgcatcccgtggaggttgatggcattcgtcagaacctgcaggatatccgagattccatagcacagcagatgagaatatgtgcccatttagaagagccgagtgactctgtaccaagggacttacacaccctagatcagcgtgcaatacaggatattgtgctgaaatgcagactccagctggagaccatgaaccagaagctggagatgagtgaagctaccctggaggctctggaagactttttggcttctctgagagcagtgaagctctctgttgagtcccctgcagaccctcctacctcgaatgcaccagcaggaagatgaacagctggacacactaactggacagcagccaggtgccttcgacagatgggagctgattcaggcgcaagagcttcacgggaaactcagaataaaagggaacgtgcagcagctgaattctgacatcggcaacatcaccgcttggcttgaaaaactgaagcagagctggaagccctgaggctggcagagcctccctccgatatccaggaaatagcactcagagtgaagagactgcaagagatattaaaagcctttgatacctacaagaccttaatggtctccgtcaacgtgagccacagggagtctctgccaagtgagagccccgaatccacagaactccaaaataggctccaccagctgagcctgtcctgggacacggtccagggtgagatggacagctggagaagggacttacgacagtcactcatgcagtgccaggacttccaccagctgagtcacaacttgctcctgtggctagcaagcgtggagagccgaaggcagaaggcacttgtcaccagcccagaggcagaccgccaggccctcctggagtgtcagaaagagctgatgcaactgggaaaggagttggaagaccatcagcctcaagtcagctccttgcaggagattgcctccagccttctcattaaggggcacggagaagactacattgaagccgaagagaaggtccacgtaatcgggaagaaactcaaaacagttgcgtgagcaggtggctcaagatctgatgtcctttcagggaagcctgaatccagacccctctctggacagctttgatgaagtggactcggggctaccgcctccagctgcctctgcagaggaagaggcggcagacagcaggatgtcccacctctatggccctggcagctcacagccaagacgctccttcctctcaagggtgatcagggcagcgctacccctgcagctgctgctcctgctgctgctgctcctggcctgcctgctgcctgcctccgaagaagactacagctgcacccaggccaacaacttcgcgcgctccttctaccccatgctgcggtacaccaacgggccacctcccacctagaggattctgccagccgcagtgccatgccaacagcctattggccacatgtgctcagcttgtggtaccagaccaacctgtgagtgactcctagccttgacaagatccagggacggttgattcaacacattttaaatgttgagaattggttccctccagtcggctagcagtctgcactcccagttataaataaaaacgtcctgttctgtacctgggtcagctcttttatattgctttaaaattttttaaagaaattttattgcatggatgtggttatttgtgcatatattttaaccacgctaaatctgtatggataatgtaaactttgattttaaaagatttttagcttgagctttggactaatgtacagtaaatgccaaactccagacttgatagggatgttttataagttaatttttttaagaactctcatgttttaaaagagacacattgggtctggttgagctgtttggctaccagggcttagtaaagaaacttggaactatttgtatatgtacaactcagatgtttctcattaaaaaaaaaaaaaaaaaaaaaaaaaag

SEQ ID NO: 459 - DNA, 2885 bp, Cricetulus griseus
agcactgtgcaaacccaggcaagaacgtgtagccataaagcgcatcaacctggaaaaatgccagacgagtatggatgagctattaaaagaaattcaagccatgagccagtgcagccaccccaacgtagtgacttattacacttcctttgtggtcaaagatgaactttggctggtcatgaaattactaagtggaggttccatgttggatatcatcaaatacattgtcaatcgaggagagcacaagaatggtgttctggaagaggcaataatcgcaacaattctcaaggaggttttagaaggtttagactatttgcacagaaatggtcagatccacagggatttgaaagctggaaatattcttctgggtgaggatggttcggtacaaatagcagattttggggtcagtgcattcttagcaacagggggtgatgttacacggaataaagttagaaaaacatttgttggcaccccatgctggatggcccctgaagtcatggaacaggtgagaggctatgacttcaaggctgacatgtggagttttggaataactgccattgaattagccaccggagcagcgccctaccacaaatacccaccaatgaaagtgctaatgttgactctgcaaaatgacccgcccactttagaaactggagtagaggataaagaaatgatgaaaaaatatggcaagtccttcagaaagttactttcactgtgtcttcagaaagacccttccaaaaggcctacagcagcagaacttttaaaatgcaaattcttccagaaagccaagaatagagagtacctgattgagaagctgctgacaagaaccccagatatagcccaaagagctaagaaggtaaggcgagttcctgggtcaagcggtcacctccataaaactgaagatggagattgggagtggagcgacgacgagatggatgagaagagcgaggaagggaaggcagctgcctctcaagagaagtcacgaagagtaaaagaagaaaacccagagatttcagtaaacgctggtggcatccatgagcaaatacagtccctctccgtgcatgactctcagggccaacccaatgctaatgaagactatagagaagggccttgcgcagtcaaccttgttttgagactaagaaactccagaaaggaacttaatgacatacgatttgagtttactccaggaagagatacagcagatggtgtgtctcaggagctcttctctgctggcttggttgacggtcatgatgtagttatagtggctgctaatttacagaagattgtagatgaccccaaagctttaaaaacattgacatttaagttggcttctggctgtgatggggcggagatccccgatgaagtgaagctgatcgggtttgctcagttgagtgtgagctgatgtatgtcccttgccgtcaccctcatctatcatgccccgcctccgttccagccccttctttggccccctcctcccccacccctcactcccaattcccaacaaataagaagattgtgaagaggctggcttcgacgaagtgggataaaaaaaaataataataatttttaaaaaacctacagcactctgagttctgctttattctccagcaatccacagtatgagaacaggcaaatgctacagctgcacaaaactgttgctgatttctttccaggaggccatttaatattcctagcagtcgatttggcttgcccgcccctaagtgaggagtctgaaacacactcaggtggtcctatctcttggtaacaaaaggagcctcctatctgaagccttttctccttctattgtatttctgttaaatactttaattgtacatctgacaatactgcctcttttatgttgtacttagaaattaatatacttatacaattaagatttattagccaaacttgaattctagttttaaaactgactgtgaattttatttttcatatatttatgctttgcacaccttagctatgagggaaagaaacggttttgattccatgcttcttgcagttgatctcttgttatttaaacaaaattttcagatctatctttggagtatttgtaacttctaatttttgaaatgactgaattaagaatttggatgtttgctcttttggtttgtttgcctaaaatccagtccacaatccagttgtctcctgggagagggaggtgccttgcaaactttcatattatgaatgtgcctgaggctgctttattctggaatagtctcagatctaaaatccgcactacataaggtgacatccttaacttctgcttcatcggaccatttagaatactgcgaagatgctgccgttctgttagactgctcactgtacccctgtctctgattcggctctccggaagggtggcatttgttgtttttaagatgacagatgtgacagcatcagaatcagagttttacttgaaactctgcagatgcacaggtggtatgaaaaataataggaagggtttcgtgcaatgacaaaaggtaaaattgctgtaaacgttcaagaataaatatttccaacccaagagccttctgcttgactatgtattatgaacctagtaaaccttaggattttcaaatttggagtctaaaccttcaaggaggtgggctcccaggatggtaccattgctctttcctagctaaccctagatacggcagctctttaatgtactttaaaagcaaatatatattactaaggaaagaagttatttataattgccttgtcataattgttaaggtgtcctagaaccatttgcatacaatttaatgtaattccattccattctattgtttacacaattactcaaagatgactgcaaaggtaaaaggaaaataaaagtgtattgcacagtgaaaaaaaaaaaaaaaaaaaaa

SEQ ID NO: 460 - DNA, 2885 bp, Cricetulus griseus
  modified_base (797)..(797): a, c, t, g, unknown or other
aaaactacacccttgaggagacaaacagaaattaacccttcaatatccaattcagatgaagaaagtaatgaaactattaaagagaaacaaaagctgtcagttccaataaggaaaaaggataaacgaaattcttctgactgtgctgttggtcaccgtaagtctcctaaggtgcctgaagctaagcaagcagagattgtagatcaaaattcagattctgatgaaatgctagcagtccttaaagaggcaagccagatgagtcacagctcttcttcagacactgacattaatgaaacacagatgaatcacaaagtcaaaacagggaaagatgataatggaaaaaggaaacggaaaaattctagttctgggtcagattttgacattaaaaaggaaagtcagttgaaatgtctattatctctaaaaagaaacgccaaaactactccgagtcctctaactatgactcagagttagagagagagataaaagccatgagcagaattggggctgccagaactgatgactgaggaagttcagaagataataagaaacggaagaaacaaagaatgtcaagccaaaaacaaggccaagcaatgccaaggagaaaagaagaaactccttaagaacaaatattaaaaggaagcaagcaaacgttacttcttcgtcttctgatataggagatgatgatcagaattctgcaggtgaggagagcagcgatggacagaaaataaagcctgtgactgataatgtagtgctgccctcacacgctggattttgtcaatcttcaggagacgaagccttanctaaatcagtgcctgtcacagtggatgatgatgatgatgatgatgatgacacagacttttgaggtacaaactgactgtgagtgatggagaatctggagaagaagaaaaaaagacaaagcctaaagaacataaagaaaccaaaggaagaaatagaaggaaggtgagcagtgaggagtcagaagacactgactttcaagagtcaggagttagtgaagaagtgagcgaatctgaggatggaacagcggcctagaacaaggtctgcaaagaaagcagaattggaagaaaatcagcggagttataaacagaaaaagaaaagacgacgcattaaggttcaagaggattcatcaagtgaaaataagtctttccgagttgttgatcaacagcaggttgaacgtcattttaccatgaatgagcttactgaactttatacttttgagccagacttactagatgaccctaactcagaaaagaagaagaaaagggatacccccatgctgccaaaggataccatacttgcagaacttcttcagatacataaagaacacattgtaggatatcatgaacatgattctcttttggaccacaaagaagaagaggagctaactgaagaagaaagaaaagttagagtgtattgaatggtctgattgttcttttgaccgaagtctgaaactgggctcctgctatattatctctgtagtattaaaagttagatctaagggttatcttagacacagaagcgtgtgcaatattcttaaatactactaaagttggaggagccttggagttagcattgtataaacagccttaagtacagttgaatacaaggaaattcctttttcttatttagtctttctgccattttttattttcagttgtatgtgctgaaataattactggtaagatttcagggttgtgggttattttctgcacacgagtttcttgtctcctggcactaatggaaacacatctgtcagccattgtgccagtgctggtgcttcatcctgttgctggcagtgggatgcaaactaagaaaatcaagttagattaggctcacaccctgttttataaacatcaaaatggcagaaccgttgctgactttaagttcacatgaggaatgtgctttaacagcactccccagtactgtcagtattgcaaaataattcctcttaaagattaggatcactggcttctatgctcttctttatgctaatcaccatgcttttttttcccagttcctttacattttagggcgaggtgtgtgtttactttaggaaagaaaataaaaagaagcaagatttatgagataaatatttgaaagtatgctctggccaactgttatcgtaatactttaaaactgatttattagacctcggaattttcaacatggtctaattatttactcaaagacatagatgtgaaaattttaggcaaccttctaatctgttttcacaatggatgaagctataacttaaagaatagtaattagaaggactaattggaaatcagagtttgaaataaatcttggaccactttgcatacactcttctcacttgacattttagcaacatgatgtatgtactttgagtataacgtcaacttttaacaaatatttaaagacaaaaatcacataagatactaaaaagctcatttttatatttgttttagatgttttaaatagttgcaatggcttaaaatgacgatttaaaaatgttgcttgtaatacagttttgcctgctaaattctccacattttgtaacctgttttatttctttgggtgtaaagcgttttggcctagaattgtgatattgtatgttttgtcccagttgtatagtaatgtttcagtccatcatccagctttggctgctgaaatcatacagctgtgaagatttgccttggtttctgttagactgctcttcagttatgtattgagtatcttaagtactgtagaaaagatgtcacttcttcctttaaggctgttttgtaatatatataaggactggaattgtgtttttaaagaaaagcattcaagtatgacaatatactatctgtgttttcaccattcaaagtgctgtttagtagttgaaactt

SEQ ID NO: 461 - DNA, 2883 bp, Cricetulus griseus
ggccttagcctatgccaaggacaaagagctggtggcatcggctggattggacagacaaatattcctttgggatgtgaacactctaacagcactgactgcctcaaataacactgtcacaacttcttctttaagtgggaacaaagattccattttatagcctggccatgaaccaactgggaacaatcattgtatcggggtccactgagaaggttctaagagtgtgggatccaagaacctgtgcaaaactcatgaagctgaaaggacacacggacaacgtgaaggcactgctgctgaacagagacggcacacagtgtctgtctgggagttctgacggaacaattcgcctgtggtcccttggccagcagagatgtatagcaacgtaccgagtccacgatgaaggcgtttgggctctacaagtcaacgatgccttcacgcatgtatattctggaggaagggacaggaagatttactgcacagacctaagaaaccctgacattcgggtgctgatttgtgaagaaaaagcaccagttctcaagatggagcttgacagatcagcagatccccctcctgcaatctgggttgcaacaacaaagtccacagtaaataaatggacactgaagggaattcataatttccgagcctctggtgattatgacaatgactgtacaaatcccataacgccactctgcacacagcccgaccaggttattaaagggggcgctagtatcatccaatgccacatcctcaatgataagagacatatactaaccaaagatacgaataacaatgtggcttactgggatgtgttgaaggcatgcaaagtggaggatttgggcaaagtggactttgaagacgaaattaagaaaagatttaaaatggtgtacgttccaaattggttctcagtagatctaaaaacagggatgctgacgattactctggatgaaagtgactgctttgctgcctgggtttctgcgaaagatgctggcttcagcagtcccgatgggtcagacccaaaattgaacttgggaggacttctcctacaggctctccttgagtactggccgagaacacacgtgactcccatggacgaagaagagaatgaagtgaaccatgtgagtggggagcaggagagcagagtccagaagggaaatgggtatttccaagtgcccccccacacccctgtgatatttggcgaagctggaggtcgcacactgttcaggctgctctgccgggattccgggggcgagactgaggcgatgcttctcaatgagacagtgccacaatgggtaattgacatcactgtggataaaaatatgcccaaattcaacaaaattcctttctacctccaacctcatgcatcttcaggagcaaaaactttaaaaaaagacagactctctgccagtgacatgctgcaggtccggaaggtgacggagcatgtctacgagaagattatcaacctggataatgagtctcagaccaccagctcttctaataatgagaagccagagcaggagaaggaggaggatattgctgtgttggcagaggagaaaattgaacttctgtgccaggaccaggttttggacccaaatatggacctacgaacagtaaagcacttcatctggaagagcggcggggacctcacactccattaccgccagaagtgcacgtgaaggggggccaagtcctgggttattcatcaaccttcctctggggccctgagtagtcctaggaagcccaccaagccctaccgggagcaggagctccaccggccgatttggtggagtcactaatcgagatgtaatatagaaccaggctccatgcatagattaaggtgtccccagggactcagtgtgaggacaggagccccaagcagtccttcgaggtgtgcagagacctacaacagccgtgcggacttcactgaccccttttgaaggccctctgtctcttagcacttgttagagaacatcagcggggccacatctgtcaccgcgtttcaaacccatgagttctgcggcttctctaagtacattccactcatgcagtacctatgaaggctttttccaaatttgtcattacacaaaaaaaaaaaagaagttttctatcatcatgtaagagttttgttttaattgggaatcagtgagcagcacgatactgtccacttaagaccatgctgaagtctcagtttcattcaaatgctacctaaagtttgtgttattagagtaaaaagatctcacagtcagttggtttgatatttatattgtggtccatgtttggttttccagttttatgcgtgggcttttcctgtacctgcgtccagatcttttcctgtctttctaacaatcataagctttcatagactcacttggacttggaattattaacttattggggataaacacttcacctttgacagaaaatactttggattcttctcaaggtccttctcattcagataactgtggagctcagacatgccacggcttccacaccctcaagtgagcaaagacatttcccaggtgttaaaatgttctttcctcagagcaactggcgttttttcctcttacagaagtcctttttatctctctgtgatacaacagtgcacttttggtgcatctttttcagtgatagttatgagctaaaagcaaggggtggggcgcccgcctctgtttgcaggaggggccaatgcactaaatgggttttaccagttcacggcccagtgctgagccataggcagttgggcccctgtggtggattttacccccagcatggttgttccttttttcccctctagtcaaaatcagtaagaagtttccagaaaattggacagtctgcaatgccaaaaaggtcagagtctgtatttcaagttgtatagaataaagcttt

SEQ ID NO: 462 - DNA, 2883 bp, Cricetulus griseus
actaatgatcagagatgcaattgaccggaggttgaagctgttgacagtgaatatcagcttgcaagaccttctgatgcaaacagaaaagaaatgttatttggaagcctcgctagacctggacatcctatggggaaatttttctggggaaatgctgagacactcaagcatgaaccaaagaagaataacattgacacacacgctagactgagagaattctggatgcattactactctgcccattacatgaccttagttgttcagtccaaagaaaccctggatactttggaaaagtgggtgacggagatcttctctcagataccaaacaatgggcaacctaaaccaaactttggccatttaacggatccttttgacacaccagcattcctcctcaacagcaacattacagggtgaaaccactttcattatatttcctggctggttggacatgaaggcaaaggcagcattctttcttaccttagaaaaaagtgctgggctcttgcattgtttggtggaaatggcgagacaggttttgagcaaaattcgacttactctgtgttcagcatttctattacattgactgatgaggggtatgagcatttttttgaggttgctcatgctgtcttccagtatttaaaaatgctgcaggagctaggcccagagaaaagagtttttgaagagattcagaaaattgaggataatgaatttcattaccaagaacagacagatcccgtggagtatgtggagaacatgtgtgagaacatgcagctctacccacttcaggactttctcaccggagatcagcttctgttcgaatacaagccagaagtcattgctgaagctcttaataagctggttcctcagaaggcaaaccttgttcttctgtctggtgctaatgaaggaagatgtgatctcagggagaagtggtttgggactcagtacagtatagaagatattgaaaactcttgggctgaactgtggaagactaattttgacttaaatccagatcttcatcttccagctgaaaacaagtacatagccacggactttacattgaagccttttgattgccctgaaactgaataccctgctaaaattgtgaatactccacaaggttgcctatggtataagaaagacaacaaattcaaaatccccaaagcctatatacgtttccatctgatctcacctttgatacagaagtctgcagtaaatgttgtcctctttgacatcttcgtcaatattcttactcataaccttgctgagccagcttatgaagctgacgtggcacagctggagtataaactggtagctggagaacatggtttaattattcgagtgaaaggattcaaccacaaactacctctgctctttcagctcatcattgactacctggctgagttcagttctacacctgctgtcttcacaatgataactgagcaactgaagaagacctacttcaacatcctcatcaaacctgagactctggctaaagatgtgaggcttttaatcctggaatattcccgctggtctatgattgacaagtaccgggctttgatggatggcctttctcttgattctctgatgaactttgtcaaggattttaaatcccagctctttgttgagggcctggtacaagggaatgtcaccagcacggagtctatggatttcctgaagtatgttgttgacaagctgaacttcacgcccctggagcaggagatgcctgtgcagttccaggtggtgcagctgccaagtggccaccacttatgcaaagtcagagccctgaataaaggtgatgccaactctgaagtcactgtgtactaccagtcaggtaccaggagtctaaaagaatacactcttatggagctgcttgtgatgcacatggaagagccctgctttgatttccttcgaaccaagcagacccttgggtaccatgtctacccgacctgtaggaacacatctgggattctaggattctctgtaactgttgggagtcaggcaaccaaatacaactctgaaactgttgacaagaagatagaagagtttctctccagctttgaggagaagattgagaacctcactgaagaagcattcaatactcaggtcacagctctgatcaaattgaaggagtgtgaggacacccaccttggggaggaggtggacagaaactggaatgaagtggtgacacagcagtacctttttgaccgccttgctcatgagattgaagcactgaaatctttctcaaagtcagacctggtcagctggttcaaggctcacagaggacctgaaagtaaaatgctcagcgttcatgttgttggatatgggaagtatgaactggaagaggatggcgccccttttcgtgaggacttcaattctggtgaagggatgcagctgacctacctgccaccctcttctctcctggcagactctaccatccccattactgatatcagggccttcacatcaacacttagcctcttcccctaccacaaaatagtcaaataaactgcagtctcattggcctgaagtaacgtgtattttaaagacgtgtgtgaattttatggagttacactacttactgccttagggcttccgttggattttttcgatggtaacctaggatttgttttacttttctctcctctgcaagactaacccagggttactgcactggatggcaatgagctagtagccccagacactcatgtcagcagcttgcctggcctgtgtcctctgaggaggagaacccagttctcgtgtgcctacatgtaactaatttgttatagcaccaaactgcccttgttttggttttttaatgtattttaaataaacatagttctgtatttcccttcagatcaagccatctgatgtggctttttttgggggtgg

SEQ ID NO: 463 - DNA, 2881 bp, Cricetulus griseus
  modified_base (21)..(21): a, c, t, g, unknown or other
  modified_base (25)..(25): a, c, t, g, unknown or other
ggtgaatcatgagaagaatcngaangtccacatggagtctgaggcctacgaaaccccggagaacatcgtgcacggcagtggaagccagctttcgatcatgttgctgagtgcctgggggacttcatggagaaaagaaagatcaaggacaagaaattacctgtgggattcacgtttcttcccctgccgacaaaccaaaatagacgaggctatcctgatcacatggacaaagcggttcaaagccagcggtgtggaagggacagatgtggtcaagctgataaagccattaagaagcgaggggactacgacgccaacattgtagctgtagtgaatgacacagtcgggaccatgatgacctgcggctatgatgaccaacagtgtgaagttggcctgatcattggtactggcaccaatgcttgctacatggaggagctgcgtcacattgacctggtggaagataaggaaggcattcaacatgccaaggaaatcttaacccgcctgggagtggagccatctgacgatgactgtgtttcggtccagcatgtatgcaccattgtctcctttcgctcagccaacctagtggctgccacactcggggccatcttgaaccgccttcgtgacaacaagggcacagccaggcttcggaccacagttggtgtagatggttctctctacaagacccacccacagtattcccggcgtttccacaagaccctgaggcgcctggtgcctgactccgatgtgcgtttcctcctctcagagagtggcagtggcaagggggctgccttggtaaccgcagtggcctaccgcctggccgagcagcaccggcagatagaggaaaccctggccaacttccgcctctccaagcagaccctgatggaggtgaagcaaaggatgcggactgagatggaaatagggactgaagaaggagacacacaacaatgctaccgtcaagatgctgccttcctatgtccgaggcatcccagatgggtctgagaatggtgacttcttggccttggatcttggaggaaccaatttccgtgtcctgctggtaaagatccgcagtgggaagaagagaacagtggaaatgcataacaagatctactccatccctatagagatcatgcagggcaccggggaagagctgtttgaccacattgtctcctgcatctccgacttcctggactacatggggatcaaaggcccccggatgcctctgggcttcaccttctcatttccctgcaatcagacgagcctggattgtggaatcttgatcacctggacaaagggtttcaaggccactgactgtgtgggtcatgacgtagtcactttactgaaggatgcgataaaaaggagagaggaatttgacttggatgtggtggctttggtcaacgacactgtaggcaccatgatgacctgtgcatatgaggaacccacttgtgaagttggactcatcgtagggactggcagcaatgcctgctacatggaggagatgcggaatgtagagatggtggaggggaaccagggccagatgtgtatcaacatggagtggggcgcctttggcgacaacgggtgtttggatgacatcagaacagacttcgacaaagtggtggacgagtactcactaaacgccgggaaacaaaggtttgaaaagatgatcagtggaatgtacctgggtgagatcgtccgtaacatcctgatcgacttcaccaagaaagggttcctcttccggggacagatctctgagccactcaagactcggggcatctttgagaccaagtttctctctcagattgagagtgaccgattagcactgctccaggttcgggccatccttcagcagctgggtctgaacagcacgtgtgacgacagtatcctggtcaagactgtgtgcggggtggtatccaagagggccgctcagctgtgtggtgctggcatggctgccgtggtagagaagattagagagaacagaggactagaccatctgaacgtgactgtgggagtggatgggacgctctacaaacttcatccacacttctctagaatcatgcatcaaactgtgaaggagctgtcaccaaagtgcactgtgtccttcctcctgtctgaagatggcagtggcaagggggctgccctgatcacagctgtgggcgtgcggctcagaggagatacgacctcctaagagccaggatcctcccagcccccagcccgccacccttctagcactcctctctagaaccgatgaccccccattccacccagttccacccagcaagccctgccgggagacccagcgccagagcccacaatgcggcagggggaggaaggggagcacagtaacggaatataatatagaatataccacacagagtgcgtgctgtcggtgacctctcgcctggacccccctcagcccccaccctgccactctgcatgattcaagttcgacctggccatgctttgcccatgcgtgaatgtagtggcaccaagtctacggcagcccctgtgtgaagtgtattatcaccagcagacactgcctggactcctgcccacaggggcctggcctgaagggcgagtgtggacgtgacactgctgtctccttcccctcctagcaccctcgccgcagcctgccatcccgtctggatgtaccgatgccactgaattgtgtgtccgtggaaccagtcctagtcacattatgacagtcttgcattttgtgtgtatcgtggtggtggtggtggtggtggtggtgtaggtgggcagtcctgtgggaaaacatcttgtctccatcttgatagaaggaaccaacccacaaaacaacgccatcaccggaatctcccatcgctttagtgagccttgttgttcgactagtaaactttgtactgattcaaaa

SEQ ID NO: 464 - DNA, 2881 bp, Cricetulus griseus
actgaggctcctgttcttcccatgcccaggagggacaaggatgaacatgactcaagcccgggttctggtggccgcggtggcggcgctggtggtggtcctcctctacgccgccatccacaggatcgaggagggacacctggccgtgtactacaggggcggagccttactaactagccccagtggaccaggctatcatatcatgttgcctttcattactacgttcagatctgtgcagacaacactacaaaccgatgaagttaaaaatgtgccttgtggaacaagtggtggagtcatgatctatattgaccgaatagaagtggttaatatgttggctccttatgcagtgtttgacattgtgaggaactacactgcagattatgacaagactttaatcttcaataagatccaccatgagctgaaccagttttgcagtgcccacacacttcaagaagtttacatagaattgtttgatcaaatagatgaaaacctgaagcaggcactgcagaaggacttaaatgtcatggccccaggtctcactatccaggctgtgcgtgttacaaaaccaaaaatcccagaagccataagaagaaattttgagttaatggaggcagagaagacaaaacttcttatagctgcacagaaacaaaaggttgtggagaaagaagctgagacagagaggaaaagggctgttatagaagcagagaagattgcacaggtggcaaaaattcgttttcaacagaaggtgatggagaaagaaactgaaaagcgcatttctgagattgaagatgctgcgttcctggcccgagagaaggcgaaagcagacgctgagtactatgctgcgcacaaatatgccacctcaaacaagcacaaattgaccccggaatatctggagctcaagaagtaccaggctattgcttctaacagtaagatctactttggcagcgatatccctaacatgttcgtggactcctcttgtgctttgaaatattctgatgttaggactggaagagaagtctcccatccccctgaggaggctcttgaaccctctggagagagccccatccaaaacaaggagaacacaggttgatgcaagaggtggaaatgttctcccatatcaagatgtgacccaaggggctaagtgggaacagtggttatgtggactcttcaaattcacagagcatttgtgttctgttgtgactctgttgtcatagtcctggtttgccagctgactgcagggtaggaccagctgtctggcactcaaatggtctttgcagtcacagttttatcaagtaccttgtatttgttcctttgtaagccagcgctcatgagtgagggaaagtgatgctaagatactgcctgcactggggtgtcaaacactatataacgagctgaggtctattgaataatgtttacattggtctctggggacgtgtgtgctcagacattgaagagaaaggaggccagagaaaggaccacccgaagatggtaagttaaagaagactgtgacacttgagacccaggttctctttaaagtcctgttccagcattcctccatgtgattaacagccgggcctctgggttcctaggcaatgatcttccagttgagcaaccatttacttgacacaaattgtacctttctgttttcctacagtcaggttggtggtctacagggacacacactttgccacccaaccagaggtttcttgcagagattcctgatcactagtttattgcattagtaaactcagagatcaagaaagcagctggaatttaagggaaataaaacctgcactgcaccaaagctgtggggccctgtgtttcctctattgggtgatgatgttagcatcacttcccagcccatgtgtgactaaagtgcttggttttagccacagacaactacttaaatgtcacatcttggctgagcaaagttgggacaagggtttaacctgacataggagcaatgtgcaatccctaattcactgcacagtattatataattgcaggacatttgttattttaaaactggatttggggaacattcatttgccccagcacttctagcaaaaggccaaggttctagggctgccatggttgctaacacactgagtctccttaaagtcgttcacaaagtgtggaaccaagtaacccagagagcatactcggccatctttgtagccctccctctgaccccaggatgctggtatcaaagttgcttttccaactttcacctctaggaaatcagaattccactgactttctgggcagccattgaatttattttctgtaagagttaacctgtggctacaggagatctacttcatcttgactttttcctcctatcacatgaactttcctggaacattacgctgcacaggtagacctgagtctgcccagcttgttgacagctcttgtgtatactgtgttgaagccagacggaaaagaaatggggccacttcctgaaaactctcaaccgttgcccacaacagctgaagggttgtgccaaacattttcttgggaaaggaaagcccggatttgaatgggtctttcccccaggccttatagtgtagaggcatttgtaatatggagaaaataattttctcatttcattatataaattacccttaaatgactttggtgttctttagcccttagggaagtaccattgtcaaagattaaagaaagcacttccagttgagctccctatggggtgaccttccctgtacctgcccactcagtgaactaagtctggccatccttcagggatgttccttttggtaaatatacactgtaatctttaagtctaaatttatatgtgaaagctacctttttaaaaataagaacctaaataaaattattttcctaccaaaaaaaaaaaaaaaaa

SEQ ID NO: 465 - DNA, 2880 bp, Cricetulus griseus
gagctgcgccccgagctcgggaagccggcgtcagcttctgtcggaaccacgcgagcgtcagccgagctcgggaagctaccgcccgggctccgttcggcctcggtggccgccgctgcagcacagtttattgaaagccatgtaacagaccaagagcgttgaagtgagccagcacagagggtaacccagcaacgagggacacgggtttgaggaattaacttgctgaaatcccgagctgggcctggaagcctggctgcttgtgtgagtggccctcacatcctgtctgcaatgggctgctgacaggagaactggactgtggaatgtgaacgaacggcctgagctcgctgcggcaagaaatggacgaagaggaactggagcatccaaactcctccccagaaaaacgctattttcccgaatccctagattccagtgatggggacgaggaaggggtcctggcctgcgaggatctggagctgaacccttttgatggcttgccctattcatcgagatattacaaacttttgaaagagagagaagagcttccaatatggaaagagaagtactccttcatggagaatctgctgcagaatcaggttgtggtcgtgtcaggagacaccaagtgtggccagagctctcaggttcctcagtggtgtgctgaatattgcctttccatccactaccagcacgggggcgtgatatgcacacaggtccacaagcagacggcggtccaactggccctgcgggtagccgacgaaatggatgtcaacattggtcatgaagttggctatgtgattccttttgagaattgctgcaccagtgaaacaatcctaaggtactgtactgatgacatgctgcagcgagaaatgatgtccaatcctgttctgggtagctatggggtcatcatcttggacgacgtccaagagagaagcatggcgactgacgtgttgcttggacttcttaaggatgtgttactagcaaggcccgaactgaagctcataattaactgctcacctctcctcatcagcaaactcagttcctactatggaaacgtgcctctcatagaagtgaaaaataagcaccccgtggaagttgtgtacctcagtgggggtcagaaggattccttcgagtctattttacgccttatctttgaaatccaccactcgggggagaagggtgatgttgtagtcttcctggcctgtgaacaagatattgaaaaaacctatgaaattgtgtgtcaggaaggttccaacttaaacccagatctaggcgagctggtggtcattcctttgtatcccaaagagaaatgcaacctgttcaggccatcggatgaaaccgagaagagatgccaagtataccagagaagggtggtgctgaccaccagcagcggggaatctctgatctggagccacacggtcaaatttgttatcgacgttggtttggaaagaagacaggtatacaacccccgaatcagagccaactccctcgtccttcagcccatcagccaaagccaagctgagacccgcaagcagcttcttgggtcttctccctcaggaaaacttttctgtctgtacactgaagaatttgcctccaaagacatgaggccccttaagccagcagaaatgcaggaagccaacctgaccagcatggtgctcttcatgaagagggtggacatcgctggcttgggccgctgcgacttcatgaacaggccagccccagaaagcctgatgcaagcactggaagatttagattacctggcagccctggacaatgatgggaatctctccgagtttggaatcatcatgtctgagtttcctctggatccacagctctcaaagtctatcttagcatcctgtgaatttgactgtgtagatgaaatgctaaccatcgctgccatggtaacagctcccagttgctttttgcacgtgcctcatggtgctgaggagactgctgagacttgctggaaaacattcttgcaccctgaaggtgatcactttacactcatcaacgtctacagggcctaccaagacacagctctgaactctaccagtgagcactgtgtggagaagtggtgtcatgattacttcctcaactgttctgctctcaggatggcagacgttatccgagcagaactcttagaaattatcaagcggatcgagcttccctatgcagagcctgcctttggctccaaggaaaatagtctgaacatcaagaaagcactgctctctgggtattttatgcagattgctcgggatgttgatgggtcaggtaactacttaatgctcacacataagcaggttgctcagctgcatcctctctcaagctactccatcaccaagaagatgcccgaatgggtcctcttccaccagttcagcatatctgagaacaactacatcagggtcacctcagcagtctctcctgaactatttatgcagctggtaccacagtactatttcagtaacctgcctcctagtgaaagcaaggacatcctacagcaagcctcaggccacctacctaccccagctgtggaaaaggaccaggatgtgtgtgagaagtgccctgatgctactgagcagagatgcatgatccagtgacctctccgagacagagtgcaataaggacaccaaggggaagctggcggtgggctgctggagccaggacagtcctggacatttaacacactcaaaaatgatggtttaaaataaaaaatagttttattaagttcttaaagttactattcctattttttcttatttggtaagtttttaaccaatcattcataatttgaccaaattttaaaaaaatgtaaatgtgtcacagacacatggaacagaaccctactttttgtagaggacttgaatctgaaataaaaataatgagtatttt

SEQ ID NO: 466 - DNA, 2880 bp, Cricetulus griseus
cctctccctagtcagggaccaggacattcacagacaccacctccttccctctcttcacatggatcctcttcaagcttaaacctgggaggactgacaaatggcagtggaagatacatctctgctgctcctggtgccgaagccaagtaccgcagcgcaagcagtgcctctagcctcttcagccccagcagtctacccttttttcttcctctcgtttgagatatggactgtctgatgttatgccctctggcaggagcagacttttggaagattttcgaaataaccggtaccctaatttacaactacgggagattgttgggcatataatggaattttcccaagaccagcatgggtctagattcattcagctgaaactagagcgtgccacagcagctgagcgccagcttgtcttcaacgaaatcctccaggctgcgtaccaacttatggtggatgtgtttggaaattacgtcattcagaagttctttgaatttggcagccatgaacagaagctggctttggctgagaggattcgaggccatgtcctgtcattggcactgcagatgtatggctgccgagttatccagaaagctttggaatttattccctcagaccagcagaatgagatggtgcgggaagctagatggccatgtcctgaagtgtgtgaaagaccagaatggcaaccatgtggttcagaagtgcatagaatgtgtacagccccagtctttgcagtttatcattgatgcattcaaggggcaggtgtttgccttgtctacgcacccttatgggtgcagggtgattcagaggatcctggagcactgtctccctgaccagactctccctatcctcgaggagcttcaccagcatacggagcagcttgtacaggatcaatatggaaattatgtaatacaacatgtactggagcatggtcgtcctgaggataaaagcaaaattgtagcagagatccgaggcaatgtacttgtattgagtcagcacaaatttgcaagtaatgttgtggaaaagtgtgtcactcatgcttcacgtacagaacgtgctgtgctcattgatgaggtatgcaccatgaatgatggtccccacagtgccttatacaccatgatgaaggatcagtatgccaactatgtggtccagaagatgatcgatgtggctgagccaggtcagcggaagattgtcatgcacaagatccggccacacatcgcgactctgcgaaagtacacctatggcaagcacatcctggccaagctggagaagtactacatgaagaatggcgtcgacttggggcccatctgtggcccccctaatggtatcatctgagcaatgcacccatccctgtcccgctgacctcactgaccctggcagatccaaccaacaaccagaaatgcccagcgtagagtcagagtgggcaatggttgttcccggattgctccctccttaaaaggaatcatatccgctcgtggaaaggtctttgtaaatttcattttattacacataacatgtactaattattttttttaattgactaattgccctgctgtttactggtgtataggaacttgtacataggtaatcagtgtacatgggaggccacatgttttgttctttgttgtatctatatcccacatgtggacactttcagggtggttggtttaacaaaaaaagttttaaaaaaaaagacaaaaaaaggtttttaactcatttgccttgtggcaagttttgcaaatagctcttccccacctcattttaaataaaaaaaaaaaaacaaactgagaaatttgaattttagttaaatgtccctaaactggcatttaacactgtttataaaatatatatatatacacatacacatacacatatcagaggcccgaggccagtgggcagggccgtgtgctgcctgtgggcttgctttctgtgaacactgagaagcagaatctgattatctagcatgagagaaaacccagctctgctcctggtcttgcttctatagatacatagtgtatacttgtgtagactttgcatatatacggatttgtagtattttcctgttctgatgtctaatctgtatctatattgtaccctagtagtcggacatacttttaattgtacaattgtacatttgtatacctgtaatgtaaatgtggagaagtttgaatcaacatgaacacgttttttggtaagaaaagagaatcagccagccccgtgcacttggtgtatatccaccttttatggttgtagcagatagtgttgtatattgtaaattgtaatttcatccagaagtaaatttttttccttttgaaagaataaatgttctttatacagcctagttaatgtttaaaaagaaaaagaatagcttggtttatttgtcagctagtcaagatggtagtgagagcctttctaaatgttatttcacaggagtcagttcacactagtgttctttttttttttttatcctaaaaaaagtaatgttttgcttattttgtgacagtcaaaaaaggacgtgcagaagtttcgcctgccccttcccctgctcagcccctccccttgtaaagtgactcgccctccgttttgtacaaatgagctgtattttgcattttgtctacttgtaagtgaatgtaacatactgtcaatccttgtttgaatatagactgtaacactacacggtgtacatttccagagccttgtgtatatttccaatgaactttttgcaagcacacttgtaaccatatgtgtataattaacaaacctgtgtatgcttatgcctgggcaactattttttgtaactcttgtgtagattgtctctaaacaatgtgtgatctttattttgaaaaaaatacagaactttggaatctgaaaaaaaaaaaaaaaaaaaaa

SEQ ID NO: 467 - DNA, 2876 bp, Cricetulus griseus
cgaccgggagcggcagcctctgctggaccgggcccggggcgcggcggcgcaggtccagagccatacggtggcggcgcaggcccaggccctggctgcccaggcggtcgcggcggcgcacgctgttcagacccaccgcgagcggaacgacttcccggaggaccccgagttcgaggtggtggtgcggaaggccgaggtggccatcgagtgctccatctatcccgagcgcatctaccagggctccagcggtagctacttcgtcaaggactctcaggggaagatcattgctgtcttcaaacccaagaatgaagagccatatgggcagcttaaccctgctgctttggccgtgactgccttgtcctcaaccagggctatctctcggaagcaggggctagcttggtggaccaaaaactggaactcaacattgtaccccgtacaaaggtagtatacctggccagtgaaaccttcaactacagtgccattgaccgagtaaagtccaggggcaagcggcttgcactagagaaagtgccaaaagttgggcagcggtttaaccgaattgggttaccaccaaaggttgggtcattccagctctttgttgaaggctacaaagatgcagactattggctgcggcgttttgaagcagaacctctccctgagaacactaaccgacaactactgttgcagtttgagcggttggttgtgctggactacatcatccgcaacactgaccgaggcaatgacaactggctgattaaatatgactgcccaatggataattctagctgccgggacacagattgggtggtggtgaaggaacctgtcatcaaggtggctgccatagacaatgggctagctttcccactgaagcacccctgactcctggagggcatatccctttttactggggcctggttgccccaggcaaaagtcccattctctcaggagatcaaagagttgattcttcccaagatctcagaccctaacttcgtcaaggattttggaagaggacctatatgaactcttcaagaaagatcctggtttcgacaggggccagttccataagcagattgctgttatgaggggccagatcctaaatttgacccaggccctaaaagacaataagagtcccctgcacctggtccagatgccacctgtgattgttgagacggcgcgttcccatcagcggtctacaagtgaatcctatacacagagctttcagagtcggaagcccttcttttcatggtggtagccctaggggcaggcagaagaaaccctgcaggtggacaggctgagagcacccctggaggcactgcagagcctttcagggcccttcctctctgcctgctgcctccctcagggccttctccacccctagggagaaggcgacagtcagagacaagaatactcctggacccttcagagtgttggggaggctggtgtccaggcaaggagtccaggtggctgaggaggagctactccctcccagcatctggtggcaggttgggaaagtcccatctctcccaacagcctctccatccccagttccctgttacactatgtatcagaaagaaacaaacaacagaaacaaaggaggtggttgacatagcctaagtgcatgctgagtgcctggaggaatgttctaagggggagcctggcacagcctcactcctgggtccttccttagtctccatgcttttctactccgtttctgttgttttccccagcttttgaggagttcagtgtgggttctggaatggctctctctaggggctgtgggtcagtcagttcatgaacggccaggacagtgtccttgttcttcctgttaccactgctgcctggaaagcaacaggacctgtgttctgcctcctaactggcagtgccccacagcttcctgccttcttatcccgggctgctttctcctcagctccctgaagagaggccttcagacagtctcccagtgcctgccccgctcaacgtgcatcttcctgcttctatgtgtctcctcccttgccaggtgtttgaaccctttgtacaccaaagcagagaactggcttcaggagggagtgagaggagggccacctgtggctgagaggcagcagtgttcacaccctgtgctatggacccgagggctctcacattctacaattggtcagtcagccttggaaagaatttgtcttgaaggcttagaaaaaaaaaaccaaagaaaaggaatgaggaccacagctgtgtgtctcatctgcttgtctggctcccaccggcaggctgctctccgtccagtccaatctaggagccagcttgctatcagcttccacttagtcaacatgaatctctgagcactggatatgcatgccctgtggacgaaggcaccattgtttgccccaccccgacaatcccagccagcccacttagactctggcctcagaaccatgtttgggagaactcctgtctcctgatctcaggagcctgcaggggtccaggtacgtgacattcttcacagacatcttcacaccagcctgttggcgagaccccactggggtgctggagagaccagaccagctctgccatcaggaggaaattgggtccaatgtaagagggagccagtgccaggcctgatgggcaagggtgcaggcgtccttccctgcctctctcgcttgaagcctgtactcaggttgccttgaatgtggactttgggagtgccaagagcccagagtgtcaggcacttccagaacagccgtccctctgccagcctgtccccatgtctagaagtggaagctggttggtgagcgctgctgccccgttcttctaatgcactgtagaaattgtatgtattgtatttaaatcaatgcaaatagtatgaataacaaaataccaagttctga

SEQ ID NO: 468 - DNA, 2875 bp, Cricetulus griseus
ctacaatgtcgaagtccgagacagagtcaagtgtataagtggagttgaaggtgtgccattatctacacaatggggccctcaaggctatttctacccaatccagattgcacagtatggactaagtcattacagtaagaatctaaccgagaaaccccctcacatagaggtatacgagacagcagaagaaagggacagaaatgtcagacctacagaatggaccgtgcccaagggctgcttcatggcaagtgtggctgacaagtctagatccactaatgttaaacagtttattgctccagaaaccagtgaaggtgtgtctttacagctgggaaacacaaaagacttcattatttcatttgacctcaagctcttaacaaatgggagtgtgtctgtggttctggagaccacagaaaagaatcagctcttcactgtgcattatgtttcaaacacccagctaattgcttttaaagacagggacatatactacgggaagggattcctgacaacattaccatctcaaccacagcccacatggcttctttgctgctagtgactggctagtgaggaaccaggatgagaaaggtggctggccaattatggtgacccggaagttaggggaagggtttaagtctttagaaccagggtggtactctgctatggcacaagggcaagccatgtctacattagtcagggcctatcttctaacaaaagaccatatattcctcaattccgctttaagggcaacagccccatacaagtttctgtcagagcagcatgtcatcacttaggcctccatgcagagtcattctcagtctgtgaaagataatggtaagtggctgctgctagcctgctgctcagcacttacctaaaacttagtgtggagtgcttttaaaatgtgattatttatatttatgctgaaagcaggcttttaaaaaacagtgtgctgtactgcagtaaacatgtgcgtatagcctggattgtggactgtgttttttcagtgtttctttcctgtaggttcatttcttgggaaggagtgagcatttgttgcatttgttcaattatatatggaaaatgttttgaattatggttttcttgaactatgtatatttaaacacagcctgtgttcaggtctcatggtcaaatatgttaggagtcacggtaaagtttttccttgcctggattgtcatcatcacttttacatcattgcttctgtcctcactgtttctctgaaactgaattttgaatgattccagcattgaaacagaagagatactactgtgtctactgtccgtgtgccatcggatctgtaagggtttcagagttctcatgccatggacagtgtctgttatagggcttcaggcattacgtaaaagcaacaaggattggttttgccctggtttttgtttatggtgtgataatatggagatagttaggtaacatgagtctcacacttcctagggacaaacaatgaagtttatccagctatctgtctgattcatgtttaagagccaggtgaatggtttgcccacacattgtacttctgttgaaaatattatactgttgaaaaataatccctagattttaccattgtggttctcacacaagaggtgtttcagcaagttctgaacatgcacatttgtctcagcaataaaaatgaggactccctttttattttcagtactgatgttcaaaacaagcttccccacatgggagcattgttcactctatcagatttgttattagagtggtcccgactttgctttatgtttgcatactggtcttcagatgagaggggacagtgaaatcatcatggtactgcttttgtgacaaacaccagtgccttaccaatgtggttgtccttttcaactgaagagggaaagtttgttttgtttggttttggttttgttttgtttttgatgtagaaatggcagtttgctgctgttgcttttccactgccttccacattgcaacagctacttgacttgtcttgtgatcccagaattccctaagaggtcacattgagcctgtgacagcactgtcagtgcttggcttctcagacttgaggatgcctctgtcacctgggagtttacaaaatgagactctaggtgtgcaggaagtctgcctgcaaagtgggatctgcagcatgtttaacaggtgggagagctgggcttgtgtagagagcactgcctgggacccatgcatttttgcctccagaaaatctacaaagtttcctcggtttttaaaacatgtaaatgtttacttatcctgagtatagcgagaaggggagggtattttaagtttttgttgtatttctttaaacttttctttaaaaatactggtttgattcacttatctgagttagcttccatgttgaatctgttgccattttagtagtaaaaccagccaaaagtttctagacaaagggcaggtttgaccctttaagagttactgtatataatggcttcattcaagagccacgcagcgtccatgagcaagtgcagaaacgacacaagcacactctccagatgccgcgggactctttcctttttggtgtacagactctcaccaaaagctgctgttttctttcttgtaattgtttcctcgcttctcctccattgtacatgtggggtatatgccatgtgtcaaatatgcaataacgtgtttaccggatgcccttctgaagggtggtcctctgtaaagctgtacagactttgcagtccaagcacaatgtgcacatgttagttttatatacagcgaaacttgattttttcaaatggaaaggtattttgtttctatacaaagtttaatgggttgtttgtgcttaatgtaaaactgctttataaaactgtaaaataaagtttttatcatagaaaagaaa

SEQ ID NO: 469 - DNA, 2875 bp, Cricetulus griseus
ggtgtgatgggtaggtaacagaggacagcttccctttcctgccagggcatcagcatgaccgagtgcttcctgccccccaccagcagccctagtgaacaccgcagggcggagcatggcagtgggctgacccggacccccagctctgaggagatcagccctacaaaatttcctggattgtaccggacgggtgagccctcgcctcctcatgacatcctccacgagccccctgacatagtgtcggatgatgagaaagaccatggaaagaaaaaagggaaatttaagaaaaaagaaaaaaggactgaaggctatgccgccttccaggaagacagctctggagatgaagccgaaagtccgtccaagatgaagaggtccaagggaatccatgtgttcaagaaacccagcttctctaaaaagaaggagaaggattttaaaatcaaagaaaaacccaaagaagaaaaacccaaagaagaaaagcacaaggaggacaagcataaagaaaagaaatctaaagacttgacggcggccgacgtcgttaaacagtggaaggaaaagaagaaaaagaaaaagcccatacaggagcccgaggtgcctcaggtcgatgttccgagtctcaggcccatttttggcgttccgctggctgatgcggtcgagaggaccatgatgtacgatggcgttcgcctgccagctgtcttccgtgagtgtatagacttcatggagaagcatggcatgaagtgtgaaggcgtctacagggtttcaggaatcaaatcaaaggtagatgagctaaaagcagcctatgaccgggaggagtctccaaacttggaagagtatgaacctaacactgtagccagtctgctgaagcagtatttgcgagaccttccggagaatttgcttaccaaagagcttatgccgcgtttcgaagaggcttgtgggagggccacggagacagagaaagtgcaggaatttcagcgcttgctcaaggagctgcctgagtgtaaccaccttctgatttcctggctcattgtacacatggaccatgtgattgcaaaggagctggagacgaagatgaatatccagaacatctccatagtgcttagcccaaccgtccagatcagcaaccgtgtcctgtatgtgctcttcacacacgtgcaagagctctttggcactgtggtcctaaagcaagtgacaagacctctgcgttggtccaacatggcaacgatgcccacactgccagagacccaggcaggcatcaaggaagagatcaggagacaggagtttcttttgaattgtttacatcgagatctgcagggtgggataaaggacttatctaaagaagaaagattatgggaagtacaaaggattctaactgctctgaagagaaaactgagggaagctaaaagacaagagtgtgagaccaagattgcacaggagatagccagcctttcaaaagaggacgtttccaaagaagaaatgaatgaaaacgaggaagttataaatatcctgcttgcccaggaaaatgagatcctgactgagcaggaggagctcctagccatggagcagtttctgcggcgtcagatcgcctcggagaaggaggagatcgaacgcctccgcgctgagatcgccgagatacagagtcgccagcagcacggccggagtgagactgaagagtactcttctgagagcgagagcgagagcgaagacgaggaggagctgcaggtcattctgggagacctacagaggcagaatgaggagctggaaataaagaacaaccacctgaaccaggcagtccacgaggagcgtgaggccatcattgagctgcgcgtgcagctccgactgctccagatgcagcgagccaagtctgagcagcagctgcaggaggaggaggagcctgagaggcgagggggcataggcccaccgccctgtgacggtgtcctcgaggtcaaagcagctaaggagcaggtgaagccctccccagcaaagaccggaaagagacacccatctgaactgcctgctgggccctgtgcatcttactgtaagcgagtgagctgactgctgctcttctcgctgtctgtggagcttctcagatctcctcttgcacacgtctggctccacgtcaggctcaggtcctgggagggtgaagcagtggacatacaaggggcttacgaggggacacacaaagttccagatagtgtcagcttattggaaaattaattttctttgttaaaaataactattttaacctttgagtggcttctttttaaaccaaaaatcgtctgtctttgcgttttttttttttttttttaattctacagcagaatcaggatctcttcttgggaaagggtgggaaccaaaccaggccgcttctgcacctggccttgtggacactcgtggtctcgccggcccacaggggctctggccactccttgtttgtgccttccacaccttttggtgcagattgttcagtggggagctgcttcagattttctgactgggacaaacccacacgagggctctagcctccccagttagtatttatttcagcacctatttgatgcaattcttttttttttaaagcctctacctattgcactgttgtgacttgttggccattatttgatttttgtacgaacaaaaaaaaaaaagctttgttatagaaatcagcacactatttttttaaatcttggagagaagatagtatggtgactggaaataggtcaagtgtcaaatataagcgtacaagtgccctgctgcgtcctgtcaggcatactgcattccgtttacatttgctggcaataggtgaagtaccttcttttttgtttgtgtaaactctaatttctatcaaggtatcaaatgggttttaaattagtatttcattaca

SEQ ID NO: 470 - DNA, 2875 bp, Cricetulus griseus
  modified_base (7)..(7): a, c, t, g, unknown or other
  modified_base (1744)..(1744): a, c, t, g, unknown or other
  modified_base (2777)..(2777): a, c, t, g, unknown or other
tttgttnttattattattactattattgtaggataaaggaaatgacactttgaggaactggagagaacatacacgcatttgggtttgaagaagaaaccggtccccgctttcccctgcttgctccctcttggctgatgtcaggagctatctcctagtgaggtggggattccagcaagaattaaaggtgaagacgggccaccgggacccaggagggaaacgctgatcattagagacctttgcagaagacactacaaggaagaaaattagagagaggaaaaacacaaagacataattatacgagattccacaaacctagccctggagaaaagcctctttcaaaaatggatatgttccctcttacctgggttttcttagctctgtacttttcaggacacaaagtgagaagccaggttagcagccgttctggctcggttcccggaaccctccaggcccagccaggtgaagagtggcttcaggtggacttggggacgcccaagacaataaaaggtgtcatcatccagggagcccgtggaggggatagcatctctgctatggaagccagagcatttgtacgcaagttcaaagtctcctacagcctaaatggcaaggactgggaatacatccaggaccccaggactcagcagccaaagctgttgaagggaacatgcactatgacactcccgacatccgaaggtttgatgcagttccagcacagtatgtgcgcgtgtacccagagagatggtcaccagcaggcattgggatgaggctggaggtcctgggctgtgactgaaaactgcagctttgaggatgacaagatttgcaactcccttcgggattcaactgcaactttgatttccccgaagagccctgtggttggatgtacgaccgtaacaagtggctcagaagtacctggatcagcagtgccagccccaatgaccgaacatttccagatgacaagaacttcttgagactacagagtgacggccggcgagagggccagtatgggcggctcatcagcccacctgtgcaccctgccccgaagccctgtgtgcatggagttccagtaccaagctaccggtggccacggggtggcactgcaggtggttcgggaagccagccaggaaagcaaactcctctgggtcatccgtgaggaccagggcagtgaatggaagcatggacgcattatcctgcccagctatgacatggagtatcagatcgtgttcgagggagtgatagggaaaggacgatcgggagagattgccatcgacgacattcgtttaagcactgatgtcccactggagaactgcatggaacccatctcagcgtttgcaggcacacacacacacacacacacacacagtcagtttatgtgtttttattaagtgaccttgaaaaaaaagtgaagaaaaatgtactttccctctgggtaggaatcacaactgtctcacaagttaaggcatttctccttctcttaccctagtgactccattcccagctcccctacccaccactgacccacagtggaatgagtcctgctacctgggggaaatcagagccctagatgactccggaaagggaggtgtcaggaacagaatgaaactgtgtgaaggataagattgtcctcaagatccaaatcttgacttttgtgttaatgcctaaagattgtctgtgccctagaaatacattgcaagccccacctgtatgcccagactgttgcatataagtggtaaagtggtctcacctnttttgctgctgtggtcactcacccgcgtgtgtgtgtgtgtgtgtgtgtgtgtgtgtgtgtgtgtgtgtgtgtgtgtgtgtttgtgtgtgtgtgtgtgtgtgtgtgtgtgtgtgtgtgtgtttgggttctctgtatctactgtgtatgtgagtggtcatgtggaactcagtggtggtgttgtgaactttgacctagagcctgagtgttactgctgatcttggcactcgttggcacagtggtagaggtgaaaagttaagctgttaagccctgggggcttagtgttaggcgccctctgagctgggcacgcagtagaaaaaagtctgtattagctcattctcctcttcaccctcccatgcagctaggattcagcacactgagagcttctagggaggagagaagctcaaaggcccactctgggggtccccgccctctcatgcccagtggaccattttactataattcccccaagactagccctgtctaaagtcatgtgcaactcaacttgcatcttccctctacaagtcctgcatccctttcactttggctgattcgaggctctgagtggtccctgagggctaaacaaaaacagggtccccagggctacaagtagatacctcaccaaggctggaggctagtctgttgtaagatgtaaagaaagacagctgggtctgattctaacttggccagggttcaccttggtgcactggttatctttatctgcagataggccagttggcccatctccttgaattgttccctttgggaaacctaactcacagtattgatctcctttttgccttgtactgaatgacacattacctccacgctctcccggactaggcggtccacagggccacagggttgctttctctctttggtggggatagggagttcacagggatgagggtccaagtaataagcatgaatgacaaaaaaacagggggaaaagtaaacgtttacccagggtgtgctgttaaaggtatttgaccattcactggctgagccagatcacaggaactcgagagcttttacngtgattcttcaatgtaaaataataaacaatgtcaaactgtgtttatatgatttgtataaagcctttttaagattactattaaataaacattatgacca

SEQ ID NO: 471 - DNA, 2874 bp, Cricetulus griseus
cccgcgggtctgctctgtgtgccatggacggcatcgtcccagacatagcagtcggtacaaagcggggatccgacgagctcttctccacgtgtgtcagcaacggccccttcatcatgagcagctcgacttctgcagccaatggaaatgatagcaagaagtttaaaggtgacaacaggagcacaggggtcccttccagagtcatccatgtccgcaagctgcccagtgatgtcactgagggcgaggttatctctctggggctgccctttgggaaggtcaccaacctcctcatgctgaaggggaaaaccaggccttcattgaaatgaacacagaggaggctgccaacactatggtcaactactatacgtcagtggcacccgtgctgcgtggacagcccatctacatccagttctccaaccacaaggagctcaaaactgacagctcacccaaccaggcacgtgcccaggcagccctgcaggctgtgaactctgtgcagtccggaaacctggccttggcagcctctgccgctgctgtggatgcggggatggcaatggcaggccagagcccagtgctcaggatcattgttgaaaatctcttctacccagtgaccctggatgttctgcaccagatcttttctaagtttggcacagttctgaagatcatcacgtttaccaagaataaccagttccaggcactgctgcagtatgccgaccctgtgagcgcccaacatgccaagctgtcgctggatggccagaacatctacaacgcctgctgcacgttgcgcattgacttctccaagctcactagtcttaatgtcaagtacaacaatgacaagagcagggactacactcgccccgacttgccctctggggacagccagccttcgctggaccagaccatggctgcagcctttggtgcgcccggcataatgtcagcctctccgtatgcaggagccgggttccctcccacctttgccatccctcaggccgcaggcctctctgttcctaatgtccatggagcgttggcccccctggccataccttctgctgctgcggctgctgcagctggccgcattgccattccaggcctggcaggtgccggaaattctgtccttctggtcagcaacctgaaccctgagagagtcacaccccaaagcctctttattctcttcggagtctatggtgatgtgcagcgggtgaagattctgttcaacaagaaagaaaatgcccttgtccagatggcagacggcagccaggcccagctggccatgagccacctgaatggacacaagctacacgggaagtccgtgcgcatcacactgtcaaagcatcagagtgtgcagctgcctcgggagggacaggaggaccagggcctcaccaaggactatggtagctcaccactgcaccgcttcaagaagccgggctccaagaacttccagaacatcttcccaccctcagctactctccacctctccaatatcccgccctctgtgtcagaagacgacctcaagaacctcttctccagcaacggtggtgtggtcaaaggcttcaagttcttccagaaggaccgaaagatggccctgatccagatgggctctgtggaggaggccgtgcaggcgctaattgaactgcacaaccatgacctgggcgagaaccaccacctgcgtgtgtccttctccaagtccaccatctaggtgcctgtgggcctgcaacagcttccaccattccagaaaagccactttaaaagcagctgaagtgaccttacagaccagagattttattttttaaagagatcagtttacctgtttttaaaaaattaaatctagtccaccttgccatggcaggaaatggcttgggccacagaggtccagtcaggccaggcaccatgccttgaggggctcaggcataaggccacagcggtgccccgaacacagccgctttctcgtgccttacaaaccagcccaccttgcggctgcgcacctagcctcttaggccaccagtcttgtctctagacctgcaggtgagccagtggcctgcaccacaggctccctatgctgtgcaggaactggggccactgcccccacccttataatcaagtgacatgattctcccatgtccctggccagcctggggggcccaggccatcctcagctgccgagcctcatgtgacctttgtattctattctgtgtggtcgcagacacccgtgcctagcaatatttccacttgaccaaatacctgaatcttcccccatttatatgcaagagatatagttttaagtaactttttatagcaatgatacaatggtatgtgtgtactctcagcttctatgtccctgtgcttgtcccctcttcccggtgaccaacttgcaggtgggacccaggccagtgctgagaaacagctctgagaccagtgggttcctaccttcaaattttggaccaaagttttgttttctgcccgcctctgactaggcccaggtgaggggctgacctctaggccttaatgcccctcccaaatgcccatatcatgcctagcctgtctgtgggaggggttccctggaccttgcttctgtgaaggagtggcaagagtgtaaatatttatgatttttatacttgtgtggagctgaggcggtgcagcagttttttatggtgacagatgtatattttggtaacaactacaggctcagtattgtcctggggccagccctggccacattccacccagtcccagatggtgttttggggggggggggtttccattaaagcagttttctaacctgtgccttccctgagcccttcattctgagctgtagaggtatcagccgggctgggcctggactcaataaaacaaacgcctgtgtcttgacaaaaaaaaaaaaaa

SEQ ID NO: 472 - DNA, 2870 bp, Cricetulus griseus
ttcttcaggttccctcgggacccggccagatgccagaagtgggttgaaaattgtaggagagcagacttagaagataaaacacctgatcaactaaataagcattatcgattatgtgccaaacacttttgagacctctatgatctgtagaactagtccttatcgaacagttcttcgagataatgcaatacaacaatatttgatctcaccagtcatttgaacaatccacatagcagatgaacaagaacaggaaactaacagcagtgctcagaaccccagtacagaagcggggagccagcaggatgggaatgtgttacctttaacccttgaagagaaggagaacaaagagtacctcaagtcattatttgagattctgatcctcatgggaaagcagaacatacccttggatggacatgaggccgacgagatccccgaaggcctctttgctccggataactttcaggcgctactggagtgtcgaatcaattctggagaagaggtcctgaggaagcgctttgagaccacagcggtgaacaccttattctgctctaaagctcagcagagacagatgctggagatctgtgagagctgcattcgggaggagacgctcagggaagtgagagactcgcacttcttttccatcatcacagacgacgtggtggacatagcaggagaagagcacctgcccgtgctggtgaggtttgtcgatgaagctcataacttgagagaggagtttgtgggcttcctgccatatgaagctgatgcagagattttggctgtgaaatttcacactacaataactgagaaatggggattgaatatggagtattgtcgtggtcaggcttacattgtgtccagtggcttttcttccaaaatgaaagttgttgcttcaagacttttagaaaaatacccccaggctgtctacacactctgctcttcctgtgccttaaatgcgtggttggcgaagtctgtccctgtgataggggtatccgtggctttaggaacaattgaggaagtctgttcttttttccaccgatcaccacagctgcttttagaacttgacaatgtaatttctgttctttttcagaacagtgaagagcggggtaaggaactgaaggaaatctgccattcccagtggacaggcaggcatgacgcctttgaagtcttagtggatctcttacaagcacttgtgttatgtttagatggtataaatagcgacacaaatattaggtggaataactgtatagctggacgagcatttgtactctgtagtgcagtgacagattttgatttcattgttaccattgttgttcttaaaaatgtgttatcttttacaagggcctttgggaagaatcttcaggggcaaacttctgatgtcttctttgcagccagtagcttgactgcagtactgcactcacttaacgaagtgatggaaaatattgaagtttatcatgagttttggtttgaggaagccacaaatttagcaaccaaacttgacattcaaatgaaactcccagggaaattccggagggcacagcaaggtaacctggaatctcagctaacctctgagagttactataaagacgccctcagtgttcctacagtggagcatattattcaggaacttaaagatatattttctgaacagcacctcaaagctctgaaatgcctatctctggtaccctcagtgatggggcagcttaaattcaacacatcagaagagcaccatgctgacatgtacagaagtgacctgcccaatcctgacacactctcagctgagcttcactgttggagaatcaagtggaaacacagagggaaagatattgagctcccatccaccatttatgaagccctccatcttcctgacatcaagtttttccccaatgtatatgccttgctgaaggtcctgtgtattcttcctgtgatgaaagttgagaatgagcgctatgaaaatggacgaaaacgtctcaaggcatatttgcggaacactttgacagaccagaggtcaagtaatttggctttgcttaacataaattttgatataaaacatgatctggatttaatggtggacacatacatcaaactctatacaaataaaccagagcttcctacaaataactcagaaaccattgaaaatacctaaaagattttaaaaatggctgttgtcttctgttggctgtttggaagaaaagctgtaaggtgtggtaggccagttaatcacttgcacacatagacgatacacctcaaggcgaatcttgccctgttggtatccacgtatttaaatggcccccgtttgaactctcatgctttacctttctgttcttccagaagttggcattgggagtgccaaaatgcctccctgctagaggcactctagaattgttttagttaaagtcattttaggatataacattatcattgtggaaccagttgtcagctgttgggttatcaggtctttgaaaaatgaattttgtgagagatacattttataatgtgttatgataaaatacaccattgacttttgacttgtaggagttataggtgtttaaaaattgtggtagcagcacttggaaggcagaggcatgaggatcacaggttttaggccattcacttgtgcttcacagtgaagacagaagcaaaggccatccatacaggcaactgacttgtctgtgttcttctgtctttttacatgattatgtctactgccttgtcttgatttataagcaaaacctacaaaaataaatgttttgtggtttatctaaaaaaataatacagaaaatattactgttatttttggtgaataaaatcaattttgtacagtttatttcaatctaaataaaatgtgaattttgtttaaattcaaaaaaaaaaaa

SEQ ID NO: 473 - DNA, 2869 bp, Cricetulus griseus
ccggcccagccccgtctaccaggcagagtgcagtggaatccctctggtgctgccgtcatgccgttcccgtttggcaagtctcacaaatctccagcagatattgtgaagaacttgaaagagagcatggctgttttggaaaagcaggacatttctgacaaaaaagcagaaaaggctacagaagaagtttccaaaaatttggttgccatgaaagaaattctgtacggcacaaatgagaaagaacctcagacagaagcggtagctcagctggctcaagagctgtacaatagtggactccttagcactctggtagctgatttacagctcattgactttgagggcaaaaaagacgtggctcaaattttcaacaatattctcagaagacaaattggtacaagaactcctactgttgaatacatctgcacccaacagaatattttgttcatgttattgaaagggtatgaatctccagaaatagctcttaattgtggaataatgttaagagagtgcatcagacatgaaccacttgcaaaaatcattttatggtcggaacagttttatgatttcttcagatatgttgaaatgtcaacatttgacatagcttcagatgcatttgctacgttcaaggatttactcacaagacataaattgctcagtgcagaatttttggaacagcattatgatagatttttcagtgaatatgagaagttacttcattcagaaaattatgtgacaaagcgacagtcactgaagcttctcggtgaactgctgttagatagacacaacttcacgattatgacgaagtacatcagtaaacctgagaacctcaagttaatgatgaacctcctccgagacaagagccgaaacatccagtttgaggcctttcacgtgttcaaggtgtttgtggccaaccccaacaagacacagcccatcctagacatcctcctcaagaaccagaccaaactcattgagttcctcagcaagtttcagaacgacaggacggaggacgagcagttcaatgatgagaagacctatttagtcaaacagatcagggatttgaagagaccagctcagcaagaagcctaatttccaataaacgcctatgatatcccttccaacttcagcacttgctgttagctactcagcatcaggcactcttatcgattcatgaggaacattactgctaatctgctgttaagtgaacggttttcattttacctttttgtttttcagtccaggttggagaacgtagctgctgcttgcacattagagcgcacatggtctttcccttgatctctgtgtcatttcagaactcacagactccatttgctacaggagttctgaacatggctgggttcatgaaggcaaatgcgggatgagagtggtctagggaaaagacattgatgacatcagctgatacctgtacatcggcactgctctttgcagatctctgcagtatggcagaactgtatccagagtgagctttggggaggataaagttggcgtgcaaataaattgatactgaaacatagcaacttctcaagtgtggcgcttcgtaaggtcataaggaaagtgtatatatgcttttcacagctttctagaactttttgacatttgattttcttgagacttgtgaacctggatgtgttgaagggtatttgttaattttactttggtaaggtattttaaaacagtagagctagcaaacaccttacgtttcatttcaacactgcttacaggtttctttgtatataattcttagaatgctcatttcttttaaattgtttaatttgtactagcagtaggaatgttattgtagtagtatgtaacggggcctctgtagagcacctttctttcttagagtaagtgatccccagtacagtagttgggaaactgagtaattaaaactttggcttctcttaggaaaagaagagccctagtcctagatgtcctctggggagattgtttttaatgtccttttccttaatgctgcaaattatcagtatttataaagcaactgattttgcaccactttttgtgactgtgaccacaacagaacaatatctcctagactgtatctacataaagttactagaatggtgtctgttcgtctcagtgacacacagatcacaactaacaacttaaaaatcagagtttgccccatccaattcagcatggctgtagctgactaaaaaattgacataattctttgctagcctctcttactaactgaatgatccattggccagtaaaaggagcctcccagctggtgtttgagcaggctttaaggtttccttcaagagaaacaagctagaaaaaccactccagaagatacaggtgtgttctatttcatttaaatggcagtctacagtaaagagtttccaaggcgtgaaagggtgtctccttgttaagccagctcttagagcctcagacagcaaacagcttccacctggtcagacatgaagtagcgctagagtctggggtggaaaaggaagtggctgtgtcagaaaaacgtgtgtcaccagtgcatcgggagctggaggcagagaagacttctggactgtttttaaacagaacaatgtgaaaacattcaaaattgaaaagttgcatttgatgtgtgatcatttactaggttcctattaccaaaacgattatcctgggtgtggattctttgatgttataaaggtttaattttacttaaggcagttacttaatgtgatttttttttttttaacccttaaaaaaaagtaggagatgtatacaattgttaatgacatggaagtgtttcctttctcctgaggaaaagtgaatttcttatcagatatctggctggccctgtaatttaaattaaaataaaattttggagaaactg

SEQ ID NO: 474 - DNA, 2867 bp, Cricetulus griseus
  modified_base (57)..(57): a, c, t, g, unknown or other
gacctacaaaaagacaaacctgaggcactagtcaacaccttgggacttgagattccngggggagaagaaatctcagaatgggaacttgaggatccagaggagcttggaggctcagaaagccaggggcctgatcgcccaaaaccttggggatgacctaccccaacaagctacacctgagattcccgacatagtgctcaagagcgtgagggaagacttgcccatcatcaacagcttctttagggaccagaagtccctgtatcgcttcctaaagtacttcgatgtccatgagctagagggcatgctgcaagatatgtcaataaggctgaaatcggcacatcgggacagcctgccttacaatgtaggaaaaagtcctagataaagtcttccgtgcctctgagtgaagaagctgcagtgttggatgacgtacaagatctgatctatttgtcaggtaccaatactctggagtggagactgccccactggccacacctccacctcaggaggaagtctggtctggaccagtagaagagctgcagccacccatgaaggacagcttaccacaagaaaacacagaagatcttagtgttcggcttccggagcaacctggttccttggatcaacctgcaaccagggtgcaacttacagaggagcctggcctctcagagcagcctgtgaccagtgtacaacttacagaggagcctggcctctcagagcagcctgcaaccagtgtgcaacttacagaagagcctggtttcttggatcaacctgtgacgagctcactgaacaaatcaagacaatcaagagggcccagaaggacttagaagtagctcttactcacaaagatagcaatattaatgctttgactaagtgcatcacacaggtgaatcggttagagtgtgaacttgagtctgaggatcagaatcaaggaggagatgagtcagatgagttggccaatggagaagtgggaggtgacagaagtgagaagatgaaaaacagaatgaaggagatgatggacgtgtctcggacacaaactgcagtctcaatagttgaagaggatctaaaacttttacaacttaagataagcgcgtcaatgtccactagatgtaacctggaagaccaaatcaagaaattggaaggtgaccgaaactcgctgcagactgctaaagctgagctagaagatgagtgcaaaactctgaagcagaaagtggagatcctgaatgagctctaccagcaaaaggagatggctctgcagaagaaactgagtcaagaagagtatgagcggcaaaacaaagagcagcggctgtcagctgcagatgaaaaggtggtttcggctgcagaggaagtcaaaacttacaagcggagaattgaagaaatggaagaagaattacataaaacagaacgatcatttaaaagccagattgctgctcatgagaagaaagctcatgaaaactggctcaaagctcgtgctgcagagagatccttggcagaggagaagagagaggctgccaacttaaggcacaaattattggaactgacccaaaagatggtattgagtcaagatgaacctgtgatcataaaaccaatgccaggaagaccgaatacacaaaatcctccccgaagaggtctgagccagaatggttcttttggcccatcccctgtgagtgctggtgaatgctcccctcccccaccagcagagccacctgggagacctctttctgccacactcagtcgaagagacatgcctagaagtgaatgtgggtcattggacaggcatttacctcgtcctcggtggccatcagaggcatctgggaaaaactctgcttctgacccaggaccaggacccatgatgaacagcaactcccggagctcctctccagcaaaggccacggatgagaacaaggttaacatgcctcccagagggccccctccattcccaggggcgcctctcttgggaagtcctgtgccaccacccactcgatatggaccacctcctccactgatcgggccttttgggcctcggccagttcctccaccatttgttccaggcatgggtccaccactaggcataagagagtatgcaccaggtgttctgcctgggaaacgggatctgcctgttgaccctcgggagtttttactaggacatgcaccatttagacctccgggttcacttggtccaagagagtattttattcctggtgcccgtttaccacctccaactcatggtcctcaggactacccgctgccacaacctgctgcaagagacttactgcctcctggcccaagagaggaagccccacctgcctctccaagcagtgtccaagacagttcaccggcttcaaaacccatcccttaactttgtttgacctctatctgagtgagagggaaagattggacagtacattgttcataacatcaagaatttcattggcttcaaaacctaaaagtttcttatacagcgtttgtttttagtactaagctgccttggcagtgtgcatttttgagccaaacaaaaaaatattattctctattctaagtaaaaaaaaaaaaacaataagatcttaagctaaatgtccttcaaactttgaaatgtgcaataaagaaatacctgtgtctagttgatgtagcatatgtaattgctcaatgatttaaatataatataaagtatgaacatttcctgtggaaatgctttaggaacatgtatttccattgccttggtctagtgtgtgccagttgatacagagcgaggtgttcacagctccatctgtgtctcaaagactgttacgctaaaaaacgtgtaactcaaggatcaacaaactcgtctttgttgctaaagttctttgtagtaatagttcataaacttttgttta

SEQ ID NO: 475 - DNA, 2866 bp, Cricetulus griseus
caatgggccagcggtggcggcctccagcgacctaaccagcgaagaggaggaaggccagagtctatggtcttcgatcttaagcgaagtgtccacccgtgccaggtccaagctgccgtccggcaagaacattctggtgttcggagaagatggctctggtaaaacaactctcatgaccaaactacaaggagcagagcacggcaaaaaaggagaggcttggagtatctttacctcagcgttcatgatgaggaccgagatgatcacacacgatgcaatgtgtggattttagatggagacctctaccacaaaggcctgctgaaatttgcagtttcagctgaatctttgccggagacgctggtcaattttgtcgtagacatgtctagaccttggactgtaatggaatctctacagaagtgggctagtgttttacgtgagcacatcgacaagatgaaattccacagaggaaatgagggatctggaacgaaaatttatgaaagattttcaagattatatcgagcctgaagaagggtgtcagggttccccacagagaagagggcctctgacctcaggctcagatgaagaaagtgttgccctccctctgggtgacaatgtgctgactcataacctggggatcccagtgttggtggtgtgcacaaagtgtgatgcagtgagcatactggagaaagaacatgattacaggcttgctgtataagtacattgttcataaaacatatggcttccactttaccatacctgccttagttgtggaaaaggacgcagtttttatacctgcaggctgggataacgaaagaaaatagctattttacatgaaaattttacaaccgtgaaaccagaagatgcatatgaagattttattataaagcctcctgtgagaaagctggtccatgacaaagaattggcagcagaggatgagcaggtgttcctaatgaaacaacagtcactccttgccaagcagcctgccacgcccacaagaacctccgagtctcctgccagaggaccctctggctctccaaggacccagggccggagtggaacagctagtgtaccaagtgcctccccaggaacatcagtaaagaaaccagatccaaacatcaaaaataatgcagcaagtgaaggggtattggccagcttcttcaatagtctgttgagtaaaaaaacaggctctcctggaagtcctagtgctggtggagtgcagagcacagccaagaagtcaggacaaaagactgtgttgtcaaatgttcaggaagaactggatagaatgactcgaaagccagactccatggtaacaaactcttacaacagaaaatgaagcctgatcctacctttaaaagtgcatatgtcaaatagaaccaaataaactatgtatattcatctgataagaccaggattttaagacttaacaattagaagcatttccaaactaaacactaaacagaatgggaaacagacttgttctgaatgcatctttgatttatgggaaatgtgttttgtgtggggtacctgggaaaggtggaactgacacaggggtagtgaagatggcagctgcccaggacccacatgcttagcccaggccatgtccttttgtccttggagaaatgctgggtctatgcatatataacctggggcaggcagttgctgggggttgttttttaagtcagcagaataaaaaattagattataatttttaactaccacaggctggccaactaatagaaaatgggtgattgatctctcattttaccataatggcaacgtgctatataaaatttgggggaagtatttaatgtcattgcattctggttaattagcttgtaccaattcctgccttagagtctgtggtagccttcactgatacaaaaaggttctttctgtagctctgtggtcttgattactgctaccagaccaacaagtgagcgctttacattgaaaatggaagtgacaggtttgtgtttgtcatgaaatgtagcacttcttttcttatggaagtgggagttttgtgtgtcttccttttaggggcatattcatgcacatcatcatgtcacaacagcattctgagaatggtttctgtggatctgaaatagcactttgagttttctacatgacatagcacatgtaatgcaaacactaccatgactttaatgtataaaacatttgttgttcaaactaagggggaaaaccacagttcacgtcagtggagtttactttttatataaatgaatgtttgatatagtgttctcggcataatgtccctaatgtcattactttacatgcataccagacttgactaaccactaatgtagtgctggacataagttaacatctagtttatgacaaggctcctcaactgtcgtgtcattttgtaagggtctaaacactgttaagaagaaagctgagcgcttacttgcctctctaacaacaaaaagatgtttcttgtgccggttttactgttgaaatatttaattcacttttttttgttatctctgcagcagccagggcaaaatgagtggcctcagaaacaagaaattcttggaaagacacatgcctaatagggtgatttttaaattttgtaacaaaatttaaaatgtatcatttgaatgtctaagcactttttgtgttgatgtaaaatgtgctaaaaccaaccaatgaaatgctgaggcctggtcttgtgaaggtttctgggagaccactgttattcctttgacacttggatgctcctagtttcagaaaaaaactgatgcatgttaccacatgctcagtggttgccaaagtctaccagctttggggagcttcagggttcttttggggtttgaggagataaggtaattttgttattttaggatctcaagca

SEQ ID NO: 476 - DNA, 2865 bp, Cricetulus griseus
gtacatggatgaagagcatctctttagcgtggagcagataacagccatgttgctgactaagttaaaggaaactgcagaaaacaacctcaagaagccagtaacagattgtgtcatttcagtcccctccttcttcactgatgccgagaggaggtctgtcctggatgctgcacagatcgtgggcttgaactgtttgcggctcatgaatgacatgacagctgtggctttgaattacggaatttataagcaggacctcccaaatgcagatgagaagcctcgggtagtggtgtttgtggacatgggccactcctctttccaagtgtctgcctgtgcttttaacaaaggaaaactcaaggttctgggcacagcatttgatcccttcttaggaggaaagactttgatgaatccaaaatccgagcactccttcgcctccatcaggagtgtgagaagttgaaaaagctcatgagctctaacagcacagacctgccactcaacatcgaatgcttcatgaatgacaaagatgtctctgcaaagatgaacaggtcacagtttgaagaactgtgtgctgaactcctgcagaaaatcgaggtccccctccattcattgatggaacaaactcacctcaagaccgaggatgtgagtgccattgagattgttggaggtgctacaagaattccagctgtgaaagaaagaattgccaaattctttggaaaagatgtcagcaccacactcaatgcggatgaagccgtggctagaggatgtgcattgcagtgtgcaattctgtctccggcatttaaagttagagagttctctgtcaccgatgcagttcctttcccaatttctctggtctggaaccacgactcagaagaaaccgaaggtgttcatgaggtgttcagtcggaaccatgctgcacctttctccaaagttctcaccttcttgagaagggggccttttgagctggaagcgttctattcggaccctcaaggagttccttatccagaagcaaaaataggccgttttgtcgttcagaatgtttctgcacagaaagatggagaaaagtctaaagtgaaagtcaaggtgcgtgtgaacacacatggcattttcaccatctccacggcatccatggtggaaaaagtcccaacagaggaagacgacgggtcttctgtcgaggcagacatggagtgtccaaatcagaagccagcagaaagctcagatgtagataaaaatagccagcaagacaacagtgaagctggaacccagccccaggtacaaaccgatggtcaacaaacctcacagtctcccccttcacctgaacttccctcagaagaaaacaaaatcccagatgctgacaaagcaaatgaaaagaaagttgatcagcctccagaagccaaaaaacctaaaataaaagtggtaaacgttgaactgcctgtagaagccaatttggtctggcagttagggagagaccttcttaacatgtacattgagactgagggaaaaatgataatgcaggacaaactggagaaggagagaaacgacgctaaaaacgcagtggaagagtgtgtatatgagttcagggacaagctgtgtggaccatatgagaaattcatatgccaacaggaacatgaaaagttcctgaggcttcttacagagacagaagactggctgtatgaggaaggagaggaccaggctaagcaagcatatatcgacaagttggaagagttgatgaaaatgggcaatcctgttaaagttcgatttcaagaagccgaggaacggccgaaagtattggaggagctggggcagcggctgcagcactatgccaagattgcagcagacttcagaagcaaggatgagaaatacaaccacattgatgaatcagaaatgaagaaggttgagaagtctgttaatgaggtgatggagtggatgaataatgtcatgaacgctcaggctaaaaggagtcttgaccaggaccctgttgtgcgcactcatgaaatacgagcgaaggtcaaggaattgaacaatgtttgcgaaccagttgtaaatcaacccaaaccaaaaattgagtcacctaaactggagagaactccaaatggtccaaatcttgacaagaaagaagatttagaaggcaaagataattttggtgctgaagctccacatcagaacggtgaatgccaccctaacgaaaagggctctgtcaacatggacctggactaggcgctgcctggcttcctcctccagttcatgaaatgtgtttgccatagtatgtgattctgtacaacagactttgtcgtctatttatattttcttttctttttttaaagactgtctataaattttgtgtattatatgggaaaaaaggaaaagcctgagtctgtagtctttgaccctaagggagaatagccttggtgacagagtcgtgtggctgtgtgacccacactgagtactctacagtattgccacttggactgctgaggagtttgagtttgtcttttgaggagacaactctacttgcttgttcaaatgctctgtgatgagacttttggagcagttgttctcgccaaggctgtttcttttgcattttgctctccatttccgcatgtgtgtggctgtgggtgtttataatgagactaagtctgatttgcataagggctttcaaaaattaagtctgtcccgtagattttgctttcattattacaaattcaacgagtacaacacagctaatgaattgtagcagcatgcaaagcaaggctgtaactatcaccatacagtgcactgtcccgtgaggtgtgacacgggaaatatatgaatcatgtgaccattgtgactgccccatgagctttaaaataaagttcaccctgtggtgtcatttct

SEQ ID NO: 477 - DNA, 2865 bp, Cricetulus griseus
tagtttgtttattttggtttactgtcctttttgtaaagattatgtatctatagctacctgtctagatctgcatctgtgtgcctatgtatatattatacacacacacaggcactcaccactggcgctcccttccttggtggagtggggtggagggtgataatgttttctccagttcaacaggagtgcttgaccccaagtcagtcatatttataatatgcctgctctttgtttaaaaattaaatttgggcacgggaagcacacagggacatttaggttttttcaaatatcagaattcagagtaccatttcaatctggaggcttttagctatgaatccaggtataaattagccataatcagtcaacgacccacagtagactttagtaaactgttgagaaatctgggtaaaaggctgccttcaattctttagttacatggatttttaaaaggcaacaatgtatcagtgatttgtggatgtggtaaattcctgcaagaacagtgcattggtattagaaatgtaactttaaaatatggcattgttgccttctgttaagttctctggggctttttaatttttattactattattgttaatgtgtgattatggtcagaaggcctcttctccccttccctacctgctctctctcccctctcccccagtgaatcttgggcaaatatggctaattgccttgaccgtgttgtggcagtgtctgttctagctccaggtgtgctgttcatgccggtttattccctctgtgaccctgggttttgcatggacattatgtgtctctgtggaaggctgtcgtgctagtcagcttgtgggtgaatagcagctcttggcctgcattcctggtttgttcctataaggttgtttgtaagctgaaatggaactgaaaatgtggttggttgactagctaaacatctgcttgctctcacttcgtttcagaggaaccctggtggccggtcagctgggagaaagatggtttgtaaaaccagtctcttgtagagattggaaatctttctatagctggacagatttgaatacagtcaagcatatactagagctttggcctagtttaggtctgcttaccttgccagggctcttctgatgcaagaatcattccatagttcaaggagcatgttactggatacccatttagtcttcacagaggctgactgcctcatgcttctggatggtcacaactgctcaccgtgtgaacacagtacctcagttctgtccctggctgcaatcactctgtgctcattgttttcccaaagggacccagggacagcttctcaatgcagtgtgatacaccctagtcttcggtgcttctggtgtgtgtgaccaggtgtcgtcctgcatgtaaatctcagagctgagtcttgactcgtaaagcccatcctgacatctgtggcacaagtgggccagtgtgttctgcatggactgacagtgtagaacatggcatggtgactggaaagtaaagttccctttgaaacgaatgtcccaagggctgatctgttaagacatgtctgccattatctgatgccttgcattgtggttttctgcaagcagcccacgttactttggttacctgtgaactcctggtccagaggaatgcaatgtgatgatggtgatgactttgatcactgttccatttattgcctttatgtaaggctgagggaaggggaaggtttttatttgtttgtattttaattgttttttttttcttttttttttttttcaatccctgccctactctctttcttttggtggcttccaccacccttaatggtgactgactctcctcctgagcctgccaccttgggcttcccttgggctcacagttcagatctgcatgcattgcttgcattgttctggtatctgaatgttgattcctcatttaggagttcaacattaatttccaaaattatcatggggcttgtggcaacacaaggcgtgaatctgtgtataaaatttattggccttcctcacttacctgctctagtatcgtatcgtgtgtgcgtgcgtgtgtgacgtcaggctgccacgtaaacttcagagaagaaccttaaagcagaccatccttttttgcatgctctcttctaagtagaatgttcaatgtaactaagtaaaattgcatgttaaagagacttaggttctttctttctttctttctttctttggttggatttgcttttggtttcctgtacatttgcttactgtgctgttctagtggttgtagggtaaagacgcgctggtgaagcagtcttagcgccgacagacggtgactccagttgtatatgtcacgcagcgttcgaagggactgtgcacgctctaaaaatcacagttgcttctaagccagatttcatttctttccttgttttatgtgccaaaccccgaagtgcattgggcctgaatctctgaacactgtagacccattagaaagaagactgctctgattgtcacagattgtagtgcctgaaaactcttatgctgatggttgaagagatgaaagtcctccaaagatgacacaggaaaaattactcacaaaataatcatggctgaaatttctgtgttgcttggggatgctgcgttctccgtattctccatcattggtgcagttcgaatgaatgagtaaagttcagaggtctctgtgttcacatttaaaactagataaacgacctcagtttttgagcttgaattcatttttaattttaattttattttatacaacgtgtagacagttccctgttctctgcatttagaagtatacacagtacaactctgttaattctgtaagtaatttttataattatgatgtaactctatccttccttaaaacattcaaaataaaccctttatgtgc

SEQ ID NO: 478 - DNA, 2865 bp, Cricetulus griseus
ctgtgtgtattcacaccacccgggataaaggaaggtcaaccccggctcatccctgcaggacccatcacccagggcaccaccatctctgcttatgtggccaagtctaggaaacactgcttgtggaggacatccttggggatgagcgatttccgagaggcactggcctggaatcgggaacccgaatccagtctgttctttgcttgcccatcgtcactgccattggagacttgatcggcatccttgagctgtacaggcactggggcaaggaggccttctgtctcagtcatcaggaggttgcaacagccaatcttgcttgggcttctgtagcaatacaccaggtgcaggtgtgcagaggtctcgccaaacagactgaactgaatgacttcctgcttgatgtatcaaagacatactttgataacatagttgccatagactctctgcttgaacacatcatgatatatgaaaaaaatctagtgaacgccgaccgctgcgcgctcttccaggtggaccacaagaataaggagctgtactcagacctgtttgacattggggaggagaaggaggggaaacctgtcttcaagaagaccaaggagatcagattttcaattgagaaggggattgctggccaagtggcgagaacaggggaagtcctaaacatcccggatgcctacgctgacccacgttttaacagggaggtggacctgtacacgggctataccacacgcaacattctatgcatgcccatagtgagccgcggcagcgtgattggcgtggtgcagatggtgaacaagatcagcggcagtgccttctccaagacggacgagaacaacttcaagatgttcgccgtcttctgtgccctggccttgcactgtgctaatatgtaccacaggatccgacactcggagtgcatctacagggtcaccatggagaagctgtcttaccacagcatctgcacctcagaggagtggcaaggcctcatgaacttcaacctgccatcgcgcatctgcagagagatcgaattgttccactttgacatcggcccttttgagaacatgtggcctgggatctttgtctacatgatccatcagtcttgcgggacatcctgcttcgaacttgaaaattgtgtcgttttatcatgtctgtgaagaagaactaccggcgggttccttaccacaactggaagcacgcagtcacggtggcacactgcatgtacgccatacttcagaacaactatggcctcttcacagacctcgagcgcaaaggcctgctaattgcgcagcatcacttctcccagacagtgtccatcctgcagctggaaggacacaacatcttctccactctgagctccagcgagtacgagcaggtgctggagatcatccgcaaagccatcatcgccactgacctcgctctctactttgggaacaggaagcagttggaggagatgtaccaggcggggtcgctgaaccttcacaaccagtcacatcgagatcgtgtcatcgggttgatgatgactgcctgtgacctatgttctgtgacgaagctatggccagttacgaaactgacggcaaatgatatatacgcagagttctgggctgagggtgatgaaatgaagaaactgggaatacagcccattcccatgatggacagagacaagcgagacgaagtcccccagggacagcttggattctacaatgctgtggccattccctgctacaccacgctgacacagatccttccgcccacagagccgctgctgaaggcctgcagggacaatctcaaccagtgggagaaggtgattcgttttatctctaatgtaaattaaatccccaagctactgtttttttgtctagcccacctaaaacatcattctattatgggcatcctcgccttctcttttggcttggtcaccctgacacccagtcctgtgctgtatctagaatagtgaatataaatggcgtgtgggaatactgtttccatatgatctgttgtatggagtacatgctacatgttcatttactgtacaaaaagaaaagtgctgtggattgatgcacagagggtatctgtacagtgcccacctagttaaaaatcacgtacttgcccagaacactgtgaaacacttaccaaactacaaatgcagcgtctggattctttctgagaagaacaactttctcttcatgaacataggaacaaaagagattctccatccacacccagccaaggcaccccagaggtcacagtgacagcctctttgctggccaacacctgctggaacaggggcacaggcccaagcaactggtcctcagtggatgggtctacagccaaagccttaatgggctctcttttggagggggacagaaagaatttcaagttaacaatatccaacattattatagttgatgagttagtaaattccaaaagatgattttatatgtatgaccttaaaaaaatctttgtaaagtgcacaagtgcaataatttaacgaagtcttatctttacatttataaattataaatattgtacatgtgtgtaatttttcatgtattcatttgcagtctttgtatttaaaagcctttactgttacgtttgtataatagaacagtaatcatttattataactcagacaaggtgtaaataaattcataattcaatcagccagtatatatgcaaatatgggtgttaacattgcaaaatctctatctttgttctactcatatgcttaaagcagtaaggaatcttttgtggatatgtaattatacatataaagtatatatatatatgtatgatacatgaaatatatttagaaatgttcataattttaatggatattctttggtgtgaataattgaatacaaagtttttaaaata

SEQ ID NO: 479 - DNA, 2864 bp, Cricetulus griseus
caatatcatcctcgagatcagaacaaggttctcgtgtgtcccatgaaatctgctcctgtcatgttgaccctttcagattccaaacatgttgttctgccggtagacgatgactccgatttgaacgtggtggcttcttttgataggcgaggggaatatatttatacaggaaatgcaaagggcaagatcttggtcctaaaaacagactctcaggatcttgttgcttccttcagagtaacaacgggaacaagcaatactacagccattaagtcaattgaatttgctcggaaaaggagctgctttctaattaacacagcagatcgaataatcagagtttatgatggcagagagattttaacgtgtggaagggatggagagcctgagcctatgcagaaactgcaggacttggtgaataggaccccatggaaaaaatgttgtttctctggggatggggaatacatagtggcgggctccgcccggcagcatgcactgtatatctgggagaagagcattggcaacctggtgaagatcttgcatgggacccgaggggaactcctgctggatgtggcctggcatccagttcgacccatcatagcttctatttctagtggagtggtgtccatttgggcccaaaatcaagtagaaaattggagtgcatttgcaccagatttcaaaagagctggatgaaaaatgtagaatatgaggaaagagaatcaagaagttgatattgaagatgaagataagagtgagcctgagcaaaacaggggctgatgctgctgaagacgaggaagtggatgtcaccagtgtagatcccattgctgccttctgtagcagtgatgaagagctggaagattacaaaggctctgttgtagaagtccatccactactgggtgtgaagggggatggtaaatccaagaagaagcaagcaggccggccgaaaggagcaaaaggtaaagagaaagattctccatttaaaccgaaactctacaaaggggacagaggtttacctctggaaggatcaacgaagggtaaagtgcaggcggaactcagccagcccttggcagcaggaggagcaatctcagaactgctatgaagacggtgaaacacttcgttcttctcactttgtcgtcaggtagcctttggacagtgtggccagtcatttgagattggctttaattgaaaacaaaggcctctacctcccacccaggaggtggaaggagtggattttatgtttgaaggaagaagtgaattatggaagaagagcgcaggtccctgccttcctttcaagcataagtccaaataggctctcaggaatgaggatgcgtgaagacgtcaggagatctgactcgcttcaacttcacacttggttgtgttgctggtgaaaaatgcccaggttttgttcacctaactgttgaagtcacatcctttggacatgtatttcccatctcctgttgccttccatcctcagtgcatgtccttgagtgacttgttcttttctgaaattttgctaccagtatcctcggaaaaccaatgcattttctgtttctttcattcataacttcctctcccagtgcttcctgtgtttctatattgtgtataaaggttggacagagaagcgagtgcttgaaagatttcaaattggcgaaaaggaaggaagatagaaggggcctgtcattctgtcttaccaccttttgctcaggaggctggatgggctccagagaatctggggtttcccttgcattgcatgttttccagtatcaggtctgtttgaataatcatggtttttagcaaggtgtatttctccacaagcttctgtatcatggggttggggcacctgtgcgaggactgacgtgaaacccccaaaatcaaagcagcagtagctcgctttaaatcaaagatcaggttcatttgttaaatcattgcctgtggagaacttgtccccaccagccacagtgtgtctcttcctagagccaggccccctgtgttttcactcacttcctttctgtgaaaggttgcttagcttttttacccttctctttctcaccctggctttctctgcatttgctgttcttttaataaaaatagcaaattggatggatgtgtacaataagtgtttgaaattttctgaaaatccaaagtccagaagccaagtgtagaaagagttagttagtaatgtctctggcaatagcttttggcttgccccggggtcatactttctctgcattgaaaggggggttaaatactatgctaattgtgaaatctctatcagttggtggaggctccttcagatagccaaacccattgattactttatattgtggggtagaagtgaccgtggacactgcaggaagtctccagaatcgtggctggtgctgcttcctcaagtgtgtgtgagaccaatggttgtgattggtaagtggctcacaggacacatttttatttgtagatactatatccatgtcatatctctctgtacagcgtcctgcagtagtgtgcaaactgatacaagggttctacctttcctgtgtggagtgacttgatttcctccatctggatgctaatgctgtgtccatttccattaactggctactgagaaaatcagcccaggccctgccagactgtctgtggcagtagttcctaataattatttatgcttttggaatttttcgtaagcttctaaaaccttccatccactttcagccaggattttttgatttgtataatatatgtatattctcctccttcctttttgttgtcttccctgactctctatttgtttcttaaaatgttctgttagttttgtacaagatgagacttagccttgggtacttcttgctaaagcttttaatgtctttagtaaaataaaa

SEQ ID NO: 480 - DNA, 2863 bp, Cricetulus griseus
acaaagacaaactagagaatcaatcgttttgcttggccgaagatacctgaaaatttacctataagcgcagtaatttctacattaaagttagaccagcagagctggaacagtttgagagcaccattggattcaaattgccaaaccatcgggcagctaagaggctatggaaagtctgtgtggagcatcacactttctacaggcttgtttctccagagcagccaccaaaggccaagttcttgactttggggtccaaattccgctacagtggacgcacccaggcacagacccgccaagcaagcaccctcatagataggccagcaccacactttgagcgtgcctctagtaaacgtgtctctaggagcctagatggagctccaattggtgttgtggaccaaagccctcctggagagggtttggcccatggccctgcagctttcagctatactgccatacaagatggtgacagccggagggatgtcaggagcccaaccaaattggcacccctgctcgctgaaggaagaaaaataccttgagagtagaaggggataatatttatgtcagacatagcaatttaatgttggaggacctggataaggcccaggaggacatactgaaacatcaggctagcattagtgagctcaagcgcaattttatggtagtccacacctgagccgcgccccaatgaatgggaaaaacgacgtatcacacctctgtccctacagacacaagggagttcacatgagactctgaatgtagtggaggagaagaagcaggcagaggttgggaaagacgaaagaataatcacagaagaaatgaatggtaaagagctatcagctgggagtggccctggggagactcgtaaggtggagccggtggcacaaaaagactccacctccctgtcttctgagagcagcagcagcagtgacagtgaggaggaagacgtgggggagtaccagccccaccaccgagtgaccgagggcaccataagggaagagcaggaggagtatgatgacgagatggaggaagagcccggccaagcagccaaggtagtagagagggaggcagcaatgcctgaagccatgccagacagacaagcagaggccagtatactcacagtagaaacagaggcccaggaaaatgtagttgcccaaaagatacccggagagaagagtgcacacggaggcactgttaagcaagacatgacagaagaaacagaggaagagcaacacagagttaacggagaggtgccccatgttgacattgatgttttaccagaaattatttgttgttcagagccaccagtggtaaaaacagagatggtaacaatttctgatgcctcacaaaggacagaaatctccaccaaggaagtccccattgttcaaacggagaccaaaaccatcacatatgagtctccacagattgatggcggggctggtggtgattcgggcacgttactgaccgcacaaaccatcacatctgagtccgtgtcaacaacgacaaccacacacatcaccaagactgtaaagggtggaatatcagaaacaagaattgagaaacgtattgtgatcacaggagatgctgctcttgatcacgatcaggcgctggctcaggcaattagggaagccagagagcagcaccctgatatgtcggtcacgagggtagtagtacacaaagaaacagagctggcggaggaaggagaagaataagaaagtcattttttaaacaacattcaacttcatgaatctgaagaactttgaccattccaagtcttaacgccacaccactactccagcaaatttgtgctacaactggtaacattgaccagaagcctgaagaattaaaatgccaacaccaaaccttacattaacagctctggtccatactactcccatgcatttctaatatattatttgttttataaccacttctaaattctttgttttttgttaagggttttgtatttgtttccttttcctacctgctttttatgactcatttgctcacatgacagtgaacaaagccagccctcggctggtacggtgctgttcacttgaacaggtgctgttgtgtggagaggaaactctgtgactaatttagacagtgattttcattctttcttacagtaaatatttacagtgttcaaattgcagtaaatgtactgcatgagaacatattactaccaattaaaagcatttcttatatcttgaaacttttctaatatttgggaacttcactatggatggtttttatattgaacccattgactttccagtcctgtgtctttgtactttagagtcagagactctctagactggagaattatgaagctcactgaccaagcactgtgttgagagaccatcgcccacagtgcagcacttctcagacatatgctttgccacagcattccagaacaagagaatcacaaaacgtgcccttcccttttcctactaaaagagaatcaggcagcttaaagccttagtgctttctttcttaacctttccaatttcaatacttcccattatttgaacacttgctttgtattaaacttctttgtctacatgtaaaactgacatttgttattgagcaggtatatctcttaagatagtttgatgactcaagatgctggggagaagagggttggggacagtggtgggttttgttggttatatgaaagctataccatttaaagctgatgccagccagagacctgatagggacttattaactgtattgaacatgttttccatttgcttttgactctgtatagttacgatgccagattagatttatagcagcttcaagttgtattaaatggtattttgctttatgtaatactgttataaaataaaagtttgtttattct

SEQ ID NO: 481 - DNA, 2862 bp, Cricetulus griseus
tcaagtccaggaggctcagcaacatcagaggaccatgagtttgatccatcagctgacatgctggttcatgattttgatgatgagcgaacattagaagaagaagaaatgatggaaggagagacaaacttcagttctgaaatagaggatcttgcaagggaaggcgacatgccaatccacgagcttctcagcctctatggttatgacagcactcggttacctgaagaagatgaggaggaagaggaagaggaggaagaaggtgaagatgatgaagatgctgataatgatgacaacagtggctggtagtggggaaaataaagaagagaacataaaggattcatcaggccaggaggatgaaacacagtcttccaatgatgatccctcacagtctgttacttcccagatgctcagggaagaatctgaagaagatgaagattatattccatcagaagactggaaaaacggaaatcatggtgggctccatgtttcaagctgagattccagttggcgtttgtagatacaaagaaaacctttagaaagctgatttctttgcagcagttggttaaatcttgacatttgaattgagttctaactttaagaaatgggattcataattccaccttttgcaagttcttttacttcaaattgttgaagactctttaaggatataaaatggtaaatttgaatgacccaaagacttacctgtaccttcagcattcataaagaattatgaacatatgtttttattttaagcttctacttatggacaaataatttgggacttctggagttcagcatgatgctcagattgcaagcttgttttgtcatttgctataatactcaaaaatatttttgaagcaaaacaaagacttactgtcagcttcagtttgtaaatgtatcgtgctgaatagaatcctgttcaattactcttgtatgcactataagatttcccattgttttcattatgtcaacaggaaggaaaggccaggtgatgttgatattgtcacatccaagaatatctgttgacaggtagcaatattgatttttttatgagaaaataatggttttaagaatttttcagacctttccagttataatccagtttgtcagatttgatactgtttttccaaaatgaaacagatacaaaataatcattgttctgtgtgatttttaaaaaaggattacctgtgtgcactagccttgtatatggattttatttttagtgtaaaattcttcttataaaatgtagttttatacagctgatagaccaatctatctccaaacttttttttagtaaaggattattagctatcttttctcacacagccacgtccccaaatgctgctttcattttgttttcagccatcacttcaagagccaatgcttttaaagacagatctgtggtccttttactggctcagttgtctgatgcagcttgggtaaaagtttgcactgagaatgaccgtctaggcctcatccctcagagtgttcttacatttgtctagattgcttcctttccccaatcagtattggaagccactttgacaacacatcgtataacattcatttactgtttttgcataaatatcctaataaatcagtttcagatggaagtgataagaagcatgagggggttttctgtttgtttttcagaaaaaaaatttaatttatccagaatggcagtaggtcaagtagctttagcagatggccatgttccctgtctgcctgcccacccccacccatttctctctcttcttttttacagagtctcactgtgtaacccaggctggcctggaacttgcaatcctcctacctcggccccctgatactgagattggaggtgtttcccaccacacccagctgtaatttttttccaaagcagattttactaagtgagtgcaggccatcctagctctttatcacaggtggtctgtaggaatgttttaaagaacagtgatgttgtgcttctcagtctttgcagtattggaggtgtcatgtccacctttttaaagatccatctggtggcaagtttgtagagttcttgagacccgtaacaggaacattttaaggaaattctcaggcatgatggcaaatgtgccagatgtataaatgttaataaatcttatttttctttttaaagtatgcataataaaagacattccactaataagtgatgctcagcttttcccaaaaactttattgtgttgtgtgtttctacagggatttcaccctttgttcttcaatgcaaccactgtaacttgagaagtcattgcactatttaaacatcttgacaatatcatgaatctaatttgcttaagatttagtacattttataactgagcgcttaggttgagatgagaaaagaagccttcgtgatgggcagggggtatagtatagctcctttggttgaatgctccaaccagcatgcatgaagccctgggttccatccccagtaccacataaactgggtgtggtggtgtgcacttgtaatcccagcacttgggaggtggaggcaggagaatcagaagttcaaggccatcctcagctatgtagtgaggttgaggccagcctgggatacttgagacgctgtctacaaaaagaaagtctgttggtagttagcactgtcgttttcatttggaatatataatgttttatgatatattctcaataaggttcagaagctgtaactcagttcaacaaaatctgttgagctttaaaatgtatttgaagtaatatttatgtaggcattcaaaattatgaattagatgtttttaaatttctgcataataattttgcactgtaaaatatgtctcttctcccatttccttctgccattctgatatgctcattaaaatatttttgtaa

SEQ ID NO: 482 - DNA, 2862 bp, Cricetulus griseus
gaagcagatctcattccgatgagctgtatcagtccatgggctcttctccctccacggagtcattcatgatggaagatgttgtggactcttccctgtggagcgacctcagtagtgatgcccaggagtttgaagcagagtcttggagtctcgtggtggacccttccttttgcagtaggcaggagaaggatgtcatcaaaagacaggatgtcatttttgaactgatgcagacggaggtgcaccacattcagacactgctcatcatgtctgaggtcttcaggaagggcatgaaggaggagctgcagctggaccacagcacagtggacaagatcttcccctgcttagatgagttgctggaaactcataggcatttcttcttcagcatgaaggtggaaaggatcctgctagtatcctggctctgcttctaactgatgtgctgctcttcctacaagaaaaagaccagaaatacatctttgcagctgttgaccagaagccttcagttatttcacttcagaagcttattgctagagaagttgctaacgaggagagaggcatgtttctgatcagtgcatcgtctgctggcccggagatgtatgaaatccacaccaattccaaggaggaacgaaataactggatgaggcggatccagcaggcagtggaaagttgtccagaagaagaaggaggaaggacaagtgagtctgatgaagagaggcggaaagctgaagccagagtggccaaaatccagcagtgtcaagagatactcactaaccaagaccaacaaatttgcacatatttggaagaaaagctgcatatctacgctgaacttggggaactgagtggcttcgaggatgtccacctagaaccccacctgctcatcaagcctgacccgggagagcctccccaggcagcctccctgctggcggcagccctgaaagaagctgaaagtctgcaagtggctgtgaaggcttcaaagatgggtgatgtaagccagtcatctgaagaaggctctggaggggctgttctgactgacaggctcagttcacaagatgcaccagcatcaccaactgcttcactagtcacagaagggacagaaggaagaggctgttgggatgtggatcccgggctccagggtgtggtaacggacttggcggtctctgatgcaggggagaaggtggaatatagaagtttcccaggttcttcacagtcagagattatacaagcaatacagaatttaacccgtctcctgtatagccttcaggctgccttgaccatccaggacagccacatcgagatccacaagctggttttacagcagagggagagcttggcccatagccactccttccgaggtggccccttgcaggaccaggagaaatcccgatacctggagaagcagcgtgaggagttggctaacatccacaagcttcagcaccagttccagcaggagcagcggcgctggcaccgcacgtgcgaccagcagcagcgcgagcaggaagcccaagagagctggctgcaagcgcgggaacgtgagtgccaatcacaggaagagctgctgatgcgccaccgtagtgaactggaccaccaactccaggagtaccagcagagcctcgagcgactgcgggagggccagcggatggtggagagggagagacagaggatgcgtgtccagcagggtctgctgggccactgcagacacagtcgccagaggagcctccctgctgtcttctctccagggagcaaggaggtaatggaactaaatcgagctgagagtttgtgtcatgaaaattcattttacatcaacgaagctttagtacagatgtcacttaacacttccaataaaccaaatccatcaggtgtcccatgggacacttacccccctgatgtatctcattttgatttggtaaggactagtggcaatcaaacagaactgaagatagacgtttctcagcctccagatgtcagccatgaactctggacagctacggggcccagccatcagatccctgctctccaagaaaacaacaaggattcttgtaaaaatgatttggactccttccagagtgaatccccaggtccacaggacacaagtcaacatggccctcagccacagatactcacaacagaagcaaaactaactctcccgatggcagccagacatggtggggatgctggagatggagccgaagaaaacattgtttacctctgagtatatgtgctcatttattgtttcccaagcaaacaaataaaaacactggcactttggggagaaacttccctggggcccagtcctgtatgtgtgattgtttgtgcccaaaattgctttaagaagaatatttaatatttcatgcaagttcattcttttgggcataattctaataattaaattattaaaaaaaacaaaaaaaaaaaaaccctcaccatgtaacccatgtgtcctatctaagaacctgttctgactgggcagacactgtgctggaacacagtgtggacacactgggggcccgagttatccgctctatggctcacttccttgtttgatgatgttgggttctgagtctctattcagcagcatctttgagcccagctcatggcctcccacaagtcactttggctgtaaataatgtgactccacaagagagccctcacatgggtctgctggccaaggcgtgagtgtcaaggactaccactcactgcagagaactcatccctacagttcttaaggacagaatggctagttcttggtgaggcttgcggcctgcatgggcttttctacagagggacaagtggcacttgcttttagaacactgtggatctctgagagaaaataaaccaggaaatgttctcttcttgttcttgggaatatat

SEQ ID NO: 483 - DNA, 2861 bp, Cricetulus griseus
atcatcgcctgcagcagcggctcccgcagtccgctgcagcgccccgggcccggccgcaccccagccgagtgcagcgccccgcgtctccgcgagccctctccctgtgccgtgagccagcccgattggtaccatggcgggcatcgcaatccaactggccaaggaccgcgaggcggccgagggcctggggtcgcacgagagagccgtcaagtacctcaaccaggactacgagacgctgcggaacgagtgcctggaggccggggcgctcttccaggatccttccttccccgccctgccgtcctctctgggcttcaaggagttggggccctactccagcaaaactcggggcatcgaatggaagcggcccacggagatctgctctgacccccaattcattgttggaggagccacccgcacagacatctgccaaggagccttgggggactgctggctgctggctgccatcgcctccctcaccctgaatgaagaagtcctggctcgggttgtgcccctagatcagagcttccaggagaactacgctggcatcttccacttccagttctggcaatatggcgaatgggtggaggtggtggtggatgacaggctgcccactaaggatggggagttgctctttgtacactcggctgaagggagcgagttctggagcgccctgctggagaaggcctatgccaagatcaacgggtgctatgaagcactctcaggcggagccaccacagagggctttgaagacttcacaggaggcattgctgagtggtatgagttgaggaagcctcctcccaacttgttcaagatcattcagaaggctctggagaaaggctctcttctcggctgctccatcgacatcaccagtgctgcggattcggaggcagtcacgtaccagaagctggtgaaaggacatgcgtactccgtcaccggagccgaggaggttgaaagctcaggaagcctgcagaagttgatcagaatccggaatccctggggacaagtagagtggaccgggaaatggaatgacaactgccccagctggaacacggttgacccagaagtgagggcaaggctgactgaacgacaggaggatggagagttctggatgtccttcggtgacttcctgaggcactactctcgcctggagatctgcaacctgacccctgacaccctcacctgtgactcctacaagaagtggaaactcaccaagatggacgggaactggaggagaggctccactgcaggaggctgcaggaactacccaaataccttctggatgaaccctcagtacctaatcaagctggaggaagaggatgaagatgatgagggtggggagaggggctgtaccttcctggtgggcctcatccagaagcatcggcggcgacagaggaagatgggcgaggatatgcacaccattggctttggcatctacgaggttccagaggagctaacaggacagacgaatatccacttgggcaagaactttttcctcaccacccgggccagggagcggtcagataccttcatcaacctccgggaggtactcaaccgcttcaagctgcccccgggggagtacatcgtcgtcccctccaccttcgagccccacaaggatggcgatttctgcatccgcgtcttctcagagaagaaggccgactaccaagttgtggatgatgaaatcgaggccaacgttgaagagattgaagctaatgaggaggacattgacgatggtttcagaaggctgtttgttcagctggcaggagaggatgcggagatctctgcctttgagctgcagaccatcttgagaagagttctagccaggcgccaagatatcaagtcagatggcttcagcattgagacctgtaaaatcatggtggacatgctagatgaagatgggagtggcaagctggggctgaaggagttctacatcctctggacgaagattcagaaataccaaaaaatttaccgggaaatcgatgttgacaggtctggaaccatgaactcctacgagatgcggaaagccttggaagaagcaggtttcaagctgccctgtcaactccaccaagtcatcgttgcccggttttcagatgacgaactcatcatcgattttaacaactttgtccggtgtttggttcggctggaactgctattcaagatattcaagcagctggatcccgagaacactgggaagatacaactcaaccttctttcttggctgagttttacagtactctgacgttacatgcctgaagacgtctaacggaaaaaaaacagccaatgcctaaacttccaaacacttcatatctggaccttgaacttacgggaacatttacttaaatggatgattatacctgaagaatataaccgtctgagatagatgaattttcacttatcagaataaaagatttgtatatcattaaaccaaatgcaaatgaaatgcattaacccttgataagcttgaagctgtctgtctgtaaataggatatactttttacttctacacattttcctgttcatagcaatattaaatcaggaaggaatgcagagaggcattaaacaactgggcaaacaggaagtcaatctcagaggccacaaggcattggtgggaatatttttttaaaaaaaattaagttgcggtggtggcatctgccacagaagcctggggactgccgcttgccctgagaaaactgaaccccagggattgtgcctagagctggggaggacagagctcagatggtcttcttaaacaagctggcttcttgaacttgggaaaatgctagcaacattgcaagcatattgccttacctcctgccaaatgtactgttaataaagagttacaacacaaaaaaaaaaaaaaaaaaaaa

SEQ ID NO: 484 - DNA, 2860 bp, Cricetulus griseus
  modified_base (147)..(147): a, c, t, g, unknown or other
gagcataacatccgaaatgacaaatatgcaggtgaagaaggaatgatggaagacatgaaactcatgttccgaaatgccaggcactacaatgaggaggggctcccaggtatacaatgatgctcatatcctggagaagttactcaaagntaaaaggaaagagctgggaccactacctgatgatgatgacatggcttctcccaagcttaagcagagtagaaagagtggtgtttctcctaagaaatcaaagtacatgactccaatgcagcagaagctaaatgaagtgtatgaagctgtaaagaactatactgataagaggggtcgccgtctcagtgctatatttctaagactcccctctagatcagagctgcctgactactatctgaaccattaaaaaacccatggacatggaaaaaattcgaagtcacatgatggcaaacaaataccaagatatagattctatggtagaggactttgtcatgatgtttaataatgcctgtacctacaatgaaccagagtctttaatctacaaagatgctcttgtcctacataaagtcctccttgaaacccggagagacctggagggagatgaggattctcatgtcccaaatgtgaccttgctgattcaagaacttatccataatctttttgtgtcagtcatgagtcatcaggatgatgagtaatctggaggaaacctgccccatgagttgtattctgggaaaatgtgctgtgttgtcattcaaggacttcctctcctgcaggccaactgaaataccagaaaatgacattctgctttgtgagagccgctataatgagagtgacaagcagatgaagaaattcaaggggttgaagaggttttcactctctgactaaagttgtagatgatgaaatttactacttcaagaaaaccctttgttggaaaagaagatacattgcttagaagctaagtttgctgagttagaaggtggagatgatgatattggttttgttatattaagttgactatcaaatacacaaaattttttttttgcatacgtttcctttgtttaaaaccagtttcataattggttatatacatagtcatagttttatcttgttaaaggacttaaatcaacaaaggttttggcttggcttggggtttggttttcttttttataaatatatatattatatatatatatacacacacaaagaaaaaaatttaaaaaaaagaaatgtgaagttggtcctagtttacaatctttatgatttgaaactttacatctgttgccttgaaaaaattgaagaaagtactgaagtacatatggaggtggtttattaagcaaaataccctacctaagaaagagtctaaatggacacaagctttgtcttgcatgtaactgtgcaagggtagactgcctacatatgcagatgctctggattctttatttctctgttatcagttatggtatttcgtttgtttcagggttagaattctcaaccagaagtaatactttttaaaatatttttgaattcagcttgtgctttggattatgggaaaaggaattatactttaagaaaatgttcacaacctcttcctcccaagtgctgggattaaaggcggtgctataatgctcagccactgcaaccctgtctttctaacacagccctagaataaacattctgaggcagtgtacgatgttcaggtggcagcatttcacatggtggtctgttttttaaacctgctttattataataaaaggatggttgtgttatgctgatgctgccactgttcactgagaatgattgtcaaaagacaatcttttcctttaaaatataatgaatcagtactcgtgtttaattgccatgcttaataaatcatgagagtatataatgcaaagaagtccccggtatctgctttaaatccaggaacccttgtgacttaatgccaatagtcaaccactacatctaagttttcatcaagtattttaaagaatttgaaattttaaaaaatgtactgcagattatgccagtaccttattgctaaactgaattaaataaatatttgattcctggtcatttggacccttgactcatcatgaactatgaaatgtaatcaggttcttttctttttaggtacccttgaattacaccaaagaaccagaaacttcattttggttaaattatttatttcatgaactcattttatttctcttgttaaaggtttagatgcagctccctaggagcctctaaaaacccttcactgtcagcaaccaggggcactagaagccagagcactcctcctgctggctcctccccagtgcattagtgctggaggaaccaagagccagcccaggttcccttatagtagaaatccagcacagggtgtcactaaagcaggccctgatgaagtttaaaaaaaattaaaaaaacaaacaaaaaaaaaaaagttaattaaagtacaagtaaacaatacactttctcgtgacttaagaactgtagtaatgtggcttaagaaatataatgacctaattgttttcaaaatgtaagttcctatgaagagttttgtttatattgagttgggggacctataggtttaaaatgtcagccaactgatttaaaagaccttggttttactaaatctgccttctccttctgaactggggtgggagtgagggacacttgtgtaaaatccccaaattgatgttataactttcagcttgaacattggtttccaggcctgattaaagagtggtttattctattttctgtactctatcattatctgaagtttaagtggtaactggttctataccgtgtatgtatcatatgtttgttcatcaaagctttttaatccaaataaaaacaagagtttgcaaagtga

SEQ ID NO: 485 - DNA, 2858 bp, Cricetulus griseus
actttctgggacctgcgagcgtgtagctcgcagaccttcaggccggaaacccgcgcgtacccgctaccccggccctcgtcgtctgcgccgctcgcgccgccatggccaagtggggccagggggacccgcgctggatcgtggaggagcgggaggacgggaccaacgtgaacaactggcactggacagagcgggatgccaccgtttggtccaaggggaagctccgagagctcctggttggcattgctatggagaatgagactggccgatgtgagatcagtgagttgaagcaggtggaaggtgaggcttcttgtagcagccgcaaaggaaagcttattttcttctatgagtggaacatcaagctggcctggaaaggtacaattaaagaatctggtgcaaaacacaagggattaattgaaatacccagcctttctgaagaaaatgaagttgatgacactgaggtgaacgtgagtaaaaagaaaggagatggggatatactgaaggatcttatgaaaactacaggcaccgccaaggtcagggaggcccttggagagtacctgaaggcacttaagacggaatttacaacaggaatgattttaccaacaaaagctatagcaacccaggagctgactgttgagaggaaagtgactggaaaccctttgcaggcttctccagtggcactgggtgtaaggattcccactgtagctttgcacttgacggagctgtttgacacgacagtagaacagctgtacagtatcttcactgtgaaagatttggtgcaaaaattttccaaatctcctgctgtattagaagctgaaaagggagggaaattccaaatgtttgatgggaacatcactggagaatatgtggaactgttaacgaataggaagatcatcatgaagtggagatgcagaaactggccagaagaacactatgcaacagttgcattgaattttgtgcctgctccagggcaaacggaattacaattggactgtaaaggagttcctgtctgtaaagaagagaatacaaaattctgttggcagaagcagcactttgaagaaataaaaggtctacttcagctcaccacccagaatgcttgaactagttaggttttataaggacatcctttttgtaagctgaaacctgtcctattgcctcttctttcttcctcaaaaagtcccctccccgcaaggtccctaatttattttatactggatgaaattcatgaaacgacaaaatttaaaagcattgcttgaagcattctagacactgcacttcataaaatcaggtgttatctcaccttccatgggtgttcctctctggaaagtaagtgaagtccagttccctgagctaaggctggtcacaacacgctacttcattgctagttgatttaagctgaagacaaataaatggcatgtacactattcttttattttacttcagttttcagggtgtttcagtctgcttactgctgtcatccgaggaaactgaaacaacttaacgtaacaagggaaagtcatcacagtcagtttaattaagtacacagaacagagtcagtcatttcaataaaataaaacagttatttttacatcaagtgtgctttatttcctccacaggtattctgttaaataaagcaccatttatatactgccaggccacagctaaagaggattctttacagaatcaaatttcttgtggttgttccgtatacaagtaaacttaattttgataataagaaccacagcgatcagaggcaatctgcctctcttattttaaggtacaaaactggcacagaggacaccatattatacacagtaaaaatgctgtaagtttaaattacgttgtacagggtcagagccctgattctcccagaaagccatattaaatgaaagccactacagtgaactcttaattacataaaacatatccattatctgattgccctttagaaagtatacagaagatgcaaattttttcatctggagttctgcctgaccaagaattaagcctataaatctatcttgccattcaagcagagagcactggacaaactgaagcacaaaacaaataagcaaaatttagacaaacggcatgggggaggggcacttgaaagtagacatgccacatctaatgtcaagaagcagcttgatttcctttgccagatatccttgtgaccacatggattgttgattcaatggtcctacacagggtatctaaaatgtcgtgttgctgcatgtgactaaagaggcctctggaatggccacaactgagtgataaagcagcctcggggtcctgggaggacaaagcttgaccgtcacagcttctcaaatcagctaagtcagacagaactgcggagatggaagtagaagggaattcggattcgtcttcagctagtgtagtatccttggaacagtgaaggtctttaaactctttacagtcatcaaacctgccactggtagactgctcctctgcatgctgtgaccggatatgtgacccgtcttctgaaaatgaagatgggccttccatccgatactctttgacagagccattttcgggggaaggaaggtcttgctcggtccctggatcaataatggatgagtctcttgtctcattgtctgaggtgctagtgggcgtcaggacttccctggtatctgcttttatgtcgccaatgcagctgtctacagtgtgctcttcatcactgctcactcgccttcttttaacaggagttgccccttcatcatctgtgggtgcagacaagtcctacacttgcttaaaagctcttgcagagttgggatcagagctgggttttaactgttttgggagtgtgtactgacaggagcaaagcaagtgccctcaggtcc

SEQ ID NO: 486 - DNA, 2857 bp, Cricetulus griseus
agtaatgacaagacccagctcatctttggctctgtcaccaatgttcatgcaaaggatgcagcaccagtggagaagatagacaccatgctggtattagaaggcaacgggaacctggtgctatacacaggagtggttcgggtggggaaaatttttattcctggacttccagctccttccctgacaatgtccaacatgatgccccggcctagtacacccttgatggtgttactactcccaagcctcttggtaaattacttggatcaatggacgaggtggttctcttgtctccagttccagaattgagggattcttacaaaacttaatgattctctctacaatgaggactgtactttccagcagcttggaacttacattcattctgtgcgagaccctgttcataacagagtcacttctagtttcgatttgctggctcagaaaacttatcagcgttttaactgtttgcataaatttgcgaaagattttatgaattatttatctgcacccaatgcttctgtaacagggccctacaacctcgaaacctgtctgagtgttgtcctgctgtctcttgccatggtcatggctggctctgggaacctgaaggtgttgcagctctgtcgatacctgcatatgaagacaggtggagaaatgaactatggtttccacttggcccaccacatggccctgggccttctctttttgggaggaggaaggtactctttgagcacatccaactcatccattgccgctcttctctgtgccctttacccacatttcccagcccacagcactgacaaccgctatcatctccaggctctccggcacctctatgtgctagctgcagaaccaaggctcctggtacctgtggatgtggatacaaacacaccatgctatgcccttatagaagttacttacaagggcactcagtggtatgatcagaccaaagaagaactgatggctccaacccttcttccagaacttcatctgttaaagcagatgaaagttaaagggccaagatactgggaactgctcatagatttaagcaagggagaacagcacttgaaatccattctttctaaggatggggttttatatgtaaagctcagggcaggccagctgtcctacaaagaagatccaatggggtggcagagtttgttggcgcagactgtttctaacaggaactcggatgtcaggtctttcaagccagaaacaatttcatcattcacttctgatccagcacttctgtcatttgctgaatatttctgcaagccaagtgtgaacatgggtcaaaaacaggagattctggacctcttttcttcaatactctatgagtgtgttgctcaggagaccccagagatgttgcctgcctacatagcaatggatcaggctataagaagtcttagaaagagagacatgttgaacacatctgatctttggcagataaagttgatattagagtttttcagttcacgaagccaccaggagaggcagcagaacaaccctaagcaagggctctttatgaactctgaattcctgcctgtggtgaagtgcactattgatgccaccctggaccagtggctgcaagctggaggtgatgtgtgtgtgcatgcctacctgagtgggcagcctgttgagaaatctcagctaagcatgttggcctgcttccttgtctaccactctgtgccagcaccacgacacttgccgcctctgggactggaagggagcacaaactttgctgaactcctcttcaggtttaaacagctgaagattccagtccgagccttgctaagactggctcctttgctgcttggaaacccacagccgatggtcttgtgaccacatctggtaataaacctactcgaaagtgactgcagcacagaatcatatgaggcatcgaagctaaggcagcatttctgtttggtaaccagtggaacacagatgcatgtgcctcactgtatctaagtctatgttgaaaatgttccagagacactgttgctatccacgtgtcattagccaatgtataaaagtcagttaaaattctctttttgtaaataaaagatttttggtttgttttacaaaactttaaagagaggactcaatacagcggaaacagcattggtggtcctattggtcagctgtatgggcaccaagaagaaattctagtgctcttgagccagcatgctaggatcatcagataaaagattatctttactagtctctagaacatctcgtgggaggcagtctcaccatccacagcagccagcctcctgggatccacagcaaggggagagctagaaaaacctggcagtgaagtgtctagtctcaaagaagcatctatgacttcaagtgaaggctgattagccaggacggtctgatgagggagcaatggcaaattgaggtcagatgccagacttcagctgcttccctctgtcatatccctcaacatgctgggctctacccatcccactaagccccagccctgctgtggtctgctgctgcctgcacggatcctagtccaggagactcggaaacagctactcaatgtgaacggaaaagactttgcattggcagagcttatgagcatgttgaaaagcaggcaaacatctttggaattacatgggctttgtgtctgttttcttgagttgtactcattaacttagtctatcactattgatcacattatatagagcatcttgtttaagcttttgtcctttagctaaaatacttctttggtaaactttaatattgtagcctgtttcttttaggtaatactttggtaaagtacttttcagactttttttcctttgtaaatattcatattagaattttaaaacaggaaattcataataaattcagtaag

SEQ ID NO: 487 - DNA, 2856 bp, Cricetulus griseus
  modified_base (23)..(23): a, c, t, g, unknown or other
  modified_base (70)..(70): a, c, t, g, unknown or other
  modified_base (478)..(478): a, c, t, g, unknown or other
catgttgtcaaagtggattcctnaaccgaatccatagaagcaccctcctaaccgccgtgtgctccagtcngtcaaagaagaagcttgaaggttcctgatgctataaaatctcagtaccagtttcacccctctcattgcacctgcggctattcgggatggggagctgatctgcaatgggatccccgaggaatcacagatgcaccttttgaactctgagcacttagccagcaggcagagcagcaagagtggctctgtagtgttgttgcgctccagtgcagcatattgaaacatttatctgctaagcagatgccttcgcattgggactctgaacagacagagaaggctgatattaagcctgttattgtgactgacagctcaatcaccacctccctgcaaactgctgacaaggcacctctaccttcccactaccctttgtcctgcccctcagcagttagcacccagaattcgctgggctgcnctccaccccaccaacccccagccctagaggacatcagctgcagttcttgtgtggaaaagtccaagaaaacccctttgtgggactgccaatgggccagtgaacacagaggtaaaagaccaatggcccacacctctacaacagccccactgattccacggatccccggcgacttcctggcgccaacacccccttaccaagcctctcacaccggcaaggctggcccaggcccctcacgccaccatcggctggggggcttcagaaccacaccgtcggcatcattgtgaagacagaaaatgccactggccccagctcttgtccccagaggagtttggtacctgtcccaagcctgcccccttccgtccccagctcttgtgccagcatcgagaacaccagcactttgcatagaaagactgtccaatcacagataggaccttcgttgacagattcgaggtctctgggctcacccccaaatgccacccgggtgctcactcccccacaagctgcaggagacagtatcttggccacaggccccaaccaacgattctgctcaccagcgccatcatcagatggcaaggtcagccccggcacgttatccataggaagcgctttaaccgtaccctctttcccagccaactctactgccatggtggacctcaccaattcacttcgagcatttatggatgtcaatggagaaatcgagataaatatgttggatgagaagctgatcaagtttctggccttgcagagaatacatcagcttttccctcccgggtccaagcttcaccgggcagtgttgggacacatccgctgacttccggagggcaccacacagaagtgcaaagaaaggaggtacaggcccgagctgtgttctaccccctcttagggttgggaggagctgtgaacatgtgctatcgaaccctctacatcgggacaggagctgacatggatgtgtgccttacaaactatggtcactgtaactacgtgtccgggaaacatgcctgcatattctacgatgagaataccaaacattatgagctgttaaactacagtgagcacgggacaacggtggacaatgtgctgtattcatgtgacttctctgagaagaccccgccaacccccccaagcagtattgttgccaaagtgcagagtgtcatcaggcgccgccgacaccagaaacaggatgaagagccaagtgaggaggcagccatgatgagttcccaggcccaggggccacagcggagaccctgcaattgcaaagccagcagctcaagcttgatcgggggcagtggggctggctgggagggcacagccttgctgcaccatggcagctacatcaagctgggctgcctgcagttcgtcttcagcatcactgagtttgcgaccaaacagcccaaaggcgatgccagcttgctgcaggatggggttttgactgagaagctctctctcaagccccatcagggccctgtgctgcgctctaactccgttccctaggtcattggcctagacacccacccaagactcctgcaatgcaaaaatgtacacgaaccaagcccgggtgttttctataccagaaacccttcaactacaatctttgcatgaaatgaagaaaaccttttgactgttttttaagacttttttttcttttctcaagttctagggggcatttgcacatatatttgtactcaacatttcatgggaaagcggcagaccgagctgaggaacggcatgggcaggggaggggaagactcttgtctggacacttccagcacaacccctccccgccttctgctctctccccctcgaccacctgcccgctgttgtaaaataatcagaaacttgttctattttgtggcagtgacaatagttttatattaaaagaaaaatacagttttcatacagcaaaatctatacaatatcattgttttatttaatataaagatcgctacccacccctttccacggctcccacccttcaagttactctccctttctgcagcggttgcactacaggtagctactgtgtatatggacaaatgagaaatgaattcctttttctggctgtccatctattttatttcaaataaggaaaagtgtatttggattttgtgtaaatacatctagtgatggcattttttcaatgtttttaaaaactgtacagtacatgtggtagagtgtttttcatgtctattgtagcaaaggcgtttttgtcgtaaacctgttccgtgtccttttttgtctcttgccactgctcttcctgctcacccagttcccctccttttctcttctccacaactagtaccgatgtacatagtaattgtaatgttttagactttacagaaaaaccaaaagtaattgataaaaaaaaaaaaaaaaaaaaa

SEQ ID NO: 488 - DNA, 2855 bp, Cricetulus griseus
gcttagtatttgtagaccgtatgacaagtgaaagtttccatgtgaactttcgtgtccctggcattgctgagtaaaagaacagttggctgggtttgtgtttacttttcttctttttttttctttttagttgaacaaaatatatttcttttttcttttagactatttacatcttttgtcagtgtagtcaaaactttttagaaaaaccttgttggaaatttttgcttgatcctgttgtattttgattattctgtctgtgctgctttgtcttggaatggttgtgtgctacaaatgaaatttaactgaggactgcatttttggaatctcctaggggtaacttgtggctcataggatcttttcaactttatatatgtaaatgtaccctgaattatatatattaattgaaaaaatagaggttaagatgtttatagatacaatgctttcatacagtttcaactccatgcctttattatttttctgaaaagctaatgggtatccagacaggaatccctcagttctctctgagaagctggcgagagaactcttgtctgatcaagcgagagggacagaaaggggagtgatggctccatggaccagagaatgggtgctaataaggacttagacttggcaaattgagcctgttctgctagttcttagttaacctgaaaaacttaacactcggttggcttggattacatgatataggtgtggtccaagtatgtgaacagtctgaggcttcacttggatcctcaccaagttctttcactagttttggttttgagagctggctaatttgtaacatgcaggtctgattgctgataaaatttgtaaaaagttggatgctaagattttgttaagatgtcttctggaaaacagtttctagagtccctggaattggctgttggcacacgggtctggcacatcatggggagacttagaaattttcttcccactcgatagctgccttgctgcctcattatggtgctccatccctttcgtgccgttaggtttttacctttcatctttctcttagtcatcaatatttgtattcaaaagttatatttttggggttagatgtcttgaatatttggtgtatggcaaacctctgaagtgctagattgatttagtctagttctaaatcaagttcttaaggctggtataaactccatcctcagtgccagtcaaaaccaaggcgtagattccctagcctttccatccgatagggaattcttttgcctttgtagcctccgcaacgtgctttaaaaaatgcatcacaactatgatttgatttattgccctgttaactttgaaagctctgtcttttcttgtgagaacttttaaaatctactttattattttccccagaagtaatgtaaaacacctaacattgaaatttataaattttaaaaattgtctacaatcagtacaggaaatacaaatgattggaccattcaacatatttttttaaataaactgagagataaggaacacaacactttacacactttatatttctctttacataatctggaaccatacacagttcttttctttttaaagcacaatattgaagcctttaaaaggtatttaagggtttggtcaagtgaatataaaatgtgtttgtctgtataaagagaaaatgaagtagtcactgttatgtactgacattagttacaacctagttttaattcttaaaacaattttgattagcaaagctaaaaaaaaggatgtttcagttaaatgttttaaagaggtacagatttttacaaggacataatataagttattgttctgtagaaatatcctattaaatattgtatgtccctccctctgtatactttgtaaaaaaagtaaaatacataaaaagaaaatcatataggggatgtgtgacattattgtaattgtgtacttgagaataacgtgcaaaaataaaaatcagaatattttcctgttaacgaatgttcagtctatttgataccagtactaagttaatgctttttcttaagaaagacaatgtacagtttttgtaaacctaataaacatcaaaagcagtggattattttcatccccctatttcttaattccttttatgcagcagtggaatgcaaaatgcttgattgctttgaattttgtgacttggatgcaaatactgatatttcagtcctgtgaatttgcaagtaacattacagagaagttaaaaggtgattggtgagtcctttgatgagcatgtccttgaaattaattttttctttatctttgtaaatgatttgttttattagcatctctgattcctgttataaattacctgcgcataaagtgggttttgaaagcacttaaaatttgttttattatcaattcacaacacatttagtctgaggccctacctttgagtttacccatttgtgcccaggttggaggcctctagtagaccccagcatactggaggattgtcactgtagtagtgaaaatgctcaagtttagtgaaagagatcttagagcacttgaggaacctaagattacttggtgtgacattttgtgtagtcctcctactcttacatagtcccccaatgttgcattcctcaaaggtaggaagacttgataagtaaagagaaggactgaaaattgtgtgttcgtgtgtgtgtttaattggcccagagttactaaagtaattcatattaaaaaggacattttgctgcgttttacagctttttaggaggtcaaaattaagtttgccctatggatttgttttattcttttgtttctatgtatatattgtttgtcctttttcattaaaataattcttggatttgttatatattgttccttgtttatttttgtacatctttgctattgtaaat

SEQ ID NO: 489 - DNA, 2853 bp, Cricetulus griseus
cttaaggcagggtgccactcaaacaacttgcctccaggaattgctctgaagagagagccccagcagcctccatcctaaaggaaggtagcagggatgcaggcttggatttccgacctgtagtgcctcccgcaaatggggatgaaggagtcagagtggatcaggatgatgatcaggatagctcttccccgaagctttctcagaacattgctgtacagactgacttcaagacagcagattcagaggtaaacacagatcaagatattgaaaagaatctggacaaaatgatgacagagagaaccctgttgaaggagcgttaccaagaagtactggacaagcagaggcaggtggagaatcagcttcaagtgcaattaaagcagcttcagcaaaggagagaagaagaaatgaagaatcaccaggagatactaaaggctattcaggatgtgaccataaagcgggaagaaaccaagaagaagatagagaaagaaaagaaggagttcttgcaaaaagagcaggacctgaaagcagaaattgagaagctctgtgagaagggcagaagagaagtgtgggaaatggaactggatagactcaagacccaggatggtgaaatcaatcggaatattatggaagagacagagcgggcctggaaggctgagatcctgtcactggagagccggaaggagttgctggtgttgaaactggaagaagcagagaaagaagcagagctgcatctgacttacctcaagtcaactcctccaacactggagacagttcgttccaaacaggaatgggagacaagactgaatggagttcggataatgaaaaagaatgttcgggaccagtttaatagtcacatccagctagtgaggaatggagccaagctaagcagccttcctcagatccctacccccactttgcctccgcccccctcagaggcagatttcatgcttcaagtatttcagcccagtccctctctgacccctcggatgcccttctctattgggcaggtcacaatgcctatggttatgcccagtgcagatcctcgttctttgtcttttccaatcttgaaccctgcgctttcccagtccagccaatcatccccacctcttcctggctcacatgggagaaacagccctggcttggggtctctggtcagccctcatggtccacacatgcctcctgctgcctccatcccgcctcccccaggcttgggcggtattaaggcttctactgaaactccccggccccaaccagtagacaaactggagaagatcctggagaagctactgactcggttcccacagtgcaataaggcccagatgaccaacattcttcagcaaatcaagacagcacgtaccaccatggcgggcctgaccatggaggaactaatccagctggtagctgcacggctggcagagcatgaacgggtggcatcgagcactcaggctccacccacctgtaagctgtgtctgatgtgtcagaaacttgtccagcccagtgagctgcacccgatggcttgtacccatgcgctgcacaaggagtgtatcaaattctgggcccagaccaacacaaatgatacttgtcccttttgcccaactcttaaatgatggacccgaccggggaggaagaagagaagaaaccgatgtgaacaggaaacgcgggttcaagatttctaaaactctatatttatacagtgacatatactcatgccgtgtacatttttattatataggtaatgtgtgtatagaaagtctgtattcaaatgttcgtaatgaaagtatgtatatagtgcagatacaccttgttcccccctcatcttgcagttctttttggggttgaagactgtagggaatatgatgtttaactcggccttgaaatcatgatccctgcataggactgttgtctaacccatctaggaagctgctgttgctctaaggccatcctgcttggtttggctcggcctctagttcatttttgtaaggctcatgtatgcagaattgaagcctggtgctcacctgctgtccaaccagatgccttgctttgcaggggcctccagaaggcttggtgttgttttagccactccattccaatgataaaatgttactgattgaggggaaaaaatgtaactctgatagttcgatttttcattgaatattttactgtgttaatgctcattatttatacattgatatcaggtatacaggatattctgttttatgtcagaaaaatccacagtccaagaacaacgtaatcaagtcccatttctcccaccatcttctgtctactctatttcctggatagaaaagcacaattcacagattttcccctgggcctagccacgatcccctgttgccactggcttggcctccactaagcactgacaggccagccttgcaaagtgctcacccttcccattcctctggtctcctaaaatagctattctctcccccccccaaaggttaaggcagttggttcacaaccaagttgtttggtgaccttgggtgagctccagacaggcactggggtgaggtgtctgtgcaaaattatttgcagaataatcatgggatgttggattttcgtttgtgaagcaagaaagttatgggggacacattccctgtctaggataaaatggagacaaagtgagatgaaggggtgggacttgacagtcacaagccatgttttgtagattcccatctggagtgagatggtttccacctctgcttactgagtacttctgttttttatgcctgggacaactgtggctctgagaaccttgagtccttttcaatctttgtctttactcctgtagtaaatggctttaattaccttcccttttagaattacacaagtgttaat

SEQ ID NO: 490 - DNA, 2852 bp, Cricetulus griseus
acagaccccacccctcagcactaccccagcttcggcgtgacctccatcccaaactacaacaacttccatgcagctgggggccagggactcaccgtctttgggggagtgagcacgaacagaagatgacctgagttttcacaaaggagaaaaatttcaaattttgaacagttcggaaggagactggtgggaagcccgctccttgacaacgggggaaactggttacattccgagcaattatgtggctccagttgactctatccaggcagaagagtggtactttggaaaacttggccgaaaagatgccgagagacagctcctgtcctttggaaacccaagaggtacctttcttatccgcgagagtgaaaccaccaaaggtgcctactcactttccatccgtgattgggatgatatgaaaggagaccatgtcaagcattataaaattcgcaaacttgacaatggaggatactacatcacaacccgggcccagtttgaaactctccagcagctcgtgcaacattactcagagaaagctgatggtttgtgttttaacttaactgtgatttcatcaagttgtaccccacaaacttctggattgtctaaagatgcttgggaagttgcacgtgactcgttgtttctggagaagaagctggggcaggggtgtttcgctgaagtatggatgggtacctggaatggaaacacaaaagtagccataaagactcttaagccaggcacaatgtctccagagtccttcctggaggaagcacagatcatgaagaagctgaagcatgacaaactggtgcagctctacgccgtggtgtctgaggagcccatatacatcgtcacggagtacatgaataaaggaagtttgcttgatttcttaaaagatggtgaagggagagctctgaaattgccaaaccttgtcgacatggcagcacaggttgctgcaggaatggcttatatcgagcgcatgaattatatccacagagatctgcggtcagcaaacatcctagtggggaatggactaatttgcaagattgctgactttggattggctcggttgattgaagacaacgagtacacagcaagacaaggtgcaaagtttcccattaagtggacagcccctgaagcagccctctatggaaggttcacaatcaagtctgatgtgtggtcttttggaatcttactcacagagctggtcaccaaaggaagagtgccctacccaggcatgaacaaccgggaggtgctggagcaggtggagagaggctacaggatgccctgcccacaggactgccccatctccctgcacgagctcatgatccactgctggaaaaaggatccggaagagcgccccactttcgagtacttgcagggcttcctggaggactactttaccgccacagagccccagtaccagcccggtgaaaacctgtgagagcctgctcttcagagacctcttctgaggcctccccacccctccccattagcttccagttccgtagccagctgccctgagcagcagaaccgtccaggatcagattgcatgtgactctgaagccggcgaacttccacggccctcattaatgacatttgccccccagtccgaacctcctctgtgaaagcatccagacagaaccgtgttatttctcagactttggaaatgcattgtatcgatgttatgtcaaaggccaacctctgttcagtgtaaatatctgctcccgtgccaacaatcctagtactttacctttttaaaaaaaaaaaaagcaaatcctatgtgattttaactctgtcttcacctgattcaaactaaaaaaaaaaaagtattattttccaaaagtggcctctttgtctaaaacaataaaattttttttcatgttttaacaaaaactagatcaggacaggtgtttgtttttttcttttttattacatatgaatatatacgtaaatatgtcctctatatacacaacatgggtgctaccaccagagacactgtggccagcaaaggccacatagttacagggcccagagtgaggatcactggggaaacctgcatctaagcactggtgttattttgaaagccggtggcctcccgttttttacttctacaaagcatgattttccccccttcatttggattgcactttttcagttccagtcatacctgtagattgttgttcatgtgacttttcaggtccctgagctgagttcacgcattttagtgcccgtttcgctccagcgtactgtgatctgttcttgcgacttgagagtgagcacacttaagcaagcagccatccagtcctaccctgagggctgcaagacggagaccgcatagacttgctgtatagatatgaatgctgacttgttttaaatgttcttcttttatttaataaatcttgtaaccacatttaaatggtctaaaacccatatagcattgtagtcacggcagcctactaaactttctcatgcagctaaaaatgacggggaaggcaagggtggggggttgtacatgtcccattgtaaaataagtgttccaatgtcctgtactgctaatgaatgactctccatgtcgagcgtactccagtcaataactatgcactactttacatttcatgggggtgcacaagagggttgcgttttcagttgctgtttgtaccaaccttgaattacatatgtttaacaacaacaaatcaattcctatttctattgagttttttaatactgaatagcaactctaaagtcttaattccttttttgttaattgtatttatttgtgagtttacatttttaattgtttaactttctttaatttagtaattaaaaagagagcattttacattgaataaaaaaaaaaaaaa

SEQ ID NO: 491 - DNA, 2850 bp, Cricetulus griseus
gatcagatccgtgccattatggacaagaaagccaacatccggaacatgtcagtcatcgctcacgtggaccacggcaagtccacactgacggactccctggtgtgcaaggcgggtatcatcgcctctgcaagagccggtgagacacgcttcacagacacccgcaaggacgaacaggagcgctgcatcactatcaagtccacggccatctccctcttctatgagctctctgagaatgacctgaacttcatcaagcagagcaaggatggatctggctttctcatcaacctcatcgactctccaggccatgtggatttctcctcagaggtgacagctgcacttcgtgtcaccgatggagctcttgtggtggtggactgtgtgtctggtgtgtgcgtgcagactgagaccgtgctgcggcaggccattgccgagcgcatcaagcctgtcctgatgatgaataagatggaccgtgccctgcttgagctgcagctggagcctgaggaactataccagaccttccagcgcattgtggagaatgtcaacgtcatcatttccacctatggcgagggcgagagtggacccatgggaaatattatgattgaccccgtcctgggcactgtgggctttggctctggcctgcatggctgggccttcactctgaagcagtttgcggagatgtatgtggctaagtttgcagcaaagggtgagggccagctggggcctgctgagcgggccaagaaagtggaggacatgatgaagaagttgtggggagatcggtattttgatcccgccaatggcaaattcagcaagtccgctaacagccctgatgggaagaaactgccacgcaccttttgccagctcatcctggaccccatcttcaaggtgtttgacgccatcatgaacttcagaaaggaggagacggccaagctgattgagaagctggatatcaagctggacagcgaggacaaagacaaggagggcaagcccctgctgaaggctgtgatgcgccggtggctgcccgcaggggacgccctgctgcagatgataaccatccacctcccttcccccgtcaccgcccagaaataccgctgcgagctgctctacgaggggccacctgatgatgaggcggccatgggcattaaaagctgtgatcccaagggtccccttatgatgtacatttccaagatggtgccaacctccgacaaaggccgcttctacgcctttggtagagtgttctccggggtagtgtcgacaggactcaaggtccgcatcatgggccccaactacacgcctgggaagaaggaggacctgtacctgaagcccatccagagaaccatcctgatgatgggccggtatgtggagccaattgaggacgtgccctgtgggaacattgtcgggctggttggtgtagaccagtttctggtgaagacagggactatcaccacctttgaacacgcacataacatgcgtgtgatgaagttcagcgtcagccctgtcgtcagagtggctgtggaggccaagaacccagctgacctgcccaaactggtggagggcctgaagcggctggcaaaatctgaccctatggtgcagtgcatcattgaggagtctggggagcacatcattgctggagcaggtgagctgcacctggaaatctgcctcaaggacctggaggaggaccacgcctgcatccccatcaagaaatctgaccctgttgtctcataccgggagacagtgagcgaggagtcaaatgtgctgtgcctgtccaagtcgcccaacaagcacaaccgattgtatatgaaggcccggcccttccctgatggcctggccgaggacatcgacaagggtgaagtgtctgctcgccaggagctcaaggcacgcgcacgctatctagctgaaaagtacgaatgggatgttgctgaagcccgcaagatctggtgctttgggcctgatggcactggccccaacattcttaccgatatcaccaagggtgtgcagtacctgaatgaaatcaaggacagtgtggtggctggcttccagtgggccactaaggagggcgctctctgtgaggagaacatgcgtggtgtgcgcttcgatgtccatgatgtgaccctacatgctgatgccatccaccgaggaggtggtcagatcattcccacagctcgtcgttgtctgtatgccagtgtgttgactgcacagccccgcctcatggagcctatctacctggtggagattcagtgtcctgaacaggtcgtgggtggcatctacggtgtcctgaacaggaagcgtggccatgtgtttgaagagtcccaggtggctggcacccccatgtttgtagtcaaggcctatcttccagtcaacgagtcctttggttttacagctgacctgcgctccaacactggtggccaagctttcccccagtgtgtgttcgaccactggcagattctgcccggggacccgttcgacaacagcagccgtcccagccaagtggtggctgagacccgcaagcgcaaaggtctaaaggagggcatcccagcactggacaacttcctggacaaactgtaggcaggcttgcacagccacacactgcacagtgcccacccatcagaagacaccttgagactgtccccataatgctgctctggaggtggctggggccaccctgccattgagcactaacacttgatgccgattctatttatttcggaatttccgaggcagtggagtcgccctctgcaggctggactggctggcgggccatggggtgggcaggacacagctcttatcattttcagagggaaatgctcagatattcaaacatctaaataaatgcattcagaggtttatggggttcat

SEQ ID NO: 492 - DNA, 2849 bp, Cricetulus griseus
acagtccaatccgagtaacagttacccctcgatgagtgatccttatctgtccagctactatccaccatccattggatttccttattccctcagtgaggcaccatggtccactgcaggggaccctccctatcccatatctcactacctatggacaacttagtaatggagaccatcacttcatgcatgatgctgttttttgggcagccgggaggtctggggaacaacatttatcagcacagatttaattttttccctgaaaaccctgcattctcagcatgggggacaagtggttctcaggggcagcagactcagagctccgcctatgggagcagttacacttacccaccaagctcccttggtggcacagttgttgatgggcagacaggttttcacagtgataccctcaacaaggcccctgggatgaacagtctggagcagggcatggttggcctgaagattggggatgttaccacctctgcagttaagacggtgggttcagttgtcaacagtgtggcactgactggtgtcctttctggcaatggtgggacaaatgtaaacatgccagtttcaaaaccaacttcatgggcagccattgccagcaagcctgcaaaaccacagcccaagatgaaagcaaagagtgggccgatagtggggggtgctttgcctcctccacctataaagcataacatggacattggtacttgggataacaagggccctgtttcaaaggcctcagccccccagcagacaccatccccccaggctgccccacagccccagcaggtagctcagcctctccctgttcagcccccacccttggtccagccacaatatcagagccctcagcagccacttcaaccccgctgggtggctcctcgaaacagaaatgcagcatttgggcagagtggagtggccaacagtgacagtaactctgttggaaatgcccaacctacttctgccccaagtgtagaatcccaccctgtcctggagaaactgaaagctgcccacagctataaccctaaagagttcgactggaatcttaagagtgggcgggtgttcatcatcaagagctattctgaggacgacatccaccgctccatcaagtactccatctggtgtagcaccgaacatggtaacaagcgcctggatggcgccttccgctccatgagcagcaaggggcctgtttacttgctcttcagtgtcaatggaagtggacatttctgtggggtagcagagatgaagtcccctgtggactacggcaccagtgctggggtctggtcccaggacaaatggaagggaaagtttgatgtgaagtggatttttgtcaaggatgtgcccaataaccaactgcggcacatcagacttgagaataatgacaacaaacctgtcacaaactcccgtgatacacaggaggtacccttagaaaaagcaaagcaagtgctgaaaattattgcttcatacaagcacacaacctccatctttgacgacttttctcattatgagaagcgccaggaggaagaggaggtggtgcgcaaggaaaggcagaatcgaaacaaacaataaggacaaaccagtttggttttggttaatggttgactttgaaaacagagttttaaagctgtatgcttggtgctgtctccgagtcagctccagtgtcgtcctcgtgcggggttgattgttgcatctttatctttgtagttcatttttgccagatggatctgcattcatttgtatttttctatgtattataatattgtagaactcactaataaaggagtattttgtttgtcagcttatcagtcagattgacctaatacaaaatataaatatccttcaaaacaaaacacctaatacatcccaaagatatttttattttggcagaaattatgttcttactcttatacccggtcatttaatatccctataggatacttcatatttcttgccctctactgctttacagtaaacaaagagcccattcagcatgtgttgttgacatctcacagtactgaagtggcttgccattttactacctgtggtatccatcagaatgctaacctgcccttttgagttgcctactgacagataacttttagttttcaagtgtgaccacagctgtctgtggagaagctatccatagttcagtgcccacacagagcagtgctccagctctccttgctaccatctgccactgcatgaggttggggctatgtggcaaggaaatagaaggtgtttaagtatggttcagcgttgtgacattcttagttgttcgcagatcattttagttgtcctctttcttcacttgagaatcctgatgctgtcttaagtttttataccagtaacgctaagctttaaatgtaggatctgatagtacaggcagtgtgatggatgctgctgccaactgtaaatttcactgtgtgtctattttttttttctgttgaatgggtgaaaaaagaaaaaagcaaacaattctttaggaaacaaatttgctatcatgttttgtggaatgaggagccgtggaggagctcactgccacctggagttggagttagcatgaaagtggtgctcatgcccgacgccctcgcatactgaatctgcacgcgcccactgtagaggatccttactgtcttagagagcagataaccttctgaaactatttactccaaaagaccctctcagttaccatttaagctgtattatttagacttgtatttagaacgcgtcacttcctcgagctgttactgcctgtacggagtcgtggacaacatcggatacctgtcctctaggagaatacaagccttaataaacacctgttgagcaaaaaaaaaaaaaaaaaaaaaaaaaaaaaa

SEQ ID NO: 493 - DNA, 2849 bp, Cricetulus griseus
aaccgcctgacgtcgctgccgcgggcgctgggcagcggcttcccgcacctccagctcctggacgtgagcgggaacgcgctcacggcgctgggacccgaactgctgacgctgagcggcctgcgcacgctgctggcccggaacaaccggctcggcggcccgggctctctgcccaagggcctggcccagtcgccgctctgtcgcagcctccaggtgctcaacctcagcggcaactgcttccaggaggtgcccgcctcgctgctggagctgcgcgcgctgcagaccctcagcctgggcggcaaccagctgcagagcatccccgccgagatcgagaacttgcagcgtttagagtgcttataccttggaggaaacttcattaaggaaatcccaccagaattagcaaatctaaccttctctgaattacttggtgttatgtgacaacaaaatccaaaagtgtagcctcctcagctttcacagttgcattcacttcgttctctcagtcttcacaataatttgctgacatacctgcctcgagagatcctcaaccttattcatctggaagagttgagtttgcgaggaaattccattggttgtccgttttgtttagagatttaacatacgaccctccaactcttctggaattagctgcaaggaccattaagagtccgaaggtatttcttacactccctatgatcttcctgggaatctcctaagatacttgggttcagccagcaattgcccaaaacccaaaagtgtggtggagtctattttgactgctgtgtcagacaaattaagtttgtggacttttgtgggaagtatcgcctccccctgatgcactatttgtgttctccagaatgttcctccccctgcagctctgccacacacagctccacatcccagagtgagtctgactcagaagatgaagccagtgttgctgcaacaccgaatgcagaaggtccttcttggttgagcagcagtggatgttgaaaaatacaaaaactaagcaaagatgattaaaaagaaaatggagcttgaagatgattggaaacctgttgtcctggtttgtgctgaacactatgccataaatagaatgagccttcttgtgttacccccaggttagaacctttgtgcccaacaaacagtacagtaaggactatcatttttaaatggaatgtgtaaacttcagctcttgttttgtatgattgttactgactttatgcaatctagctgtggtgtattacagtgccttaatcctagcaagggtatggaagcttattctagaaatgatttcagagcaacctacaacttgacactatgcaaaaacacttgggaatgtgctttagcagactagggaaacaactgtatagataatacccaaggcctgcaggcctggaactctttatgtagaatgagctggccaggaactcagagatccaccatggtgggcatgggccagaaggactcgtacgtgggtgacgaggcccagagcaagagaggcatcctgaccctgaagtaccccatcgagcacggctattgtcaccaactgggatgacatggagaagatctggcaccacaccttctacaacgagctgcgcgtggccccaccacagctgagagggaaattgtgcgtgacatcaaaagagaagctgtgctatgttgccctggacttcgagcaggagatggccactgctgcatcctcttcctccctggagaagagctatgagctgcctgatggccaggtcatcaccattggcaatgagcggttccgttgccctgaggcttctttccagtccctttccttccgtgggtatggaactcctgtggcatccaacgaaactacatcagcaagcaggagtacgacgagtcaggcccctccatcgtgcaccgcaaatgcttctagacggactgttttttgttttgttttggcgcttttgactcaggatttaaaaactggaacggtgaaggcgacagcagtcggttggagcaagcatcccccaaagttctacaatgtggctgaggactttgattgtacattttttttttattttttttttttttaaagtcattccaagtacccatgagatggctacaggaagtccctcaccctcccaaaagccatccccattccctagaagaggatggctgagtccatgccctgagtccacaccggggaggtgacagcattgcttctgtgtaaattatgtactgcaaaaattttttaaatcttccgccttaatacttcttttgttttatttttgaatggtcagccatcgtggccctttttttttgtccccccaacttgatgtatgaaggcttttggtctccctgggagtgggttgaggtgttgaggcagccagggcttgcctgtacactgacttgagaccagtttaataaagtgcacaccttacaaaaaaaaaaaatcttggtaaatgctaaaggtagtttcagatttcattaggatgtcaggtgttttcttaaagatgctttgttagaggtcaaccctatgctgagactatttgcatgttagttttcttgtatatattattttattttaatagaatatattagtagattatgggataattcagggtttatgtgtgtttgtgttatgtcatgaaacacgagagtttcgtggctgcagttgtgaaacgctgctatagtgattttttttttttttttttttttttctttttttttttttttttttggtttttcgaaacagggtttctctgtgtagttttggctgtcctggaactcgctctgtagaccaggctggcctcgaactcagagatccacctgcctctgcctcccaagtgctgggattaaaggcgtgcgccaccaacgcccagcca

SEQ ID NO: 494 - DNA, 2848 bp, Cricetulus griseus
  modified_base (444)..(444): a, c, t, g, unknown or other
  modified_base (459)..(459): a, c, t, g, unknown or other
agaagacaaagaagcggttaaagcatagattctggactgaagtatacccgggtgccaagctgttctacctttctggaatggtacatggagagtatcagaaccaagagattcataacttgggccgatttattacagttatgaagtttaggcctctcacatggcaaacttctcatccttacatcctggcagacaggatggaagatctgacaaaccccgaggacatccgcacaaatgtcaagtgtgaccgaaaggtgtctctatatggttatttacgaggagcctacttgaaaaataacagtcagattcacatgccaggcgtaggagattttgttgtcagcgatgtcagttttctccccgaccctgtgctcttccggaacagcaaaagagcgctgttgaatgagaaggagaagctggtctatgcacctctctctggagttgggggtntgctgtatgacaagntgctgtctatgtcgactttcaggcaatggaggaaacaggccccacacatgaactggtccagagcctcatctccacccatgccagtatcgatgccaagatggcttcaagcagagtgacactttttttctgattccaaaacctctggggtcagaagatatagataatcaagggctgtggatgccgaaagaggagaagcaagtggacgtgaacactggtcgagtacgtcggaaagctgtctttgaagacacagaggatgagtctggagatgaagactctgaagatgatgaagaaatgtctgaaggtgacggaatggaaaatgactctagtgatgaggaggccgaagaagaagaagaagaaggttgatgagaccagtgacattgaaaacttactcaaagaggatgaagatcacaaggaagagaatagcagctccatggaaacgtcaggtgccctcaagtggaaggaagacctttcccggaaggcagcagaggcgtttctgaggcagcagcaagcagctccaaatcttcgaaagctgatttatggaacagtgacagaggataatgaagatgaagatggagacaccggagaagagcttggaggactgttccgtgtcagccagccggatagagagtgtaagcacaaggctgactctctggactgttctaggtttcttgtggaggctcctcacgattgggatttagaggaggttatgaacagtatcagagattgctttgtgacggggaagtgggaagatgataaagatgcagccaaggtcttagcagaagatgaggagctctatggtgactttgaagaccttgaaacaggggatgtgcacaagggaaaaccggacccggatactcagattgaagatacagaagaagacattaaggaagaaactgacccaactgaagaggaaagtgccaagaccaaacatctgaataagaagagaaagttgaaggagctatttgacgcagagtacgatggaggagaaggagaaagcacatattttgatgatcttaagggtgaaatgcagagacaggcgcagcttaaccatgctgaatttgaagatgaagatgatgaagccagagttgagtatgagggttttcgacctggaatgtatgtccgaatcgagattgaaaacatcccctgtgaatttgtgcagaactttgacccacactacccaattattctgggtggtttgggcaatagtgagggcactgtgggatatgtgcagatgcgcctcaagaaacatcgttggtataagaaaatcctcaagtctcgagacccaattattttttctgtaggatggaggagatttcagaccattccactgtattatattgaagaccacaatggccgacaaaggcttctaaagtacaccccacagcacatgcattgtggagcaactttttggggtccgatcaccccacaaggaactggatttttggcgatacagtctgtcagtggtgtaatgcctgaatttcggattgctgccactggagttgttcttgacctggataaatctataaaaattgtgaagaaattaaagctaactggctttccttttaaaatattcaagaatacttcatttattaagggaatgtttacttctgccttggaagtagccaaatttgaaggtgctgtcattcgaactgtcagtggaataaggggacaaatcaagaaagcactccgggctccagaaggagcattcagggccacctttgaggacaagttgctcatgagtgatattgttttcataagaacttggtatcctgtctccatcccggccttctataaccccgtaacatctttgttgaaaccagtgggagaaaaagatacctggtcaggaatgcggacaacacatcaactgaggcttgcccatggcatcaaactaaagccaaacaaggactccttgtataagccaatcctgagacaaaagaaacatttcaattcactgcacattccaaaagccttgcagaaggctctgccatttaagaacaaacccaagacccaagcaaaggcaggcaaagtgccaagggatagacagagaccggctgtcatacgtgaacctcatgagaggaaggtcctggctctgctagatgctctgagcacaatacacagtcataaaatgaaaaaggccaaagagcagagacacctgcacaacaaggaacacgtgaagatgaagcagaaggaggaggaggagaagctgaagcggcagaaggacctgaggaagaagctcttccggatccagggtcagaaggagaaacgaagtcagaagtccagtctgagagggtctaaggagagctgactcattgcttctccctgtctcagtttattttgtgatataaaagtattaaactattttcccaattaaaaaaaaaaaaaaacaaaa

SEQ ID NO: 495 - DNA, 2846 bp, Cricetulus griseus
atgtgctacttgaccatcaaggagatgtcttccatcgcagaggatgtcatcattgtgaccagcagtctgacaaaagacatgactggaaaagaagataattaccgtggtcctgctgtgcgagccctctgccagatcactgatagcaccatgctgcaggctgttgagcgctacatgaaacaagcgattgtggacaaggtacccagtgtctccagctctgccctcgtatcttccctgcatctgctgaaatgcagctttgatgtggtcaagcgatgggtgaacgaggcccaggaggcggcgtccagtgataacatcatggtacagtaccactggccgtgagtaagatgatcagtaagttcacccgtcatggcctgaagtccccctttgcctactgcatgatgatccgagtggctagcaagcaactggaggaagaagatggcagccgtgacagcccactgttcgacttcatcgagagctgcctgcgtaacaagcatgagatggtggtgtatgaagctgcctcagccattgtcaacctgccaggctgcagcgccaaagagctggcccccgccgtgtcagtgctccagcttttctgtggctcacccaaggctgctcttcgctatgctgctgtccgaaccctcaataaggtggccatgaagcacccgtccgcggtgactgcctgcaatctggatctggaaaacctggtcacagactcgaaccgtagcatcgccacattggccatcaccaccctcctcaagacagggagtgagagcagcattgaccgccttatgaagcagatttcttccttcatgtcagagatctcagatgagtttaaggtggtggttgtccaggccatcagtgccctgtgccagaaatatcctcggaaacatgccgtactcatgaacttcctgttcaccatgctaagggaagagggtggctttgagtacaagcgcgccatagtggactgcatcatcagcatcattgaggagaactcagagagcaaggagacgggactgtcacacctgtgtgagttcattgaggactgcgagttcactgtgctggctacccggatcctgcatttgttgggccaggaggggcccaagaccaacaacccctccaagtacattcgcttcatctacaaccgtgtggtcctggagcatgaagaggttcgggcaggtgcagtgagtgctctggccaagtttggagcccagaatgaagagatgttacctagcatcttggtattgctgaaaaggtgtgtgatggatgacgacaatgaagtgagagatagagctaccttctatctgaacgttctggagcagaagcagaaggccctcaatgcaggttatatactaaatggtctgaccgtgtctatccctggtctggaaagagccctgcagcagtatacactggaaccatcagaaaagccatttgacctcaagtctgtgcctctggccaccacccctgtggcagaacagagaccagaaagcaccgccaccgcaacagtcaaacagccagagaaagtggccgccactcgacaggagatcttccaggagcagttagcagcggtgcctgagttccaggggctagggcccctcttcaagtcctcacctgagccagtggccctcactgagtcagagactgagtatgtcatccgatgcaccaaacacaccttctctgaccacttggtgtttcagtttgactgcacaaacaccctcaatgaccagaccctggagaatgtcacagtgcagatggagcccactgaggcatatgaagtgctctcctatgtacctgcccggagcttgccctacaaccagcctgggacctgttacacgttggtggctctgcccaaggaagatcctacaactgtggcatgcacattcagctgtgtgatgaagttcaccgttaaggactgtgacccaaacactggagagattgatgaagaaggctatgaggatgaatatgtgctggaggatctagaagttactgtggctgatcacatccagaaagtcatgaaagtgaactttgaagcagcctgggatgaggtgggggatgagtttgagaaggaggaaacatttaccctgtctaccatcaagacacttgaagaggctgtgggcaatattgtgaagttcttgggaatgcatccttgtgagaggtcagacaaagtgccagaaaacaagaatactcacacgctgctgctagctggtgtgttccggggtggtcatgacatccttgtgcgcgcccgacttctgcttttggacacagtgaccatgcaggtgacagcaagaagctcagaggaactgccagtagacatcatcttggcatcagtgggctgagggctggcctaagcaggccctactcctgccttttttcaacactacgttgaagtagcttcatccccatgaagccagtggaaacccttccccacacctctgtattcagaaacaatcacgaatcaatacagatttttttttttaattccatcctatcacccaggaatgctagggtagattttgttttccaccttgcctgcaagaagccatcacaaatgaataaaatgttcagattttcttgcatatttatccccaaagaaactgtcttatctctataataagtcagcatgtatttcttacaactgcttcttctgcaggcttgtgctcagggcctccacttctcctggaggcctcccttcaccaagtggagcatgaggtatccccttggggctgtcagttccaagcttaggatggggataaaggctggctgaatgacaacacctagcaggtctgatgacccatcttcaggtgtttatagatggatgggtctccaaaggagatggctcagcaggtaaaggtacc

SEQ ID NO: 496 - DNA, 2846 bp, Cricetulus griseus
tgtgggcatataagtgtccgattcgatcctttcaatttcttgtctttaccactaccaatggatagttatatgcatttagaaataacagtaattaaattagatggtactaccccaatacgatatggattaagactgaatatggatgaaaagtacacaggtttgaaaaagcagctgagtgatctctggtggacttaaatcaagaacaaatccttcttgcagaagtacacagctccaacaggaactgagaagaatgtcacaaatggaatggtgaatggtcatatgccagctcttcctgatgaccgaagctagtaaccatgcacaggattgtgatgacagcatgggctatcagtatccattcaccctccgagttgtgcagaaagatggaaattcctgtgcctggtgcccgtggtatagattttgcagaggctgtaaaattgattgtggagaagacagagctttcattggaaatgcctgtattgctgtggattgggaccctacagcccttcacctccgctatcaaacatcacaggaaagagttgtagaggagcatgaaagtgtggagcagagtcggcgagcacaggctgaacccatcaacctggacagttgtctccgtgccttcaccagtgaggaggagctgggggaaaatgagatgtactactgctccaagtgtaaaactcactgtttggcaactaagaagctggatctctggaggcttcctccaattctgattattcaccttaaacgatttcagtttgtaaatggacggtggataaaatcaacagaaaattgttaaatttcctcgtgaaagttttgaccctagtgtctttttagtaccaagagacccagctctttgccagcataaaccactcacacctcaggggatgacatctctgagctaaggatttcaggaggagatgtgaaagaaaaatggatgtccagaattcagcagggaggacgatgtgctcctgagcaagagccccatcttcactcagtgcaaatatcaccagtagtccaaaaggttcaccttcttcatcaagaaaaagtggagccagctgtccctccaaagcaaaaacagcagccctaacagcagcccacggactttgggcaggagcaaaggaaggcttcggctgcctcaaattggcagcaaaaataaattgtccagtagtaaggagaatttagatgccagcaaagagaatggggctgggcagacatgtgaactggctgacaccttgagccgaggacatatgttgggaggcagccagcctgagctggtcactcctctggatcatgagagcactttggctaatggattcctttatgagcatgaagcttgtggcaatggctatagtaatggtcagcttggaaaccatagtgaagaagacatcactgatgaccaaagagaagatactcatagtaaacctatttataatctatatgcaatttcgtgccattcaggaattctgggtgggggccattatgtcacttatgccaaaaacccaaactgcaagtggtactgttacaatgacagcagctgtaaggaacttcatccggatgaaattgacaccgactctgcctacattcttttctatgagcagcaggggatagactgtgcacagtttctgccgaagatagatggcaaaaagatggcagacaccagcagcatggatgaagacttcgaatctgactataagaagtactgtgtgttacagtaaagctaccactctggctgctagatgggctggtggtactcgaggtgactccctgtagctacatttggcagaatcatcactgaaaagcaggctaaatgcagtattttatcctgtgacctgaagcacaaaataaaaatcctaattaaaatagcactttgtttctcattttgcactttaaaagagagaacacatgcaaacagttgtgcttgtactttaatggctctacgggctgtaaattaactccatcagagtgtgaaatttaaaaacagaaatacatccaacattgatagtatgtaagtattgctaaagaaactgctaggtttaggacacaaactctggttgtttgcatgtctgctcctttctttacttttttctttctactagtcatcaaaattacattatttcctctcttttttctaattaattcaaaactggaacaaaagtataaatgtcatttatttctggcagcattttttcctgtgttgtgttttaatatgtagtcaagggaaattctcactttattttttggactcttaaaaattcatcaagaccctggaagttgattttcatttattgtcagatcctgttaccctcccttcctcacagcagtgaacaacagtgcagttagtgtttgtgctctgagagctgagaccagtcagcgtctagtttcatagattcaaagttttcatatatgaaatgtccactcctacctggacaagtcccatgaaaaagtagaaaattttcagtaatttccttacagatgttttagttgagcaggtagcacaatctactaatgttgtttgatctgtgtttgttatatcagttgtaattaattttttaaattcaagaactagcagaaaatttattaaattaactattaacttcattcaccttgtaaatttctgtataaaacttgttgacaatgcactgactttaggaagacattgatgtacatagagtgtaaataagatagtcttgatgtactgaatatgaactgtaataaaaaagtattggtcattgtatatggcgtgtacctgtttatctgtaactattacccaaacaaattaaatactgcagatgcccaaaaaaaaaaaaaaaaaaaaaaaaaaaaaaaaaaaaaaaaaaaaaaaaaaaaaa

SEQ ID NO: 497 - DNA, 2846 bp, Cricetulus griseus
ggcggcggcggcggcgggagtagcagcagtagcgtggtgtcgagcggcggcgacgagggctacggcaccgggggaggcgggagcagcgcgacctccgggggccggcggggcagcctggagatgtcgtccgacggggagccgctgagccgcatggactcggaggacagcataagcagtactctaatggacgtagacagcacaatttccagtgggcgttcaactccagcaatgatgaatggacaagggagcactacatcttcaagcaaacatattgcctataattgttgttgggaccagtgccaggcgtgcttcaactctagcccagacctggcagaccacatccgttccatacacgtagatggtcagcgcggaggggtgttcgtttgcctgtggaaaggctgtaaggtgtataacactccgtcaaccagtcagagttggctgcagcggcacatgctgacgcacagtggggacaaacctttcaagtgtgtagttggtggctgcaatgccagctttgcttctcagggagggctagctcgccacgtacccacacacttcagtcagcagaactcctcaaaagtttctagccagccaaaggccaaagaagaatctccttctaaagctgggatgaacaagaggaggaaactaaagaacaaaagacggcgctcattaccacgaccacatgatttcttcgatgcacaaacactggatgccataagacatcgagccatatgctttaacctctcggctcacatagagagtttagggaagggacacagtgttgtttttcatagtactgtaatagctaagagaaaagaggaatctggaaagataaaacttttgcttcattggatgcctgaagacattctgccagatgtgtgggtgaacgaaagtgaacgacaccagttaaaaactaaagtagttcatttatcaaagctacccaaagacactgccttgctgttggacccaaacatttacagaacaatgccgcagaagaggttgaagaggtaaaacatacataaatacataaaagcaaacaagcagggcctcctgcagtcttagtcactgacaatgggcttagggaaagttgcacattagagtcaaccccttcctcttttatttttaagtccagtatttagagtaatatttatgcttagtgtggacattctgtgaatgagtaggtcttctgtggaatatattaatatattactgtagtccacatgtcatggaatggcgctgtgggagactgcgcagacactctctggcaactcagttgaacagcttctcaaaggctttgcatgctcgctgcttaagctgcttttttcttccccttagtgattacagtagttttattggaaagacgaacaattgcccttaaaaataccaaaagcactgtgagatactcatcttgacagtgtgtattgatttgaagtcctaatagaaaatatttagacagtggaaattatcaagagataattaacctttcattttatgataaatagatgtgattggttgccatttgtgttcttttgcagaactctgataagaaaaatgttcaatttgtatttaagcaaacagtgaacgacatttgcaatcaactaaaaattcatctatcgaattaggtctgagaattactgttacagagtgttgccgtatgtctgttggctcccttttcaggactagggtcttttagatggggtacagtgtgttatatttacttacataactactcttgtcaatggtttttgaaaaaaacctcaacttaaatatttgaataatcttcatattttcatttaacctgtgacttaatttttttcctgaggaaagtggtttgttttttaattttttcttaatgtaaaaaaaaagtattttttttaaaagtatcttcaaaccgaatcttttatgcaccaaagttggttttgaaaaggaaaataaaatcacattcttgcttggcacgcaagaagccatatggaatttttttaactttacagaaatggaaatatgtgtaatttgtcagtactgtatcaaacaaatgtcgaatagagataatagagcgttgcttgtaaataattcagcagatttgtaatatatttttctattatgaaatgtactgtagatgttttctagaggcatgaaagtcaatgtatatattatggtagaactaatattgacgggaattgtaactcactagtgctgccagagggattgctaacaaagcacctttaaccagagatgtctttgcggactgaagggattgtgtactactgttaatgtctaagaacaaagcattggacatccttccagaaagtctctgagggaggaccactcctacaaggacaggaaaaccagcagtttttacactcaattttttaaagaaaggtagataaaattaaacctttggttccaaaatgggaaagcttccatgatgcatagatcattactcatttgcttaaaaaagaaaaaccacacacacaagctctgtagcaaacgggagtctattttcaaagaagaaaagcagtgtgttcttactatgattttatcttttgcttaagcacttcatcgtttgttccattctgtatctgccaagtaccccacaatctcctttgttcctttttgaattttggtttgttataacattgccaaatagaagtgtttcagacatagagtttgtacctgtatttttattttactgtctcatgttcttgtaagtcattcttaattgaccgatgattgtagactttgcttgagtattttttctaataaaacaaagcaaaatcacatttagcttcaaattgtaacaattcaatttaattttaagatgacatctggaaatacacagccaacatttt

SEQ ID NO: 498 - DNA, 2844 bp, Cricetulus griseus
  modified_base (287)..(287): a, c, t, g, unknown or other
caagtcttctcccgcttccgccatgctcgatttcttcaccatcttctcgaagggcgggcttgtgctatggtgtttccagggcgtgagcgactcgtgcaccgggcccgtgaacgcgttgattcgttccgtactgctgcaggaacggggaggtaacaactcattcacccatgaggccctcacactcaagtataaactggacaaccagtttgagctggtgtttgtggttggctttcagaagatcctcacactgacctatgtagacaaattgatagatgatgtacaccggntgttcggataataccgcacagagatccaaacaacaaagtgctttaagtctttgatttccagaatgacttccttcggctccttcgtgaggcagaggagagcagtaagatccgtgctcccactaccatgaagaaatttgaagattctgaaaaaactaagaaacccgtagaggtaccatgaattgaaacaacggggagaaaagaaccaaaggaaaaaacaaaaaacaacaaaaaaagggggaccaaaaaggaaggttctgatggccctttggctactagcaaaacagcccctgcagaaaagtcaggtctcccagtgggacctgagaatggagaactttccaaagaggagctgatacgcaggaagcgagaggagttcattcagaagcatgggaagggtctggacaaatcgagcaagtctacaaagtcagatactccaaaggagaagggcaaaaaggcaccccgggtttgggaactaggtggctgtgccaacaaggaagtcttggattacagtgctcccaccaccaatggaactccagaggctgctctgtcagaagatatcaacttgatccgaggaactgggcctggggggcagcttcaagatctggattgcagcagctcagatgatgaaggggccactcaaaacaccaaacctagtgctaccaagggagctctgggtggcatgtttgggatgctgaagggccttgtgggttccaagagcttaagtcgtgaagacatggagtctgtgctagacaagatgcgtgatcatctcattgctaagaatgtggctgcagatattgctgtccagctctgtgaatctgttgccaacaagttggaagggaaagtgatggggacattcagcactgtgacttccacagtcaagcaagctctacaggagtctctggtacagattctgcagccacagcgtcgcgtagacatgctccgagatatcatggatgcccaacgtcgccagcgcccttatgttgtcaccttctgtggtgttaatggtgtggggaagtctactaatcttgccaagatttccttctggcttttagagaatggcttcagtgtcctcattgctgcctgtgatacttttcgggctggggctgttgagcaacttcgtacacacacccggcgtctgactgccctccatccccctgagaagcatggtggtcgtacgatggtgcagttgtttgaaaaaggctatggcaaggacgctgctggcattgccatggaagccattgcttttgcacgtaaccaaggctttgatgtggtgctggtggacacagctggccgcatgcaagacaatgcccccctgatgactgccctggcaaaactcattactgtcaatacacctgacttggtgctgtttgtgggggaggccttagtaggcaatgaagccgtggatcagctggtcaagttcaacagagccttggctgaccattctatggctcaaacacctcggcttattgatggtattgttcttaccaaatttgacaccattgatgacaaggtgggagctgctatttctatgacatacattacaagcaaacccatcgtctttgtgggcactggccagacctactgtgacctacgcagtctaaacgctaaggctgtggtggctgctctcatgaaggcttaatgtggctcttgcctaataccaaatcgccgcttgccccatgtccccattcctatatcaagaatgtgctttagagtatgtgagcaacttgtcttcagtgtagtacaaaggcagagtgaggagagctttggagacttgcagctcctaaccctacttcatgttcagctctacctcctgcaaggagggcctaatcatgttacaatcactgcctgatgacccaccctcttcctgctcaggcatctccttcactctgcctacagattcagtatcatagctttgaccaatggttggaaaacccaatacctggagtattgctaactagtgtgatcacagagccatctgagataaggagcagtttgaagtcccagctctattgggttacttccagagccagctctgggtcttaatggcacttctctctaaatatacagctttcgggttcctggtgccagggtgacagccacctcactgtggcagtgatggtggtccttaattgctgctaattctaaatctgatgatgaacttctatacctgattgttgccccaaagcatcagttaggccttgttacaaatgagtgaaaggtgagtgcccacttagaaacaaagggagctaagttgccttccaacttgtccctgctcccggaatccagatgtaagctttgcatgtttaccttcctgggagaaaaaactagtcagaagggttaaagttgtcctgtaccccaccccaccccacctcctgagcgggtcctagcttttcctcatcctcttctacagtgcctggtagacaagtgctacgttgaagaacacaaacctcttgttaagacttgtcctgtagttcggtattacagatgtgctactagtgcaataaggtgaaggctgtctgcccagagaaatacataatttatataagaaaataaatttcat

SEQ ID NO: 499 - DNA, 2841 bp, Cricetulus griseus
gctgctgagaagaaatctgatgtggcctgtgattctccatcaagtgacaaagagaattccagtcagatggctcaggaccatcagaagcaggaggcagtagtcaaagaggatgaaggcaggagagagagtattaatgacagagcacgtaggtctccacgaaaacttcctacttcaattaaaaaaaggagaaaggaaatgggctcctccaaaatttctgcctcacaaatatgacgtgaagctaacaaaatgaagataagatcatcagcaatgtgccagtggatagtttgattcgaacaggctgctgccgagaaggctgggatatgtctgcagaaaatgctagatgcaaagtttgtcggaaaaaaggtgaggatgacaagctgatcctgtgtgacgagtgtaataaagccttccacttgttctgtctgaggccggccctctatgaagtaccagacggggaatggcagtgtccagcttgccagcctcctactgccaggcgaaactcccgtggcaggaattacactgaagagtctacctctgaggacagtgaaggtgatgagagtggtgatgaagaggaggaggaagaggaggaggaagaagaggaggattatgaagtggctggcttacggttgagacctcgaaagaccatccgaggcaagcagaggatgacacagaagttgatgaactggtacttcagaccaagcgtagctcgaggaggcagagtctggagctgcaaaagtgtgaggaaatcctccacaaactggtgaagtaccgcttcagctggcccttccgggagcctgtgaccagagatgaagctgaggactactacgatgttatagatcaccccactggacttccagaccatgcagaacaaatgctcgtgtgggaactaccgatctgtgcaagagttcctcactgacatgaagcaagtgtttaccaatgctgagctctacaactgccgtggcagccatgttctgagctgtatggggaagacagagcagtgtctgctggctctgctgcataaacacctccccggccacccctatgtccgcaggaaacgcaggaagtttcctgataggctcgctgacgatgaaggggacagtgattcagagtctgttggacagtccaggggacgaagacagaagaagtaaagagcagggccctggtgaggcagccatggaggggggataggaggagaacatcaaggggtgtgggagaggcggggagaaaagcttccagggaagtgacggcagcgtccagaaatgcctgtcaggccaagcttgggctttttctgcaactccccatggggcttttttcaagcaaagccaagctcttggggagtatgatactggcctggtgaaccctgcccagaaaagctagcagcagaagtgggcctcctcacctgagagagctgggagaagactgggtacagcttctcctgtgagctctgccctcctcctcctctccctcctcctctgcccgcctcatctttacagcagtgccaagccccctggtctccagagagggtactgtaccccacagtaggaaggagcaccatctggccatgctggtcgaggtgtggatctttttgaatttatatttatatacagtcctgtttcttatgtccgcactatctcttcctcctccctctcaggtgacagtatcagctagtgccatacagagttgtgtgttcaccagcatcttgggacagtgtgggctttgaattgatcatggcagagtagagggatattttctggagctgctcctgagcaccctccccattgcggcagcccttccccaccctcacccagctcaccgcctcataaaaccaagcaaacgaaggcacttcccgtagagactggagtcctgctttcagtcatgctgtgaccttggctttgacgggtctggccagaggggtgttggagcccagcccacccacagaccagacaagcccctagggagccgaaaaagagcaggaagaagttaaaatgtttaatttttaaattgacttttgtagttactaaagttgcttgtttccgcagtgatattgtataaagaacatcttgtaaaatacttgtcatcttgctttggcacatgtacagtacagtttctatgatatgtgttcgcttattcccctccgcagagaggccagcgggcagcgggatctgggttggagccctctctctgtcctgatggcactctactttcctgtgggcgcttgctcctccagagcccatctgcagacctagtgctccttccaaatctcctggacggtagttggtgtcagctacaggagcagctggggagggccagctctgcccttcgtagcctgtctagcctcgtgttgtatttaggcaaaagtttgtagtctgcttccccttttatgacaggttttgataaaagtacaagacagggtttaactttcttttctatcgattttgaatttgaaaaatgtgagcccctcagctctccttatttaaaggaaggaaaggaagcccaccgtatcaggaggctcacaactcttggggctaatggaaggcctggctgtgacttctgtgtgtagcacaagcacagtcaagtagctgaagaaggtttccctcccctcttctgtaagccttggttggggttagcactaacattgatgccgtgatcctggcaccactgcctccctgcttctaacgtgttttagcagaaagctggtatttccactgcagtgacatctgcatggtggctttttaaattgtcttaaaggaggaagggccgcggttaagggtagacttgtaataaattggatttcaaataaacattatgtacttgtagtttataaagaaaaaaaaaaaaaaa

SEQ ID NO: 500 - DNA, 2839 bp, Cricetulus griseus
atgaagcaggtgacacagctggccattgacactgaggaacgcctcaaaggagttattgacctcatctttgagaaagccatttcagagcccaatttctctgtggcttatgccaacatgtgccgctgcctcatggccctgaaagtgcccactacagaaaagccaacagtgactgtgaattttcgaaaactgttgttaaatcgatgccagaaggaatttgagaaagacaaagatgatgatgaagtttttgaaaaaaagcaaaaagagatggatgaagctgctacggcagaagaacgggacgacctagaaagaagagactagaagaggccggacataagctcgacggcgctctttagggaatatcaagttcattggagagttaattccctcgaatggatcagtaatttctaaccaaataggaaaaaattaattaaagaaaagaagacctcatctcgaatccgttttatgttgcaggatgtattggatctgcggcagagcaattgggtgcctcgacgaggggatcagggtcccaagactattgatcagatccacaaggaggctgagatggaagagcaccgagaacacatcaaagtgcagcaactcatggccaagggcagcgacaagcgtcggggtggccctccaggcccgcccatcagccgtggccttccacttgtggatgatggtggctggaatacagtccccattagcaaaggcagccgccccattgatacctcacggctcaccaagatcaccaagcctggatccattgattccaacaaccagctctttgcaccaggaggacgactgagttggggcaagggcagcagtgggggctcaggagccaagccctcagacacagcgtcagaagctactcgtccagctactagtaccttgaatcgcttttctgctcttcaacaagcattgcccacagagaacacagataacaggcgtgttgtacagaggagtagcttaagccgggaacgaggtgagaaagctggggaccggggagaccgactagagcggagtgagcggggaggtgaccgtggggaccgacttgatcgtgccagaacaccagccaccaagagaagttttagcaaggaagtggaggagcggagtagagagcggccttcccagcccgagggactgcgcaaggcagccagcctcacagaagatcgtggtcgggatcctgtgaagcgggaagccactctacctccggtgagccctccaaaggctgcactctctgaggatgaagtggagaagaaatctaaggccatcattgaggaatatctccatctcaatgacatgaaggaggcagtacagtgtgtccaggagctggcttcaccctccttgctcttcatctttgtgcggcatggcattgagtccacgctggaacgtagcactattgctcgtgaacatatggggcgactgctacaccagctgctctgcgcagggcacctctccactgcccagtattaccaagggctgtatgaaacactagaattagctgaggacatggaaattgacatccctcatgtatggctttacctggcagaactgataacacccattctccaggaagatggggtgcccatgggagagctcttcagggaaattacgaagcctctgagacccatgggcaaagctacttctttgttgctggagatcctgggtctcctatgcaagagcatgggtcccaaaaaggtgggaatgctgtggcgagaggctgggctgagctggagggaatttctagcagaaggccaagacgttagcacatttgtggctgaacagaaggtggaatataccttgggagaagagtgtgaggctccgggccagaggccacttgcctttgaggagctgcgaaagcagctggagaagctgctgaaggaggacagcagtaaccagccggtgtttgactggatagaggccaacctgaatgagcagcagatagcatccaatacattagttcgagccctcatgacaactgtctgttattctgcaattatctttgagactcctctccgagtggatgttgcagtgttgaaagtgcgagcgagactgctacagaaatacttgtgtgatgagcagaaggagctacaagcactctacgccctccaggcccttgtagtgaccttagaacagcctgccaacctgcttcggatgttctttgatgccctgtatgatgaggacgtcgtgaaggaagacgctttctacagctgggaaagcagcaaggaccctgctgagcagcagggcaagggtgtggcccttaaatctgtcacagccttcttcaattggcttcgagaggctgaggaggaggagtctgatcacaactgatggcgggtggggccggggacttggagccatggacacgtggatggcccagccagccagctgcctggactgcaggggggcggcggtggcagtggcggcagtggcagtgggtgcctgtagtgcgatgtgtctgagctaataaagtggctgatgaggcaggatggcttggggctgcctggggccccccctccaggatgctgccaagtgtccctctcctccccccggggcacagagatatatataaagtcttgaaatttggtgtgtctttgcggggggaggggcactaccgcctgcctctagggtccttttttatttctgaaatcactcttgggactgccgtcctcgctgctgggggcatatgccccagcccctgcaccacccctgctgctgcctgggcaggggaaaggggggggcacggtgcctgtaattattaaacatgaattcaattaaaaaaaaaaaaaaaaaaaaaaaaaaaaaaaaaaaaaaaaaaaaaaaaaaaaaaaaaaaaaaaaaa

SEQ ID NO: 501 - DNA, 2839 bp, Cricetulus griseus
catctcttcgtggtggagaaagtccatcctgacttgttcgaatacctcttacagttcatgtatacagatacttgtgacttcttaactcatggcttcaaaccaagaatcctcatgaacaaaaagccagaagactgtaagggctcctcagattctcatatgaataaaatgaattgccacatggatgataaccagaaggcagcatttgaggtttacaaaagcaaccaagctcatacaattagtgaaaggcagaaaagcaaaacacaaatcttaccaaaaaagggaaaaggtgttggggaagatgatcctgtaaggatgttgcaaaatgttgcaaagaaatttggcctcagtaatttgagtagcaggttagatggagtcagatttgaaatttgtgaaggagcattgactgaaaacttacccttaagaatgctgctatgctgctggagttcgcagcaatgtacaatgctcaacagttgaaactgtcttgtttacagttcataggactgaatatggcggccttacttgaagcaaggtccctcgatgttttaagtgaggatgttttgaaggacctttccatattttaccgaaaaatgattccagcaatggagcgaagagtcattacaccatatcaagatggaccagatattagctacatgcaagtagatgatggggatgtactttttcaaagaagaaataaataatggaaccaaattactcggaaaccatgttcaagaaggcaaaaacaagagctaaaaagaagccacggaagcgctccgacagttctggaggctacaacctttcagatattattcagagtccaccatctgcaggattattaaagtctggtaagaccaattctgtggagtctcttccagaactgttgacctcagactctgaaggaagctatgcaggagtgggtagtcccagagacttacagtcgcctgattttacagcaggattccatttggacaaggtcgaggggaaagccaaaccgtatgtgaacggtacacctcctccatgtgccagggaagatttcaaaccatgggaaaaatcaccaacatctaaatctgctccccagttcattcccagggacagagtcgacactgcaggctcttccagttgggttactggctctttcagtcctacaagtcctcctgtcgtggattttagaaccatcatggaaacagaagaaagtagacaaaaatatggcgcagtaccaaagttaaacttaggaaaaattatttctcatggagtcaaactttctcagaggcaacggaaaatgattgcattgaccaccaaagaaaacaattcaggaacaaacagcatggaaccaattctaacagctccttcgaagtccctcaagccagcgaatgcatgggcttctctacactcaccttcatccaagtcattccgggatttcttactaggagaaaaaaaacctgttactggccatggttcagtagatcatgtcaaaaaagttggttttaaaggaattgaaaactctcaggccctaaatgttgtgagatgttcaactcatggaagtccaggactagaaagcaatcatgtttctgattttccactactagagagtcccaatccttggctgtcttcctcactggctgcttctaccgcagtcgctcctgtcacttttgcgtctattgtagaagaagagcggcaacaagaagccgcactcatcagaagtcgggagaaacccttggctctcattcaggttgaggagcatgcgatacaagacttgctggttttctatgaggcatttggcaaccctgatgagtttgtcgtcgttgagaggacagcacaggggcctctggcagcgcctatgtggaacaagcatgggtgctagctcactggagagaggctgctgctcccaaggttgtggttgctacacttacataaagaaaacccttgcacaagcgttcgtacatatttggtagcatgttgttctagtcagaataaaagtggatatgatttcttcctgtagtttataatgtttgtatgactaatgagaaatttttcaaaattgtgattttagtaactgttatgtgacgatgtgtcaggaaaaatgttaggctaatattggttggattgtttcttctaaattaccttacaatggaaaataggggtgaagtatacagtttaggaatgattcattaaaattctcaaattttcatttgagaatatgaagcaatttagaagagtttaccacatatgtttttaaataagatattgatgagattaaggtaggagcctcagtcattacttctgatcactaatggccagaatgtgctgcttgccacaggaaatgtctgttgttgccttttcattgggctgttaatttcttaggcctctttaaagttgcatagcttctatgggagatttggattcatgaatttttgttggggtgggaaggtagcaagagaggtcataggaatgactaattgtgaaagaatcagtttcttaaagtgttaagattttctaaaacaaacataggattactgaatagtttgccctagtgattgtttatagttaatttttgtactgtgtaatcagaagttctgtgagcctagattatacgtgtacatgtaaattttgatttctttatagtatgctgtttggtttgtttttgagtgtttaaaattaaaaggaaaatgatgttaaaatgtgtactttgatatgtagataaaatgagaatgttaatgcctaagttctgggaaagattccttgggaatatgtaggcagtttaccgcttgacttcagttcatgggaaattgactgaagctaactcagtgtttcagttcagttccacccacaagcagcagatgtg

SEQ ID NO: 502 - DNA, 2837 bp, Cricetulus griseus
  modified_base (708)..(708): a, c, t, g, unknown or other
gcagagaatactggaaacaaagagtccatgaggggtccaggtgaccctgagcctcagcttattgaaatggaggaggctgcatctccagcagcagttggagaggtcctgagggaaggtagtggagacagtgatgcagagagaagcagtgaatgtgaatttgcccagtataccacacatcatattctcaaatccttggcttccattgaagctcagtgcagtggtatgagctcagaaaagaaaaccgtgtttccctcttctgtggatagagtgaataccgccttgcagagagctcaaatgaaggtttgcagtctgtctggtcaacgagtagggcgtagcttaataaaatcaaaggatctgttgaaacaaaggtacttgcttgcaaaagctggctatcccctaagaaggtctcagtctttgccgaccaccttactgagcccagtaaggttgtgtcttctgtcaatgtagaggaacaagaattggaaaagcaagtgactgaacaggatggtcagtctgtggttaaatctaccatcttcatccccccatcctctgggaagaaagcagaagcccctcacagtgaggagacacgactggacgactgccaccatggacggcttcccccttgtccacagtttgctgcaatatcccagtccacatgttcccttcactctgtccatgagtggcaggacaggcccctgtgtgaacacatgngaaccctgagtgctcaacagcgtccccaaacatatcaggtgccctattcacatagacatgctgcccacccatacagggcatgccctgtgaatcctccttccgccatagagatgcagttgcgaagagtgttgcacgatattagaaactcactacagaatcttttcacagtatccaatgatgagaggacctgatcttgctgctgcttcctacagtactcagaaatcgtctgttctacctctttatgaaaatacctatcaggagcttcaagttgtgaggcggagcctgaatctgttcagaacgcagatgatggacttggagttggccatgttacggcagcaaactgtggtgtacccccatatgacagaggaggacaggtatgaagttgatcagctgcagggtttgcggaactctgtgcgaatggaactacaggacctggagatgcagctggaggagcgtctgctgggcctggacgagcagctccgtgcagtccgggtgccttcaccttttcgatcctctgtgctcctggggatgtgttccagtagaagtgctgataacttatcatgcccgtctccactgaatgtcatggaacctgtcacagaactgatacgggagcagtcatatctgaagtccgagttgggcctaggacttggagagatggggttcgaaattcctcctggagaaagctcagagtccgttttctctcaggctacatcagagtcctcctccgtctgttccagccctccacaacaatagaagatccagggggcagcaaacccagagcccgcttagtggcaagaaagaagatattccgagcctctgtggccctgacaccaactgccccctctagaacaggctctgtgcagacacctccagatctcgagagttctgaggaagctggagcagctgaagaagcctcacaggttgtgggacttacatctcatgtggaggaagagcaagaagacctcccactgatgccagctgctgaggaaatgcatcggaacgtggagcaggatgagttgcagcaagtcatacgagagattaaagagtctattgttggggaaattagacgagaaattgtaagtggacttttggcagcagtgtcttcaactaaagcatcgaattctaagcaggacagtcactgaatggaaattattagggttgggatggatcccattaactgtaatactggcgttatccatgatttatgctggtggaggtgttgtttgtcctttggaagatactttctactgagctggcctactgtacacaatggatattgtgcatttctgtatgagtgtacactatactgttcttatatgcataaaaatttaaaaacatacatagaaacttaggcactttgctgactcatttctaaactatcagactggccatttgaaagtctagtatttatttgtatgtcaatatttttccagttgatgttcctatgtagaattaattgtaaaacttgaagagtcccagacataaccaacttataagtaacatatttcttcagactagcttctacaacactgacctctatgaggtattcactgtgcaataacaaattcatcttctgagagcttgaagcaaccgatgccttccccccaccccctgctcttcattgggtcacttctaagaagacaaatggtcctgttgtaaaaattgttcttaattcttgaggcggctactgagaagcagtagggtagatctcatgaggttacctacaactacttcatgttcttacactgtaagccttgttgctttgccccaaacaaatataattttattatagctatgtgccttatggtaaacactatgtataattttattatagctatgtgccttatggtaaacactatgtattttctgcattgtccagatgtcttactttaagatgtttcttctgtcttttagactaaatagtattgtcaagataatggggcctatgacttgaatggataggatagaaatgaataagctggtttttggttttgttagcattccttcaaagactatctaaaaggtttataaatattgaaatatcacacaaaggctgatctctaaaaaacaaaaaacccaattaaaacaataaagtatttattttgcctaaaaagttaaaaaaaaaaaaa

SEQ ID NO: 503 - DNA, 2837 bp, Cricetulus griseus
atgaggaggtccccgaggagccagctcctgctgcccaggaagaggaagctgagaaagtcggggcagaggatgaggaggagaagggggaaggtgctcccggagaggaagggaaacctgatgttcaaagtgtgggagaaaaagaacccacagaggctgccaaggagaagaagaaagaggatgatgatggagagattgatgatggggagatagatgatgatgacttgggaggaaggtgaagtgaaggaccccagtgaccggaaggtgaggcctcgccccacctgccgattcttcatgaaagggtttatacaccctggagtgaaatgaccaagggaaactactcccctccaatcacccaaaaacctgaaccttttccacccaaccggtgccccgcctcttggacctcacccattgatgcctgccaacccttggggtgcgccagtagttgatgaaattttgcctccaccccctccagaacccccacagagagtgcctgggaacgcggactcagacacgcaaaggaggttttaaaaaagcaaccattcggaaagagcaagagcctgactttgaagaaaaaggttcacagtaaccattggtgaagacgaccgggagtttgacaaagaaaatgaagttttcagagattggaattctagggtcccaagagacgtcagagacactatacttgagccttatgcagatccttattatgactatgatatagagcgtttttggcgtggtggacagtacgagaatttcagggtgcagtatacagaagcagagccgtatcataactatcgagaacgagaaagggaacgagaacgagagaacagacaacgagaacgggagcgagaacgggagcgtgaccgagagcgtgagcgcagacagagggagcgtgagcgagaacgggagcgagagagggacaaggagcgacagcggaggaaagaagagtgggagagagagagagccaaacgagatgagaaggaccggcaacaccgagaccgtgacagagacaaagaccgggagaaggacaaggaaaagccaaaaccccggtccccacagccaccaagccgtcaagctgagccaccaaagaaagagaccacctctgtagggccacaggtgaagcgagccgatgagtggaaggatccttggcggcgatccaagtctcccaagaagaaacttggtgtgtccgtctccccaagccgggcacgaaggcgtcgcaaaacctctgcttcatcagcttctgcttccaattcctccaggtcatcttcacggtcttcatcctactctggctccggctcatctcggtcccggtcccgatcctcatcctacagctcctattccagccgctcttccagacacagctcgttctcaggaagccggtccaggtcccggtccttctcctcgtccccatccccgtctcccacaccttccccacacagacctccagtcagaaccaagggggagccggccccgcctcccgggaaagcaggggagaagtcagtaaagaagccagccccacccccagccccaccacagaccaccaaaactactgctcctgcccctgagcctgccaaaccgggagatctccgagaagccagaaggaaggagcggcaaacaagaactcccccaaggaggcggacactcagcggcagtggtagcggcagtggcagcagctacagtggctccagttcccgatccaggtctttgagtgtgagcagcgtctcctcggtgtccagcgccacctcaagtagcagctcagtgcacagtgtggactcagaagacatgtatgcagacctggccagtcctgtgtcctcagccagctctcgatcccccactcctgctcagaccaagaaggagagagggaaatctaagaaagaagacggagtgagagaggaaaagcggaaacgggacccgtccacacagccacccaagtcctccaaagctccgacaggtgggaagtcctcccagcagtcagctgcacctcagcagacagcccctgggcagccccagcagggctcctttgttgcccacaaggagataaagctgacactgctgaataaggcggctgataaagggagccggaagcgctatgagccatcagacaaagaccggcagagccctccagccaagaaggccaacttaaccccagaccgaggttctcgggaccggaaatcaggggggaaaatgggctccccaaagccagagaggcagagaggtcaaaatgctaaagcccctgctgcccaagcggacaggaagcgtccactgtcaccccagtctaagagctccagcaaggtcaccagtgtgccgggcaaagccaccgacactgctactgcaggcaccaagtcagggaaagccagcacgttgtcacgacgggaggagctccttaaacagctcaaggctgttgaagatgccatcgctcgcaagcgggccaagatccctgggaaagtgtagtgggcccagctcactccctggagtagactcttaaatgtttttatatttaaaaattaacaaaaaaaaaaaagtttctgggaacaggaaagccgagtatttcctggaccacaggcagcaccatccctcccctccctcggatcagaaatatatatatatttctaaagtcatatatacatatatatatatgactaaagtctgattggaaacatttcctgtcttttattttaagcatcaaattgttttagttgaattaaaaaggaagaaacagaaaagacaaaaaataataaaataaggccaagggtattgttggggtgtctgtccaatgtggagggttcttttttgagcgatctcctaaaataaaattattttgaataaaacaaaaaaaaaaa

SEQ ID NO: 504 - DNA, 2837 bp, Cricetulus griseus
cggaggctgctgctgccgccgcccgctgcgggcgaacggctgcgtgaagaacgggaggtgaggaacgggtacgtgaggagcagcaccgccacagccgcggctgccggccagattcatcatgttacagaaaatggaggactttataaaagaccgtttaatgaagtttttgaagaaacacccatgttggttgctgtgctcacatatgtagggtatggcgtactcaccctctttggatatcttcgagatttcttgaggcattggagaattgaaaagtgccaccatgcaacagaaagagaagaacaaaaggactttgtgtcattgtatcaggacttcgagaacttctatacacgaaacctctacatgaggataagagacaactggaaccgacccatctgcagtgtgccaggagccagggtggatatcatggagagacagtcccatgactacaactggtcattcaagtacacagggaatataattaaaggtgttataaacatgggttcctacaactatcttggatttgcaaggaacactggatcatgtcaggaagcagctgctgaagttctcaaggagtatggagctggagtgtgcagcactcgccaggagattggaaacctggacaagcacgaagaactggagaaactggtagcaaggtttttgggtgtggaagctgctatgacttatggcatgggatttgcaacaaattcaatgaacattcctgctcttgttggcaaaggttgcctgattctgagtgatgaactgaaccatgcatcactggttctaggagccagactgtcgggagcaaccattcgaatcttcaagcataacaatatgcaaagcttggagaagcttttgaaagatgccattgtttatggtcaacctcggacaagaaggccctggaagaaaatcctaatccttgtggaaggcatatatagcatggaagggtctattgttcgccttcctgaagtgattgctctcaagaagaagtacaaggcatacttgtatctggatgaggcacacagcattggggcccttggcccttcagggcgaggtgtggtagactactttggcttggatcccgaggatgtagatgttatgatgggaacattcacaaagagctttggtgcttctggaggatacattggaggcaagaaggcgctgatagactacctgcgcacacattctcacagtgctgtgtatgccacgtcaatgtcaccacctgtgatggagcagatcatcacctccatgaagtgcatcatggggcaggatggcaccagccttggcaaagaatgtgtacaacagttggctgagaacaccaagtatttcaggagacgcctgaaggaaatgggattcatcatctatggcaatgaagattccccggtggtgcctttgatgctctacatgccagccaaaattggcgcctttgggcgggagatgctgaagcggaacgttggtgtggttgtggtgggatttcctgctaccccaatcattgagtccagagccagattttgcctgtcagcagctcataccaaagaaatacttgacacggctttaaaggagatagatgaagttggagacctgctgcagctgaagtactcacgccgtcggctggtgcctctgttggacaggccctttgatgagactacctatgaggagacagaagactgagcctttttggtgctccctagaggaggaaactccctcccaggacagtgtgtggcctttctgagccagttccagaaccacacttcagtgaccacctcatgtgaaagacatttccgaagctactgaaggtggacacctccactccaaatggcattttgtaaatagtaaaaaaaacaaactgcttcacattcttccattgtttgctaagtctcacatgattactttgtccattaaaaaatgttttattttataactattctacttgtgaaatcacactgacccttgcctgtggcttaccacacaggcattccctactccagtcacctcctgggcttggatccatcaagacttaacctggccctggcgctccagccttgagactcactggccctctccctagggagcaagtgccttctgctaacttcttgtccaggtctcagaggtccgccccccccccccaataacccttatttaaccagtcaagttaatcaaccaaagcattctatctttagtcttaaatgttaacaatgccaggaggtttattatgtgactccccctggccaaggacctccctagacttctcttaatcttcattgttgttctggtcaccaaatagtttattggtcacagactgaagatgtgtcccaagtttgggttcttaccccatctagccctaatgcttccgacctccacagttatgacagtctctagctgcttctgggtccagattaggatgtgacctggtaaaggaagtgtgagtcaatcctttgcccgtgttccacttcaccattagtgttataagttttccttgtagatactgacccccttgtccttccaaatgccagttcttgtactctgaaatgtcctaagatgattttgacccagcctctggggctgacttctcttgtgcttctgttgtgcatatttttttcctttgaggaatttctgatcagatacctctttcctaaactggaatagcctctgtttgtctgttactactaggtcagggacttcatccagagctctgcactgcttgaccaaagaacatagctgaagaacaccatttaaagttactctcttcttttgaccaaagcttaaatcgaagagaatctttggctttattgcactgaaaatgaatctgtgttttagtggtgatcaagtgttagagggaa

SEQ ID NO: 505 - DNA, 2836 bp, Cricetulus griseus
gtggaggagctggctgagcagctggagcagactaagcgggtaaaagctactcttgagaaggcaaacagaccctggagaatgagcgaggagagctggccaatgaggtgaaggtcttgctgcagggcaaaggtgactcagaacacaagcgcaagaaggtggaggcccagctgcaggagctgcaggtcaagttcagcgagggagagcgtgtgcgcactgagctggctgacaaagttaccaagctgcagttggagctggacagtgtgactggtctccttaatcagtctgacagcaagtccagcaagctcacgaaggacttctctgcgctggagtcccagcttcaggacacacaggagctgctgcaggaggagaaccggcagaagctgagcctgagcaccaagctcaagcagatggaggatgagaagaactccttcaggataagctggagaagaccaagactcggctacagcaggagctggatgacctgctggtagacctggaccaccagcggcagagcgtctccaatctggagaagaaacagaagaagtttgaccagctcctagctgaggagaagaccatctctgccaaatatgcagaggagcgtgaccaagctgaggctgaggcccgtgagaaggaaacaaaggcactgtcgttggcccgggccctcgaggaggccatggagcagaaggcagagctggaacgggtcaacaagcagttccgcacagagatggaggacctcatgagctccaaggatgacgtgggcaagagtgtccatgagctggagaagtccaagagggccttggagcgagcaggtagaggatggaggcagagctggaggacgagaggaaacagcgctcaatggccatggcggcacggaagaaactggagatggatctgaaggatctggaggctcacattgacacagccaataagaaccgggaggaggccatcaaacagctgaggaagctccaggcccagatgaaggacttggcatgcgggagctgggatgacacgcgcgcctcccgagaggagatcctggcgcaggccaaggagaatgagaagaagttcaagagcatggaggctgagatgattcagctgcaggaggaattggcagctgctgagcgtgctaagcgccaggcccaacaggaacgggacgagctggctgacgagatcgccaacagcagtggcaaaggggcactcgcgttggaggagaagcggcgcctagaggcccgcattgcccagctggaggaggagctggaggaggagcagggtaacacagagctgatcaacgaccggctgaagaaggccaacctgcagattgaccagataaacaccgacctgaacctggagcgcagtcatgctcagaagaacgagaatgcgcggcagcagctcgaacgccagaacaaggagactcaaggccaagctgcaggagatggagagtgctgtcaagtccaaatacaaggcctccattgctgccttggaggccaagattgcacagctggaggaacagctggacaatgagaccaaggagcgccaggcagcctccaaacaggtgcgccggaccgagaagaagctgaaggatgtgctgctgcaggtggaagacgagcggaggaatgccgagcagttcaaggaccaggccgacaaggcgtccacccgcttgaagcagcttaagcggcagctagaggaggccgaagaggaagcccagcgggccaatgcctcacgcagaaagctgcagcgtgagctggaagatgccacagagacagccgatgccatgaaccgggaagtcagctccctgaagaacaaattgaggcgtggagacttgccgtttgtggtgacccgccgacttgtccggaaaggcactggcgactgctcagatgaggaggttgatggcaaagcagacggggctgaggccaagccagctgaataggatcttctgctgcctgagacaacagacagacggctccgcctcccctccaccacccctccacacccctgccttgagactgctctgaccctgacaacccccgacccccaggccttactgagggcattggcttcctctgctgcatagtcctccatacctttcaagaatccgataccaaagagtccaggctggcccaggcccagtgaccagcaaggttttgccccagttgcctgaaagcacaggtggtgggcaaggagggcagccctgggagtgggcacaagagttttctatgaatctatttttctttagataaaggttttaatagctcaggccctctagaagtgttgtcacatttccccacctttgctgccagctcctccccactccttcctctgctgttgcaatcacacatggtgacctcacacctgccctctggcccctttcctgggcccttcctgatccagaaggagcctctgtgctgggtgcagaacaggggcactcggggaactctccccattcccttccgggtagcactggtgcctctgccccttccgattgtaaaatgtgtcaagtgcaatgccccttccctcccttgccgagggcagactatcccggcaccggggcaaccagacagggcatcagggccacactggaaaggccaacagccttccggtggcttctcccagcactctaggggaccaaatatatttaatggttaagggacttgcaggccagaatatccaagagctggggacctaccatgcactcttgtgcctctcctaggaccagggccaaggggtggctgagctgcaccgccaatgctatagcttcagatctgccttccacatggattgtttttgaagaaaaaaaaaagtttttttttttctttttttttttctttttttttttattttt

SEQ ID NO: 506 - DNA, 2836 bp, Cricetulus griseus
ctgctgaggtcacagaaaagtggaggagacagacattgtcatgcaggaggtggagactgtgtcccagcagtacctgccactgtctactgcttgcagcagcatctacttcaccatggagtccctgaagcaggttcacttcctgtatcagtactcactgcagttcttcctcgacatctaccacaacgtgctgtacgagaaccccaacctgaagggcgccactgaccacacgcagcgcctctctgtcataaccaaggacctctttcaggtggcctttaaccgcgtggctcgaggcatgttgcaccaggaccacatcacctttgccatgctgctggccaggatcaagctgaaaggcaccctgggggagcccacctatgatgccgagttccagcatttcctcagaggcaacgagattgtgctgagtgctggctccaccccaaatccagggtctgactgtggagcaggctgaagcagtcatgaggttgagctgtctgcctgccttcaaagatctgattgccaaggttcaggcggatgagcagtttggctatttggctggacagcagttccccagagcagactgtaccgtacctctggagtgaggaaacaacttcaactcccatcgggcaggccatccaccgcctactcctaattcaagctttccgacccgaccgcctgttggccatggcccacatgtttgtttccacaaacctcggggagtccttcatgtccatcatggagcagccacttgacctcacccacattgtgggcacagaggtgaagccaaacacgccagtcctgatgtgctccgtgcctgggtatgacgccagtgggcatgttgaggatcttgcagctgagcagaacacgcagatcacttctattgccattggctcagcagaaggctttaaccaagcagacaaggccatcaacactgctgtgaagtcaggcaggtgggtgatgctgaaaaatgtgcacctggccccagggtggctcatgcagctggaaaagaagctgcactccctgcagccacacgcctgcttccgacttttcctcaccatggagatcaaccccaaggtgccagtgaacctgctccgagcaggccgaatcttcgtgtttgagccacctcctggggtgaaagccaacatgctgaggacattcagcagtatccccgtgtcccggatgtgcaagtctccaaatgagcgtgcccgcttgtatttcctgctggcttggtttcatgccatcatccaagagcgcctgcgctatgctccgctggggtggtcaaagaaatacgaattcggagagtctgaccttcgatcggcttgtgacacagtggacacctggctggatgacacagccaagggccgccagaacatctcacctgataagatcccatggtctgccctgaagaccttgatggcccagtccatctatggcggccgtgtggacaatgagtttgatcagcgtctacttaataccttcctggagcgtctgtttacaacccgaagtttcgatagtgaattcaagcttgcctgcaaggttgatgggcacaaggacattcagatgcctgatggtatcaggcgagaagagttcgtgcagtgggtagagctgctgcctgacacccagacgccctcgtggctgggcctgcccaacaatgccgagagggtcctgcttaccacccaaggtgtggacatgattagcaagatgctcaagatgcagatgctggaagatgaggatgacctggcctatgcagagaccgagaagaagacaaggacggactctacatccgatggccgtccagcctggatgaggacgctgcacaccacagcatctaactggctgcacctcatcccacagacgctgagcccacttaagcgcactgtggagaacatcaaggatcctttgtttcggttctttgagagagaagtgaagatgggagccaagttactccaagatgtgcgccaggaccttgctgatgtcgtccaagtgtgtgaagggaaaaagaagcagaccaactacctgcgcacactcatcaatgagctggtgaaagggatcttgcctcggagctggtcccattacacggtgcctgcaggcatgacggttatccagtgggtgtcggacttcagtgagagggtcaagcagctccagagcatctcacaggcagctgcgtccggtggtgccaaggaactaaagaacatccatgtgtgcctgggtggcctgtttgtgcctgaggcctatatcactgccaccagacagtatgtggcacaagccaacagctggtctctggaggaactctgcctggaagtcaatgttactgcctcacagagtgccaccctggatgcctgcagctttggggtcacaggtctgaaacttcaaggggccacatgcaccaacaacaagttgtcgctttccaacgccatctccacggtccttccgctaacacagctgcgctgggtgaagcaaaccaatgcggagaagaaggctaacgtggtgaccttgcctgtctacctgaactttactcgggcagaccttatcttcaccgtggactttgaaattgctacaaaggaagaccctcgcagcttctatgagcgaggagttgcagttctgtgcactgagtaaagatggacttttctgggttctctctggaatagtaaaatccaatatttaacattcattcatccttaaacctttggcaagtttgatggacttgtgaaaagaaagtggttggttcgcgcaggaagaaatggagggtgctgtggttgggaacagggactgggaaggtgacagtatgtgtttagagggctgatggaatggctttgttttcttaataaaacactaagcatga

SEQ ID NO: 507 - DNA, 2836 bp, Cricetulus griseus
gtacagtatgctggaaacattattccaaggctttatctgttgatcacagttggagttgtatatgtcaagtcatttcctcaatccaggaaagatattttgaaagatttggtagaaatgtgccgtggtgtgcagcatccactgaggggtttggtttctccgaaattatcttcttcagtgtactaggaacatttacctgatgaaggagagccagcagatgaagaaacaactggtgatatcagtgattctatggattttgtactactcaactttgcagaaatgaacaaactctgggtgcggatgcagcatcaaggacatagccgagatagagaaaaaagagaacgagagcgacaagaactgagaattttagtgggaacaaatctggtgcgccttagtcagttggaaggtgtaaatgtggaacgttacaaacagattgttttaacaggcattttggagcaagttgtgaattgtagagatgccttggctcaagaatatctcatggagtgtattattcaggtttttcctgatgagttccatctccagactttgaatccttttcttagagcctgtgctgagttacaccaaaatgtaaacgtgaagaacataatcattgctttaattgacagattagctttatttgctcatcgtgaagatggacctggaattccagctgagatcaaactctttgacatattttcacaacaggtggctacagtaatacagtccagacaagacatgccatcagaggatgttgtatctttacaagtctctctcattaatcttgctatgaaatgttaccctgatcgtgtggactatgttgataaagttctagaaacaacagtggagatattcaataagcttaaccttgaacatattgctaccagtagtgcagtttcaaaggagcttaccagacttttgaagatacctgttgatacttacaacaatatcttaacagtcttaaaactaaaacatttccacccactctttgagtactttgactacgagtccagaaagagcatgagctgttatgtgcttagtaatgttctggattataacacagaaatcgtctctcaggaccaggtagattccataatgaatttggtgtccacgttgattcaggatcagccagatcaacctgtggaagaccctgatccagaagattttgctgatgaacagagcctcgttggccgattcattcatcttctacgatctgatgatcctgatcagcagtacttgattttgaatacagcacgaaaacattttggagctggtggaaatcaacggattcgcttcacactgccacccttggtatttgcagcttatcagctggcttttcgatacaaagagaattctcaagtggatgacaagtgggaaaagaaatgccagaagattttttcatttgctcaccagactattagtgctttgatcaaagctgagctggctgaattacctctgagactttttcttcagggggcactagctgctggagaaattggttttgaaaatcatgaaacagtagcatatgaatttatgtcccaggcattttctctgtatgaagatgaaatcagtgattctaaagcacagctggctgctatcaccttgattattggtacttttgagaggatgaagtgcttcagtgaagagaatcatgagcccttgagaactcagtgtgcacttgctgcatcaaaacttctgaagaaaccagatcaaggccgagctgtgagcacatgcgcacatctcttttggtctggccgaaacacagacagaaatggggaggagcttcatggaggcaaaagggtcatggagtgcctaaagaaggctctaaaaatagcaaatcagtgcatggacccctcgctacaagttcagctctttatagagattctgaacaggtacatctatttctatgagaaagaaaatgatgcggtaacaattcaggtcttgaaccagcttattcaaaagattcgagaagatctcccaaatcttgagtccagtgaagaaacagagcaaattaacaagcattttcataacacgttggagcatttgcgctcaaggcgggaatcaccagagtctgaggggccaatctatgaaggtctcatcctttaaaagaagacagctgagcaactcctttctacccaccagaaagggctttactaggtctcccttccatagattgtgcctttcagaaatgctgaggtaggtttcccattccttacctgtggtgtgtttacccagcacctccagacaccttcaggaccttaactcacttcataattgtttaacgtctgtctgatcaccccaagtagcatgactgatctgctctttaaacttcttgtgatctgtgaaaactgaaagcaaaatcccatttaaccttgctactaatggagctctctttccttattttattttgttgcattgttgtgtattttctttattaatggggagtgctaacccagacatacttgtttatttgttctgtggtcctatctgagaatactttaaagggcaggagtactgtgtgtgaaattcagcttgggctttccctgaatgcaagataaagcctatgtgtaatatattccctacaactagaatatattaatgcatgtgaagaattttaaagcaccgtggccaaaagcagaagctatattttgcatatttggactcagctatccattaagaactatatcatcatttggacacatcaaaataatttgattctatgaaatagacattttgtgacttaatgtaatttatgtataacctccactattgtaaatttatgtgaaatgcatcacaattacaactttttcatcagtgaaataataaagttgctgttaaacaa

SEQ ID NO: 508 - DNA, 2836 bp, Cricetulus griseus
gatgcatctgaagacaagtgtgctgtgttactgtgcgctactcacccagtgaagctggcctgcatgaaatggacatccgctatgacaatatgcacatcccaggaagtcctctgcagttctatgtggattatgttaactgtggccacgtcactgcctatggtcctggccttagccatggagtggtcaacaaacccgccaccttcactgtcaacaccaaggatgcaggagagggaggcttgtctttggccatcgagggtccatctaaagcagaaatcagctgcactgacaaccaagatggaacatgcagtgtttcttatctgcctgtgttgcctggtgactatagcatcctggtcaagtacaatgaccagcacatcccaggcagccccttcactgcaagagtcacaggtgacgattccatgcgtatgtcccacctaaaggtgggttctgctgctgatattcccatcaatatctcagaaacagaccttagtctactcacagccactgtggtgccaccctcaggccgggaggagccctgtttgctgaagcggttgcgcaatggccacgtggggatttccttcgtgcccaaggagacaggggaacatctggtacatgtgaagaagaatggccagcatgtagcaagcagtcccatcccagtagtgatcagccagtcagagattggtgatgccagtcgtgtgagggtctctggacaaggtcttcgtgaaggtcatacctttgaacctgcagagtttattattgacaccagagatgcaggttatggtgggctcagtctgtccattgagggtcctagcaaggtagacatcaacacagaggacctggaggatggtacatgcagggtcacttactgtcccacagagcctggaaactacatcataaacattaagtttgctgaccagcatgtgcctggcagtcccttctctgtgaaggtgatgggtgagggccgggtgaaagaaagtatcacacgcaggcgacgtgccccttcagtggccaatgttggcagtcattgtgacctcagcctgaagattcctgaaattagtatccaagatatgacagcccaggtgaccagcccatcaggcaagacccacgaggcagagatcgtagaaggagagaaccatacttactgtatccgatttgtgcctgctgagatgggaatgcatacagtcagcgtcaagtacaagggccaacatgtgcctgggagcccattccagttcactgtggggcctcttggggaagggggtgcccataaggttcgtgctggaggccctggcctagagagggctgaagctggagtgccagcggagttcagcatttggaccagggaagctggtgctggaggcctggccattgctgttgagggccccagcaaggctgagatatcttttgaggaccgtaaggatggctcctgtggtgtggcctacgtagttcaggagccaggtgactatgaggtctcagtcaagttcaacgaggagcacatacctgatagccctttcgtggtgcctgtggcttctccgtctggtgacgcccgccgccttactgtttctagtcttcaggagtcagggttaaaggtcaaccagccagcctcttttgcagtcagtctgaatggagccaagggggcaattgatgccaaggtgcacagcccctcaggagctctggaggagtgctatgtcacagagattgaccaagataagtatgctgtgcgtttcatcccacgagagaatggcatctacttgattgatgttaagttcaatggtactcatatccctggaagtcccttcaagatccgagttggggagcctgggcatggaggggacccaggcttggtgtccgcctatggagcaggcctggaaggtggtgtcacagggagcccagctgagtttatcgtcaacacaagcaatgcaggagctggtgccctttccgttaccattgatggcccctccaaggtgaagatggattgccaggagtgccctgagggctaccgtgtcacctatacccctatggcacccggaagctacctcatctccatcaagtatggtgggccctatcacattgggggaagccccttcaaagccaaggtcacaggtccccgtcttgttagtaaccacagtcttcatgagacaacatctgtatttgtggactccctgacaaaagttgccactgttccccagcttgcaacctcaggcccaagtcccactgatgtcagcaaggtagtagccaaaggcctggggctgagcaaggcctatgtaggccagaagagcagcttcacagtagactgcagcaaagcaggtaacaacatgctgctggtgggggtgcatggcccaaggacaccctgtgaagagatcctggtgaaacacatgggcagccgtctctacagtgtctcctacctgctcaaggacaaaggggagtacacactggtggtcaagtggggtgatgagcatatcccaggcagcccataccgcattatggtgccctgagcctgacaactagcaactatgccagccagaatctcccatagcaaagagcaacctcacacctgtcccacccccaagaagtccattttcctttcctgagccctgggccctcccttagatcactctggccactctgtcactgcagtctcccctgccctgcgctgtgctcacctgcctctctgggctttcacttgggtaaagggagccatttggtggcagcgcctgactcctttggttctgggagggtgggagttctatgtacaaccacttgctagttctctttcccagacaagaggaataaaattttgcttccattgtcctgtaaaaaaaaaaaaaaaaaaaaaaaaaaa

SEQ ID NO: 509 - DNA, 2835 bp, Cricetulus griseus
  modified_base (298)..(298): a, c, t, g, unknown or other
gatcaatgtctacaccaaggggccgattcagtggtcatggatcttttgctgccgtgttcctcagatgacgccagaggaagacatcagaaaaagatccggagtaaaacacagaattacctcaacctttatgcagtggaaggcctacgtaccctgtgtattgccaagagggtcctgagcaaagaagagtatgcctgttggttgcagagccacatagaagcggaggcatctgtggaaagccgtgaggagctcctcttccagtccgcggttcgcctggagacaaacttgcacctgctgggtnccactgggatagaagaccgtcttcaggatgggagttccccggaaaaccatcgctaagttaaggcaagctggtctgcaaatttgggtctcacaggtgacaaacaagaaacagccattaacattgcatatgcctgcaaactgctggaccatgatgaagaagtcatcacactgaatgctgagtctcaggaagcatgtgctgccctcctggaccaatgcctccactacgtgcaatccagaaactcccaaagtaccccagagtatactgaaagcaacgtgagcgtggggttctcctttatcccagcctccacatcctcagactctagccccagcccgagtcttgtgattgatgggagaagtctggcctacgcccttgagaaaagcttggaggacaaatttctcttccttgccaagcagtgtcgctctgtcctttgctgccgatcgacccctctgcagaagagcatggtggtaaagctggtgagaagcaagctcaaggccatgaccctggccataggtggatggggccaacgatgtcagcatgatccaggtggcagatgtaggcgtggggatctcaggccaggagggcatgcaggctgtgatggcaagcgactttgcagtgccaagattccgatacctggagagactgttaattgttcacggacactggtgctactccagactggccaacatggtgctgtatttcttctacaaaaacacaatgtttgtgggcctcctgttttggttccagttttactgtggcttttctgcatctgccatgattgaccagtggtatctgattttctttaatctgctcttctcatcacttccccagctcgtgactggggtgctggataaagacattccagcagacatgttgctgagagagccacagctttacaagagtggccagaacatggaggaataccggccacaggcattctggttaaacatggtggatgctgccttccagagcctggtatgctttttcattccttacctggcctactatgactctgatgtggatgtatttacctgggggacccctgtcacagcaatagcactgttcaccttcctgctgcacctgggtattgaaaccaaaacctggacgtggctcaactgggtagcctgtggcttcagtacctttttgtttttctccgtggctctgatttacaacacttcttgtgcaacatgctatcctccatctaacccttactggaccatgcagacattactgggtgaccctctgttttacttgacgtgtctcatcgcgcctgttgctgcactgatgcccagattgttttcaaagccctcctggggagccttttccccacccagctccagctgggacgccagttagccaagaaatcttccaacaaattccatgctcccaaagagacttcagctcagagacaaccacctggagactcagcaactgagctttcagagaagaagaccatgggaccttttgagtcccttcccagggattgtgcctctcaaacttcccagctcacacagcagctggcctgctccccagaggccagcggggagcccagtgcagtggatacaaatatgccattaagagagaacaaattgctggaaggtctgggaacccaggcttcagggcccttgaggcctgaggaggctgtttcagtagagtgtcctggggactccaggaggaaacccaccagtactacccagccagcccccttatcatcactctttcatctgcccagcattggctcactcaactggatctcctccctgtcattggccagtgggctgggaagtgtcttgcaattgtctagaagtagtttacagatggacaagcaggatggtgagttcctgtccagccccccacagccagatcaagacctgcacagcttacagggacaagccacaggctacttctagtctcacctccaaagggtcacagccaattgtggtgacaaatccttgaaatggcctttttattatgtaacagatgttaatgttatttatgtttattatttgcacagaagagttctaggaagatgtatttttaaatatttccaagacaaatataggaaaccagaggtaccaaaaaagaaagtttattttttaaagttctaagtagagtatactgataagaaataagaacacatatctttatctgtttatctgtatataaagtttaaagaaaagtgacacttggaaagtgtgtctagatttattttttcatctcattttataaagaaaagctacatgctttgtttcctcagcacacagggcccttgctttcttcaagcaggcataaacatgtgactagtacattgaaccctggggtggctgtgtgacctctgaggcagattcctcattagcttccaatgttagcaacagcaaaagaaaagtgaaaactcaataaaaactcatgtgaagttcctgccaatactcagttctgtgcaggcatttcataaagttcacttcataggtatgacagctccaatgtcatgtgtatttcttgctaaaatcaccacaagcaataaacaacctccactttgacaa

SEQ ID NO: 510 - DNA, 2835 bp, Cricetulus griseus
  modified_base (2821)..(2821): a, c, t, g, unknown or other
ctggcgagtaaatgcaagggtgctgcggtcaagctagctgattttggcctcgccatcgaagtgcagggagagcagcaggcttggtttggttttgctggcaccccaggttatttgtcccctgaggtcttgaggaaagatccctatggaaaacctgtggatatctgggcctgcggggtcatcctgtatatcctcctggtgggctaccctcccttctgggatgaggatcagcacaagctatatcagcagatcaaagctggagcctacgatttcccatcaccagaatgggacacggtgactcctgaagctaagaacttgatcaaccagatgttgaccataaacccagcaaagcgtatcacagctgaccaggctctcaagcatccatgggtctgtcaacgatccacagtagcatccatgatgcatcgccaagagacagtggagtgcttgcgcaaattcaatgccaggagaaaactagaagggtgccatcctcacgaccatgctcgtctccaggaacttttcagctgccaaaagcctattgaacaagaagtcagatggcggtgtcaagccacagagcaacaacaaaaacagtctcgtaagggaaccacaaaccaccgtggtacacaatgctacagatgggatcaagggctccacagagagctgtaacaccactacagaagatgaagacctcaaagtgcgaaaacaggagatcattaagatcacagaacaactgatcgaagccatcaacaatggggactttgaggcctacacgaagatttgtgacccgggcctcacttcctttgagccagaagcccttggtaacctcgtggaggggatggatttccataagttttactttgagaatctcctgtctaagaacagcaagcccatccataccaccatcctaaacccgcacgtccacgtgattggggaggacgcagcttgcatcgcctatatccggctcacccagtacatcgatgggcagggtcggcctcgcaccagccagtcagaggagacccgggtgtggcaccgccgggatggcaggtggctcaatgtccactatcactgctcaggggcccctgccgcaccgctgcagtgagctcagccacaggggcattaggagattccagctggatgttgaaccttcacagccagtgactctggagggcctgagtgacagcggcagtcctgttcgtttgaggtttaaaacaattaaattacaaagcggcagcagccaatgcacgcccctgcatgcagcccgcccgcccgcccttcgtgtctgtctctgctgtaccgagagccatggtgtggttgcagccccagagtggcctgattaccccaggtctagaagtggacttcttcagaacatgcattgacacctagaatgatacggaagaaaatgccgtggctatcagacctacttgggagaaaatgcagcgctcccagcctgcttgctgtggaggcagctaagaagcagtggcctcaggactgaaggcctggactttgctgtgctgttccagttaatgtagacagaaagagaattggtgctgcagaagtgtgtccgccaatgagaaacgctgagaaacctagtctgagcatgacatgcactcactcatccatctctttaggatgcacaatgcacgtgggccctgatactgaggcctgattgctgcagatggaagggaaggggttgctactctgcttcctgttggctttcctaacttagtaaggagagatccaaaccttggcccaggctccttttgccactttggcagttctgtttctgtgctgatctggaccatctttgtcttgtattttcatggtggtccccatgctgaccctcatctgggcgtgggccctctgccaagtgcccctgtggggtgggaggagtgaggcagtgggatgagagccggtggtgatttctatgcattctggctgccctctgggctgcctcccttcttcccatactgcacgtccatctctttccctgtgtttgaggttgaactgactgcttgggtgaggagtgtcctccctaaagaggcctctttactgaccacctgaaaagtatagacttcctgctggacaatctgcatgggcatcaccccctcacctgcatgtacccaaaaaaaggggtccagagccaaggcttctacattcattgtccctctgtgctcaaggagttccattccaggaagaaaagatctgtaccctaagcagataacacaagataatggaggagcaattggcttggtcttggtccccccccaccccatcaaacaactgcatagtatctgcatgtgtggggggataggtttcagctccctggatgaccttcaggacaggaagctgggaaaaagaactacaggctttggaaccagctgagaagagaacaagctcatgggtgctggtgcttgaatttagccaggctcctcaagcaccttctgcatgcctcagaccctggaccctagcccctttctgccctgcagcctgcagtgccagcctacagatcccttcaccacagggtttggttttgctggcttgaagacaacaaatggtcttagagctcattgagacccatagcttcatatggctgctccagccccacttcttagcgttcttactccacttctggggctaatgtcagcatctatagactattaatagactaatttaaaaaagaaacacaccactttaacaggaaatggaaggcatttgatgcagaacttttgcatgatgacttagaaataatttaaaaattagtgttttgttctgaatgttggtagtcccttcctagctttgttacaatggaaccttgaagatatttaanaaataaccttaaaa

SEQ ID NO: 511 - DNA, 2835 bp, Cricetulus griseus
aaaccagttgaatcttcagatatgaaatagactcagctgttcaccaagttgaatcagacgatacaagctgtctctttgataagcttaagaaagaacctgatgctctaaccctgctggcccagctgctggggacacaatcatatctctggattttggcagcgatgacacggaaactgaagaccaacaactcgaagatgttccactatataatgatgtaatgttcccctcatctaatgaaaaaatcacaaatataaatctggcaatgtctccgttacctgcccctgaaactccaaagccacttcgaagtagtgctgatcctgcactgaatcaagaagttgcattaaaattagagccaagtccagagtcactggaactttcttttaccatgccccaaattcaagatcagccagcaagtccttctgatggaagcactagacaaagttcacctgagagcctaacagtcccagtgaatattgttttgatgtggatagcgatatggtcaatgtattcaagttggaactggtcgaaaagctgtttgctgaagacacagaagcaaagaatccattttcaactcaggatactgacttagatttggagatgctggccccctatatcccgatggatgatgatttccagttgcgctcctttgatcagttgtcaccattagagagcagttcctcaagccctccaagtgtgagcacagtgacagtgttccagcagacccagctacagaaacctaccattactgccaccaccacaaccaccaccgccactgatgaattaaaacagtgacgaaggacaatatagaagacattaaaatactgattgcatctccatcttctacccatgtacctcaagaaacgacagctgctacagcatcaacatacagtgctcctcctcacagtcggacagcctcaccagacagagcaggaaagagagtcagagatcagacagagaaagcccatccaaggagccctaatgtatctgtcactttgagtcaaagaaatactgttcctgaggaagaattaaatccaaagataatagctttgcagaatgcccagagaaagcgaaaaatggaacatgatggctccctttttcaagcagcagggattgtaagtggaacattattgcagcagccaggtgaccgtgctcctactacgtcactttcttggaaacgtgtaaaaggatgcaaatccagtgaacagaatggaatggagcagaagacaattattttaattccctctgatttagcatgtagactgctggggcaatcaatggatgagagtggattaccacagctgaccagttacgattgtgaagttaatgctccggtacaaggcagcagaaacctactgcagggtgaagaattactcagagctttggatcaagttaactgagcttttcataatctcattccttttgtatttattttctttttttttttttgtttgttgtttgttgggttttttgtttctgttgtttatttttggacactggtggctcagcagtctatttatattttctatatctaattttagaagcctggctacaacactgcacaactcagatagtttagttttaatcccctttctacttaatttccattaatgctctttttaatatgtccttttaatgccagatcacattcacatttcctcagtattttcaccattgcattgcagtagtgtcatttaaaatgcacctttttatttatttatttttggtgagggagtttgtcccttattgaattatttttaatgaaatgccaatataattttttaagaaggcagtaaatcttcatcatgatcataggcagttgaaaattttttactcattttttcatgttttacatgaaaataatgctttgccagcagtatatggtagccacagttgcacaatatattttcttaaaaataccagcagttactcatgcaatatattctgcatttataaaactagtttttaagaaattttttttggcctatgaaattgttaagcctggatcatgacactgttgatcttataatgattcttaaactgtatggtttctttatatgggtaaagccatttacatgatatagagagagatgcatatatgcggaaggtatgtggcatttatttggataaaattctcaattcagagaaattaactgatgtttctttagttactttaccagatcaaaacagtcccctatgtagttgtgaaagcttatgctaatattgtgtaattaatattaaacataaatgttctgcccaccctgttggtgtaaagacattttgagcatactgtaaacaacaaaagaatcatggattgttagtaaaattgcctagtatattaatttgttcaaaatatgatgtttggtttatgcactttgtcgctattaacatcttttttcatatagacttcaataattgagtgattttttagaagcattattttaggaatgtagagttgtcatagtaaacatcttgttttttctatgtacattgtataaatttttcattcccttgttctttgtggttgggtctaacactaactgtactgttttgttacatcaaataaacatcttttgtggaccaggcccccatgggtcagcttttatgtttaaataacatttgtttcaacatttccaggtcataaaaggacttcccccaatttaaattctttataaaagttacattgtacgtttctacattcattattgccattatctaatgtataatgtattcccaaatgtcatgttaagtaatgacaaatcacaataattgcactgtaaaagagaaattctttttaggaatttgccattataaatttataactattaaaataataaa

SEQ ID NO: 512 - DNA, 2834 bp, Cricetulus griseus
gtgcctggaattcgtatgtccattaaactccatcaggatcatttcacttctccagatgagtatgatgaccccactgtgctctatgaagccatcgtgtctcatgaaaagaaccttgtaatagcccatgaaggggaccctgcgtggcggagtgcagtccttgccaactctccctccttgctggctctgcggcatgtcatggatgacggcaccaatgagtacaagatcattatgctcaaccgacgccacctgagtttcagggtcattaaggtgaataaggaatgtgtccgaggtctctggggcagggcagcagcaggagcttgttttcctccggaaccgaaaccccgagagaggcagcatccagaatgcaaagcaggctctgagaaacatgataaactcgtcttgtgatcagcctattggctacccgatctttgtgtcgcccttgacaacgtcttactctgacagccatgaccagctcaaagaaattcttgggggaccaatcagcttgggaaatatccggaacttcatagtgtccacctggcacaggttaaggaaaggttgtggagctggctgtaacagtggtggcaatattgaagattctgacactggaggtgggacttcctgtcctggtaacaatgcacccactgtcagtgatccccacagcaatgtgtcccagggaagcactgggaaccccgggcaggcagcaggatcgggactgcacccacccactacaccgtatcctccaacactaggcactagccacagcgcccactcagtacagtccagtctggtcagacagtcccctgcgagagcctccatggccagccagtcttcctactgctacagcagccggcattcatccctccggatgtccaccacagggtttgtgccatgtcggcgatcctccaccagccaaatatcgcttagaaacttgccgtcatccatccagtcccgcctctccatggtgaaccagatggaagccaccagccagagcggcatggcctgtgtgcagcacagccttccctcctccagcagctccagccaaagcatcccggcctgcaagcaccacaccctcgtgggctttctcggggcagagggcagccagagcggtgtcactgaggcccagccaggcagcaccttaagtcctgccaacagttcacatgcccgtaagggggaggtggtttacagagtccagattgtggatctcagtcagattctggaagggattaacctgtcaaaaaggaaagagctccagtggcctgatgaaggaattcggttaaaagctgggagaaacagctggaaagactggagtcctcaggagggcatggaaggccatgtgattcaccgatgggtgccttgcagcagagacccaggtacaaggtcccacatcgacaaggcagtgctcctggtccaaattgatgataaatatgtgactgtaattgaaactggggtactagagctgggggcagaagtgtgagcctgcattgcacacctgcattcctttctctggcttcccagtcctcggagagaagtaaggtttcagaagatccgcctgtggggaccgcctgccctttacagcaaagacttgaacagtggcttggttaagcgcctccaccccgactcctgtcactgtctctaccctcaaataaagctgaaatatttttttaagttagctgcatgaaaggcaaacttctgttggagcctgtctatgaaaggctctctatgtattgtgctccaacccacagactcttgtctctaactctgagctcatatttttctaatttatttgccaaaaacagttgccatggtttttgtcgtagaaaataagatccattggccatggtttttacaaacaaacccatatggaaacattcagttcgacatataacagtataaaagtttaatgtacagtgagaaagatgatgaatagacgtaggtttatcttattccttgaaagctaaaaactttaatgaaaaaaaactgcactaattttttacagcaatgcactaaatctgagatttctcagaacatttatttatatatataaaaaataccattatttaaattgccttcaggattagcaacccccccccctttcctgacacacagccagcaggacctgctgtccctcttctgttggtatgctggactctggggacacaggtggcaggctctgaggagtcgcttctggaacatgcttttgcttttcaagaagaagatatgaaggcccaggaacttaaaggatcagttgcctttcatttgaagagttcctagctcttgaagttattcacatgaagtttggtttctcaagtaaaatttttcaaaacaaaattgtctgcgtggcgcagttcttgttttgttgtctctagcggctctgcacttgcttcttccgtgttctttctctattacttgaatttgtttcctataatttatgatgtatacctgtcatttaaaatatttataactgaaattgacttaattcatgttgtctcataaattatattatattttttttttttaaggagcatgtattcagggaaatatgtaccttggattttcagtgtggctgcatgcaaaatgcagtttagctttcatttgtaactttaagcatttctcaaatagctaacagcagcccggaggagtcttgccacacctgtgtcaaaccctctttgtgttttctcttgttgttttaaaaatcagtggtcgttcagaacccaatgtgccttgtattgacatttccgtagacttcaaactttgcaaactttattagtttaaaaatatttgtcaaatgacttattgaacctttacaaaaggagccctttgtatttctaaattga

SEQ ID NO: 513 - DNA, 2834 bp, Cricetulus griseus
agaccctcgcgttcagttcttctggctgtagctcttcatggaggaacacggagtgacccaaacctgaacacatggctaccatcgaagcccatgccgtggcccagcaagtccagcaggtccatgtagccacgtacactgagcacagtatgctgagtgctgatgaagactccccttcctccccctgaggatacctcctatgatgactcggacattctcaactccacggcagcggatgaggtaactgcccatctggctgctgcaggtccagtgggaatggctgctgctgctgctgtggcaacggggaagaaacggaaacgtcctcacgtgtttgagtctaatccgtctatccggaagagacagcagacacgtttgcttgggaaactccgagccacattagatgaatatactactcgagtaggacagcaagctatcgttctctgtatttcaccctccaaacccaaccctgtctttaaggtgtttggagcagcacctttggagaacgtggtgcgaaagtacaagagcatgatcctggaagacctggagtctgctctggcagagcacgcccctgcgccacaggaggttaattccgaactgccgcctctcactatcgatgggattcccgtctctgtggacaaaatgacccaggctcagcttcgggcgtttatcccagagatgctcaagtattccacaggtcggggaaaaccaggctgggggaaagaaagctgcaaacctatctggtggccagaagacatcccatgggccaatgtccgtagtgatgtccgcacagaagagcaaaagcagagagtttcatggacccaggcattacggaccatagttaaaaattgttataagcaacatgggagggaagatcttttatatgcttttgaagatcagcaaacacaaacacaggccaccaccacacacagtatagcccatcttgtaccatcacagaccgtagtacagaccttcagcaatcctgatggcaccgtgtcgctcatccaggttggtacaggggcaacagtagctacattggccgatgcttcagaactgccaaccacggtcactgttgcccaagtgaattattctgctgtggctgatggagaggtggaacaaaactgggccacattacagggaggtgaaatgaccatccagacgacacaagcatcagaggccactcaggcagtggcatcgctggcagaagccgcagtggcagcttctcaggagatgcagcagggagctactgtcaccatggcactcaacagtgaagctgccgcccatgctgttgccacactggctgaagccaccttacaaggcgggggacagatagtcttgtctggggaaaccgcagcagccgtcggagcactcactggagtccaagatgctaatggcctatcggacagcgcagtcgaccatggacggccaggctgtggaggtggtgacattggaacagtgacacgcagccctatcatggcatcgttttctagtctacttcagattttttacctgtttgcagaggtgcaatcaaatggaattaagtctctcggcttgggaagaagagttttggtaaccttttttttaaaaaggaagaaaggcagcagattttggaatcacctttttctaaagcaccacttctgggatttggtggagcaagaatcaacaccgatttcactgtcccaaaaagccaaattgtggccggacttctttgtggggaaatgtgtgtatacttatgtgtatgtatgtgtgagtgtgaatatatgtatatgtgtacatatggacatacacatttacatatgtgtataaagtatatatgtacatacatatgtatgtatgtatgaaacccgcatggaattatctgtatgaaatcaaggtgaactgtgggaaaaagataacccacccagttcagtgggtggtaggtacatggccagacacagtcacctggttttcattcataccagggtcatgcattgagctactgacaaactcaggcagaggtgaccacgccctccaccaaagctgcctcccagtggcgcctagaactctgctagattcaccagagggaaggaagatccaggacacggtgcggtccaaaaagtgcttacggagtccagaaactgaagggaacaggagtgttaagggcctgaggaagtgcttagggagcaggcgggtgtaagtgcaggggggtgtgtgtgtgtgtgtgtgtgtgtgtttttcccagcacatcctggcagcccaggcctggaacagcttccctgctcacagtgtggagtggatggatcggtctttgtcactgtgaactgtgcttttccagccacagccctgagtctccagtggctaattcacctgacttcttgacaagccaaatctccactccttgcagacagggacagctcctcgccctcctcccaggccctccctcaagtgtgatagtgtatttaatgtggtgttttggggttttgtttttaatgagacattaaaagattcttcatgtcttgctcagcctttgagaaaagtttctgattcttatatttgcttgttttatatgaaactatccaatgtttttgtatgttcttttctgtacgtaatgggggaggagtgggaaattttataaacagtcctggttctacaatttgttatttttttaattattattttttatcatatattgtgaagctgtccggggctttaaaggtccgtgttcctttgtggtgaagtaacctcccaatagtttgagaaattgccaagaagaaaaaagcaagaccccagtagcagagcatggattctgtgttgttccccactctgtctaaactgcctcattcaataaatagtttaaatgt

SEQ ID NO: 514 - DNA, 2833 bp, Cricetulus griseus
tgtggcatccagactgaagatgaactaccagatggacaagaacatcagaagattgaatttggtgttgaagaagtcatcaaaccaagtgatagttttgccgagaaccactacctacagtatttcaagcaccttgaatcctcaggcacctgagtttattcttggttgcacaacttccaaaaagaccctctgatggtgtagaaaaagatgagaactacagctccgttgaccagtacccaggctcagccctggccctggaaaacagctctaacatagaggcagaagccttggagaatgatggtggtactggtggtcttggtcaaagggagcgtaaaaagaagaagaagcgacccccctgggtactacagttacctgaaagatggtagtgatggagaggggttccccagctgccatggtcaacggccatgccagttcagcagtcacgaacagcgtgggtgtggaggatgctgagttcatggcaggactgcagggctgcttgagggctgtcgtggaactgactttgagcaaccctgcctccctgcagatagccttctaaggacagctgtgacgcaaaccctacgttggcaccaatactactgagaatcttgcagttgctaatggaaaaatacttgaatccttgggcgaggacactgctgctaatggggtagcgttgcacactgaggaaaacacagacttggaccctgcaaagcctgagagccagtcacctcctgccgacagtgtgctctctgtgtctggggccattcccattagccagcctgcaaagtcttgggctagtctatttcatgattctaagccctcttcctcctcgcctatggcatatgtggaaactaagtgttccccccctgtcccatctcccctagcctctgaaaagcaggtggaagtcaaagaagggcttgttccagtttcagaggatcctgtagccataaagattgcagagttgctggagactgtaaccctaatacataaaccagtgtcattgcaacctcgcgggctgatcaataaaggaaactggtgctacattaatgccaccctgcagtggtggcttgccctccgatgtatcacctgatgaagttcattcctctgtactcaaaagtacaaaggccttgcacgtcaacgcccatgatagatagctttgttcggctaatgaacgagtttactaatatgccagtacctcccaaacccaggagctgcctttgaacccacatacatttacagactcctgacagttatcaagtcgagcctgtctgaaaagggccgacaggaagacgccgaggaatacctaggcttcattctgaatggacttcatgaggaaatgctgagcctgaagaagctcctctcccccactcacgaaaaacttactgtttccaatgggcccagaagccacttgattgaagatgaagagcaggaagacacaggcgaagggagtgaggacgagtgggagcaagtggggcccaggaataagacgtccgtcacccggcaggctgatttcgttcaaacacctatcaccggcattttcgggggacatatcagatctgtggtttaccagcagagttccaaagaatctgccactttgcagccgtttttcacgttgcagttggatattcagtctgacaagatacgcacagtccaggatgcattggaaagcttggtggcaagagagtctgtccaaggttacaccaccaaaaccaaacaggaggttgaagtcagtcgcagagtgactctggagaagctccctcctgtcctcgtgttgcacctgaagcgcttcgtctatgagaagacgggtgggtgtcagaagctagtcaagaacattgattatcctgtggacttggagatcagcagagaacttctttctccaggagtcaaaaataagaattttaaatgccacagaacctataggctgtttgcagtggtgtaccatcatggcaacagtgccacgggcggccactatactacggatgtcttccagattgggcttaatggctggctgcgaattgatgaccaaacggtcaaagttattaaccagtaccaggtggtgaagccaactgctgaccgcacagcctacctcctgtattaccgccgtgtggacctgctgtagccgtgtccgtgtgcctgtgtgtgtgcctgacgctgcttcctacaattcccaacttactaacttcccaccactctagtggctctttagagagaaactcttcctctgtgacagtgggcttgaatgaaaggcgcttctgaagaactgctggctccttaatggaggaggtggcttgtactgtgtcccagtctgattgcatagtggaataagtcccgcaccagcagctcttgtaaatttgtgaaaatgaattttatctatccttaaaaaataattttttaattcatcacactttcctcccttaccctttagtttttgataaacgataaaaatgagccagttatcagagatgagagagttcttacttcaaaaggatataaatacacaaaacatgtcgctggttcctagacggaaacacattttaacaattgtgagataataactgctgacgtatacactgcaggtcagacatttggggtgcagacgtcaggctatagaggtgggtgattgtaactttattaccatgaaaagatttcaaatcgcattcatgctctgtgtacacatcaagaaaagtgggcaaaataatgaagattgacatttcccaatgtctgctgtgtaaactcctgtccgcgcccttctgatgccgtgtccctaattgtacacagtgtagtgattcctaggagtataaagttgtcacccgtcaataaagatcacaaagttaggttt

SEQ ID NO: 515 - DNA, 2833 bp, Cricetulus griseus
tggaggaggcacgtccttgttggagcgcattggctgtggcgtctgcctgatctcaccaactccagaatttggaaatactggacatctagttggctctaaattgtaagccacagaatgagtattcagtgggcctgagagattgagaacattccacctccccataaaccttggtgaatatcactttttctgtggattgaagccagagagcacaatgagtacaagaaatcctcaaagaaaacgtcgtggtggaacagtaagttctagacaaacccagaagcgttctcgggaaacaacttcaacccctgagatttccttggaagcagaacccatagaactcgtggaaagtgctggagatgaaatcgtggacctcacctgtgaatctttagagcccgtggttgtggacctgactcacaatgactctgttgtgattgttgaagaaaggagaaggccaagaagaaatgggaggaggttacgcccagaccatgctgacagctgtgtggtgagcagtgatgatgaggaactgtctagagacaaagatgatgtatgtgactactcatacttctcgaggcaccaaggatgaaggagctacaggacgccctcgggtactgtcagttgtccgatctgcatggatggatactctgagattgtgcagaatgggcgcctcattgtttctacagaatgtggccacgtcttctgtagccagtgcctccgtgattctcttaagaatgctaatacttgcccaacttgtaggaagaagatcaaccataaacggtaccaccccattaatatatgaaatgttacagaactgctatggacacacagccaggctggcctttctgcatggtatctgcctccagtttcctgagctcaaaaaaactttaaaaaatcaatgtctgatgtaaactgctctttgttttccagccccttagatccttttgttttctccagtttgatgctatgggagcaggatccagggatcctcccaggtcagctcagcatctctgctcctctgggtgttctgagcccagagtaggagaaaaggagtcaggcatattggagttttgagtatcatggctccagcgtctttatggagcttacatgttggccgagaagttttcctgttgggaaagtttgccccagctattctgggtgcataacactcccaaggcatctgccagttagctattgtgactgccacacagtgacctggccagacacagtccatccagcccaaggatcccagtacagaagcttcccctgaaaagcccagctggtggacttttatttttcttttgagagcagaggtgacctgtgattttgcctgcaccttacattgatgtgcagtgttttctgcaagtcaagagaccctctgcagggcaaccatgtttcctaagaatgagaaagtgcaataaagcccgttcttcacctgctcttcagcaatccggaagatgtagcagtgctagtgtcctcagcccagtgttgcctatgggagcagtgcccatcccaccccatgtctgttcaccaactgttctcaggaaccctacccgtgctccaaagttctttgcctggcacagaacattcaaggctaataggacaggcaagtttttgagtgtcctcttttctgctgagatatgtcctgtgttgtccacagtgctctccaaccctcagtttttcagttcccactgcctaatgtctgcccaagcatagataccaggaggtggtagcagtaacagtggccttatcagctgttcacttccatggttttgcccaagtcgctgttgcccatgtttcagaggtgttgccctactcaacctgccgctaccctggctttcccacaccccttgagtagatagatattttccaaagctgctcttctggccagttgggctttgatcctctggacttttgactgcaatgtaggttttggtcagcaaagcatggtgcctcttcctccccatgggaccacaaaaatctctgctccactctatatgtgtgggagcctctggtgctctcggaggcagtgacgtggtaaattgcccctggggacaccaggcacagggtggctcgtagaggataggccttcagtgccagctttcctccacctccgcacaacttcctcagagggcttcaagccaaaccaatagcctttttgtgtgaaacatctttgaggtgggaaagggaccactggagctttgctagcaataactgactttcagtttactgttttgaaggagcagggactcagcacagaattcactttaaatggagctgaaggagtgtccctcctctgtgtgaaaagaaaatagttttattcttcattctgactttttaaactgtttgacttccagttagtttgaatgagagtaataatttttctacatggactcaaagggtaggagcattaactgtcatcattgtgatgtgtggtgtgtgccttcccttggatgtcacagccattgagttccttgtgggcctcatggtcttgctcttgttagttctaatgatagccagacttcaaggagccaaggtcaccatgcagccagttcaccggtaaatatggtgacacccacttaaaaattagttttctccttaaagacagtttatgaagttgatcataagttctattactacatcctaaattaaattgagaaaaagatgtgtttatttctactaatcagaaactgcgccaataggaaatggttggtatagaagaaaacatccctttcctttttcttaatgtatatagtttaactctttctttgttacatatgctcatgaatatcagtctgttttggactcctgctagtgttaaagatggaaataaaacaatttg

SEQ ID NO: 516 - DNA, 2831 bp, Cricetulus griseus
ccagatctctctacggtcagaagcatttttttcatgcaatgacctctcagcacgaattgcaggactacctcaagaaaacttcccaggctgtaaaaatgcttcgccagaaaatcgcacagattgataaagttatgtgtgaaggatcactacatattttaagactggcacttaccagaaataattgtgttaaagtatacaataaactgaagctaatggccactgtacaccaaactcagcctacagtgcaggtgttattatctacttctgaatttgttgggagcattggacttaatagcaacaactcaagaggttctgcagcaggagcttcagggcattcacagcttccggcatttggggtcacaactttgtgaattagaaagctgattgataaatgatgattgcaggttgatactacctctcagagaaacacatctccaaatagtgagccctgcagcagtgattcagtatctgaaccagagtgtactgattcttcatccagcaaggagcagacatctgcatctgctacaccaggaggcatagacgttatggtcagtgaagacatgagattaactgacttggagctaaggaaaattagcaagcaacatccaggaattattgtgtagtgcttcagatatatgccacgatcgagctgtcaagtttctcatgtcaagagcaaaggatggtttccttgaaaagttaaattctacagaattcataacactctcaagattaatggagacgttcattatggacactgagcagatctgtgggaggaagagcacgtcactgctcggggctcttcagagccaagccaataagtttgtgaacaggtttcatgaagagaggcggaccaagctcagcctcctcttagacaatgagcgttggaagcaagctgatgttcctgcagaatttcaggatcttgttgattctatagcagatggaaagattgctttaacctagaaaaaaaaacagcaacctacagaagaaaggaagccagctgaagtccttgttgttgagggacaccagtatgctgttgttggaactgtcttgctgttaattagaatcatccttgaatattgccaatgtgtggataacatcccatctgtcaccactgacatgctcactcgtctgacagatttgttgaagtacttcaattcaagaagttgccagttagttcttggagccggtgcattgcaagttgttggactaaaaacaattactacaaaaaatttggccctgtcttcgaggtgtttgcagttgattgtgcactacattcctgtgatccgggctcactttgaagctcgactaccccctaagcaatggagcatgcttaggcattttgatcacatcaccaaggattaccatgaccatatagctgaaatatcagccaagcttgtagcgataatggacagcctgtttgataagctgttgtcaaagtacgaggtgaaagctcctgtcccttccccttgtttcaggaatatttgtaagcaaatgacaaaaatgcatgaagctatatttgatcttcttcctgaagaacaaacacggatgttgtttttaagaattaatgcaagttacaaactccacctgaaaaagcagttgtcacacttaaatgtaataaatgatggaggacctcaaaatgggctggtcacagcagatgtagctttttacactggaaatcttcaagccttaaaaggccttaaagacctggatctaaatatggctgagatctgggaacagaagaggtgatggcagactggaaaccaggtagtcatctgaccacaggatgtgtttctgaagaaaatatggatgcctggtgttttaggaaatgaacatgcgacagtgtgaactgaggcgggggaagggaagaggaagggtcagtgttgggagctggattcagtgggatctacaaggaatgccatttttgtgcatccttcagtaaggagtaactgatcaggtgtctataacatttttcattctctctggaaacagactcaggtttctttggaccaaatccaaaagaacacatagctgtaacacagctgtagttgcctagaatgctctgtatactttatattaaaaatgctctgcatttcttccagtgcaatgaaattcatacggtgtcccaccttatttaatgatggtacaattgaaaatattaaaatcttagtcaacctctgtagaaagttttctctatgaaagtaaagctgtttgaaaaattatttttttacagatctttataaaaaataaacatcttttgattgcttggatttaggaattcagtttttgttttagtgaccaatgtcagtttcaggttttgtgtgttgcatatttaacctttttactaccactgtatgtcactgggtaaagcctcaaaccgctcaatatatggaagattgattataaggaataaagaatatttgcatttacttatgcaactactaatttaaatactttccagaagtgatatacacaaagctatggtttaatagctgtatttataaaagtacctatgaagggtttgggtttgtatttgttttttctttgctttttttacttctagcagaggcaagaatacatatttatataatatgccttcttacaaattctcattttaacatttagataacacgaaatatggccctcttggattcttgcttttaagttacttttgatatgtatataagtgaagaccagggataaacagaacttttaaaatccaggctgctgtgtcggggccagaagtacaaggtcaatgagtaagctatttgaagactttcattacagaggtatgtcattggttcttactgtcaaaataaaagaatgtaaaaaaa

SEQ ID NO: 517 - DNA, 2830 bp, Cricetulus griseus
ttgccccaaggataacccctattgttacttactgcaataagaaaacaagctgcagaagctgtgcccataagacctagaactgccagtggggagccccggaatcaggaatgtatcgctttgcctgaaaatatctgtggcattggctggcatttggttggaaactcatgtctgaaaatcactactgctaaggaaaattatgacaatgctaagttgtcctgtaggaaccacaatgcctttttggcttcccttacatcccagaagaccctgaagcatccacctcacgtgcatgatcatacaagctgttttgatggttcatccctctgtgtccagcatctaacctgttacttttgcataggaataatttaattacaagtccaggaacgagctgctctactcatgggtggaggagaccagcgtagaactgatgagagctgccagtgatgctgaggtccctgtggtcactgtgtatcccctaactggcctagaacttactatgtagattaggctggtctttaactcacagagatccatctgcctctgcctaccacattaagaggggggagtggccctctagtctgagccccaggatcctgcctggacactgcatttccccacttatggtgctcagtagtccggcgttatgcagcagcctcacacctttcttctcttgctatgtacgtattccgtgattctgctgttacctgactagaatagacctctaggcaacaatgctcaaatttatgaatttggagaagttaacactcaaaagaacaaaagctgtttctttaaggccagcactaaccccattcctaccaagactctcctggagagatatttccaagctgaatcataaaacactgatgcacaaaacactgctggaagactcacctctcaaaacactgcttttccacatctttattaaaggacagaaagttccagaaaagatcccaatctcattccctaagaagttaggaactccccacatccctaccaaaacccagcacctataagcatctgcaatggcctagcccttgatcttcataattacccaaaggaatctcagccaacaaaaaaaaaagttatagcccacagctcccttcaggctggaagcagaagggagtggcagggaggaagagctcagctcagagctaattaccagaagggagtggcggtgtgacccagtaactgtctcgagagagcatgtatataaaatagtcatgaagacactggccttgcacttgcacataactatacagtagtgtccagaatgtcagacattcagggtgtacataaaaacagaaaaagtatcataaatgtatttttactaaacattaacattgagtttcacctaaactgtttctgtgccatgtactgggtatccaagctctgagaagttatcttaccaggccctgatccattgataaggccacacattgtaccaccatgctggtgtgttcagtagccttgtgcccattaggtaactaaataatgattcagctctcagaatacctaggaagagagcaagcatggtgacacaacaactgtgatcctagcattcagaagatagaggcaggaagattagaattccaaaatggggctggagagatggctcaggtgttaatagcactggctgctcttgcaggaccagggttcagttcccagcacttgcagggtgactcacaaccctctgtaactccgattccagatgattgccctcttctggcctcgggtgctgcatgcatgtggtgcatagcaaacgtgcaggcaaacacccaatacataaaacaaaaataaagaattcaataaagagcctgggctacatagcaagagcctgtctcaaaacaaacaaacctatgaagagccaggcagtgagtctgtttacacagcagtacacaagagaactcaggaagcaagagtgtttatcactgttgtgcatttcaaatgctccttgtgacttctggcatctctgtggggtgaccagtctggtcttgaggtgttcttttacatgtgaacatcagactttgcaaaggggctctacgacaccactttctgttgtagctttgtcagaaattttaatgacatttctgagaaccgtgttctttttataataaaacctgggaatcccatttgttaataaatagcaccatttccctacacctcagcctcctgtccccttcctggtcttccttccctacacagtctggagaggggtctgaaaggtccaaggagatgtggcaagaaagcaacccattgcctcctgagctaacccgtaagaagactcagcaaaaggaaaataccacaatacctggaaggcttgaagggtaaaatggaatctcattagggaattggacaaacaagaacagaacaccctgggtaggagatgccacagactgccaatgcccatcctccttcagcacagtggagtgtaaacaaaaaacaaaacacaagctgctctcagacctggactctgcacaaaacactagtaaagcctgctgcactaattcggcctctagaaatgttttatggttatttacagttcattgtttgttttgatccaagcttagtttgttaatatgtgtaatttagcatctgttgcacttgtgtaaatatggagtaagtattgtaaagtatttaattgctgggattgttggtgttatacatacatttaggactgcaatttttggtattttttgtattgtaaaataacagctaatttaatcaggaatgagaattaaggggagtctgcattttaaatgcaaatgtgaagcacttgtatataaacaaaagtaaatactataatacaaaattcctcctagaaataaaaagtaga

SEQ ID NO: 518 - DNA, 2828 bp, Cricetulus griseus
  modified_base (2364)..(2364): a, c, t, g, unknown or other
acactccgaggactcgtagcagcaatggctcggaccccatggatgactgctcgtcgtgcaccagccactcgagctcagaacactactacccggcacagatgaacgccaactactcaacgctggctgaggactcgccgtccaaggcgcgccagcggcagcggcagaggcagcgggcagcaggcgcactgggctcagcgagctccggcagcatgcccaacctggcagcacgcagcggggctgcaggcgcgggtggtggtggcgtgtacctgcacagccagagccagccgagctcgcagtaccgcatcaaggagtacccactgtatattgagggcagcgccacacccgttgtggtgcgcagcctggagagtgaccaggaggcggcctgttcaaagagagctggcgtgggggtggtgacgagggcgatgcaggccgccttacaccttcgcgctcccagatcctgcggactccttcgttggggcgtgatggcacccatgacaaaggctctggccgtgctgcagtatcagatgagctgcgccagtggtaccagcgctccacagcctcgcacaaggagcacagccgcctctcgcacaccacgctccacctcctcggacagcggctctcagtacagcacctcttcccagagcaccttcgtggcgcacagcagggtcacccggatgccccagatgtgcaaggccacgtcagctgccttacctcaaagccagagaagctcaacaccgtcaagtgaaattggagccaccccaccaagcagtccccaccacatcctgacctggcagactgggagctacagtgatagctgcttcctggattcctccctctatccagagctagctgatgtccaatggtacggacaggaaaaagccaagcccgggaccctcgtgtgagccagcccggcctgttctgaccgtcgcacgccattctgagtcacctcactgcctctcagttgccttacccagacacactgtcacctgcaccagcttcggccctcggcacttttttctcctgtctccatatccctttcatcctcaaaaacctgactgaggagacattctggaaggttccgatcccactgtgtgtcccctggctctctgggcaagagagccagacaacaatcctcaatggcaccttggtggtttccctttgccatgacagccccaggccaggaactgtcagggaggccaacacaagcaattcctgtggaaaagaaagctgtgtccagctgccaccagaggccaactgagtgcttcaagaggatgcctcatggggatacccagtttataccagaatatcagtatgtattctgtaatgagacagctgcaagagtacctaaggggaagagtgagaaaggaaggccagcgcttcagagatgcattggaggatcacaatcggttctatgctgccaaagattagacacattcaacaataaacagataggaggggccaagaggaacacactttttctgcagtgaaattccttttcagttctaaactgcttctatgcagcccaagttagagtcaaccatttgtaaatcgtgtcctgtcgtgacccatctcctgaacccaatgggacagtgaagatgggaggaggcttggctgcctggcagatgcagaatctgtctgtctggacatgccctctgcaggggcctcagcctatgcccccgaagctgctttccttttgggactggtctgaagctagtgatcattgccaaaagcagttctctcttgttaaaacagccagtaaaagtgtaacctttcttttttgtacaaggcgtttcattttctttttatgagaaaccaagggaaaaagcacattgcagtctattcaagtgttttactgttgtggctcattttgtttgttaacacatgtgtgacaaagaactcagatggacctctcctgtgtgtcacttagtcaaagaacccaagtatgcccttaggtaggaagattttttttatgtgtctaccagccggcaggcaggcagagttgaaatgactcagctcccaaagggccccatcaacctccagcagtatccatgatcttgattaccacctctgtccacagataacaagaggaataaaagaaacaaaaaaaacagtaaaagtccaaagggaaacaaagaacaagacaaggttacatggttacaggttataggttataacatagacagtggtttgaaaatcagttctgaatttggttggatcaatgagagaggcagaaggaatctaaaatggaagctgtgaacaccgtcaggatagtctgatagtaaggacagagattaagtaaaacaggttttactgtttagctgtgttcagttaatacaatgtacataataagcattagtcctttgngactgacatggtaaatgtaaagcccctattggattctttgggtacatgtaagaaattgcctgtttcagccagaagactatgttgtgagccagggtggtttattttgttatatgcaggtgagtgttgaaactgttaaaaatcccaatttgttttcattcagtattagtttagttctaaaatatagcaaacctcatccaggtgctatcagacgaccaattactgcttagttaactaggtgtaaagttttacataaccattcatgtcaatagtttattacaagttgtgtaaaatggactctagtttaataatggggggaaaagattaggttgctcctgaaactgactgtagagcatgtaaaatgattttactggattctgttcaattgtaatcaatgaaaaagatgtatgttgtagacaaagttgcagaattaaaaagagaaatctgaacttttaaaaaaaaaaaaa

SEQ ID NO: 519 - DNA, 2827 bp, Cricetulus griseus
gaggtggagagaggctttagaagttagtaggaatgtagttccgatgaccctatcataaagtgtgacgactatgatggagatcatgagtgcatgttcttgactccaccttactcaagagttgcacagagggaaaccgaaaataaccgtgcaacatcagaaaatggagctgtagcttcaggaaggcaagatgctcgggataattccttttggaatggctgtggagattattaccaactctacgacaaagatgaagacagttcagagtgcagtgatggggaatggtcggcttctctgcctcaccgcttttctggcacagaaaaagaccagtcctcaagtgacgagagctgggagaccctgccagggaaggatgagaatgaacctgagctacagagcgatagtagtggccctgacgaggaaaaccaggaattgtctcttcaggagggggagcagacatccttggaagagggagaaattccctggttacagtacaatgaggtcaatgaaagcagcagcgatgaaggaaacgagcctgccaatgagtttgcgcagccggaagctttcatgctggatggcaacaacaaccttgaggacgactccagtgtgagcgaggacttggacgtggactggagcctgtttgatggttttgcggatggactgggagttgctgaagctatttcttatgtggatcctcagttcctcacctacatggcactagaagaacgcttagcccaggctatggagactgcactggcacacttagagtctcttgcagtggatgttgaggtggctaatccaccagctagtaaggaaagcatcgacgggcttccagaaacgcttgttctagaagatcatactgctattggtcaggagcagtgctgtccaatctgctgcagtgagtacatcaaggacgacatagccacagagctgccctgccaccatttcttccataagccttgtgtctccatctggcttcagaagtcggggacctgccctgtgtgccgccgtcatttcccacctgcagtcattgaagcatctgcagctgcttcctctgaccctgaccctgatcgccccgcctgcaaatgacaatactgcagaagccccataagagaaacatggaaatgacacctgaagtctatcacagtaaatctgcaaatttcctctaaatctgatgtgacaaataattatatataatatattttcagtgaacactggatgcctttaaagaaaggctagcaaagcatgtgaatggtctggtgtgctcagtgctcggcacagttacatgtgtttggcttacgaaacactgtctaagcccttatcagtctgcttctacttgttaaatacttgaaggtccggaacactcttgacatcctcgtttaagaagctggctctagttactttaaggtcgtttggtttcagaaatagtttagaaggtctgaggacttgcacatggccatgtttgtaactgtgtcaccccaaataaaaattgcacagcttttaggtgatcacatgagcaggcaagtattctttcttctttctccattcttaaaaataagtgaattttcactgttggcacatttgaggcttcactataaggaatataacacttgcattctgatttttgcatatattgtaaatgtggctggtataacagcaaaatactgtgtatccttttatgggtaaaacaagtgaacattgcatgcaagtaatgtggtgaatttgtaatttaggggttctggggcttctgtgactttggatgcttacattcaggccttaatgttgcgctagctagcatgcttccttctgatgtatatagtcagcattgtacaaactaatctttgcttgttttctactctgtggtctttccataccatatttcatggatgatgagtcagtgtcaagaagtcacacgagattcacattagtcctcatgtgtacactgtggaggtttgtgggttgtgtggtttgtttgtgtgttttcttttatgtactgttgattagttgtggcacttactgattaaacttacattgctgcagattgctttgtaacaagccacatgttatgtttagtcagtagtaagggaccttgatttttattctcctagatagcagctgtcccaaagaaaatatttcttctttgcctattaagatttagctattatctgccagttgttaagaggtttggttccaaactcaagcagagagttgaacgtaagatagctgttgtcctttttgctttccatctgttaccgtccttcattgttggctcccagctacgtatacacacagctgctgtgaagaagaaagctgaataagacttgctttaaattttttaaaaagaaaaatgaagttctagaactttgatggtaacaagccagtataatctgaggctgacaagttcagaccccaatatattatttcatctttttgcaaagttaagagtatatgaaggtaaattagaaatagtaaaaatattgataaaatgtcatttatcttatttctctattttttgttgtgacttggcctaataattttaattttttgaacattttatttcttgtaatacgaatgctgatatttaaagttagactcatgtggatttcttttgtttcttagttgtttatctctaagctaactaacttctaagattatttgtgatatggatttatatataagctgttaaatatatatgagctgttaaaatggaatgcaaggtttcaaaagcccaggtctaactgtaatgattggtttattgttatacaatcccagcccgccattttccgtgtaaatcataaacaataaacaggatatactcggtggtcatttctaa

SEQ ID NO: 520 - DNA, 2823 bp, Cricetulus griseus
tttaactactgtattcttgatagaaggccatgtacataaaaaataggaaaaactaaattgtcaaaagcagtaaaacaactgactgctaactataggattattctttctggaacaccaatccagaacaatgttttggagttgtggtcactatttgattttcttatgcctggatttttgggtaccgaacgccagtttgctgctcgatatggtaaacctatattagcgagtagagatgcacgaagctcaagtcgagaacaagaagcaggtgttcttgctatggatgcactgcaccgccaagtcctgccattccttttgagaagaatgaaagaagatgtcttgcaggatcttccacctaaaattattcaagactattactgtactcttagccctctccaggttcagctttatgaagattttgctaagtctcgtgccaagtgtgatgttgatgagaccgtgtcttcagctgcactttcagaagaactgaaaccaagcttaaagctacaggtcatgtattccaggcattacaatatttacgtaaactgtgcaaccatccagcattggtcttaaacccctcagcatccagaattcaagagtactactgggcacagaggctgtggtggcccagcacagagtactgatcttctgtcagctcaagagcatgctggacatagtggagcatgacctgctcaagcctcacctgccctcggtcacttacctgagactagatggcagcatacctcctggacagagacattccatcgtgtcccggtttaacaatgacccatccattgattgttcttttacttacaactcatgttggtggcctaggacttaacctgactggtgctgacactgtggtatttgtggagcatgactggaaccctatgcgggatctacaggccatggaccgggcccatcgtatcgggcagaaacgtgtggttaatgtctaccggctgataaccagagggacactagaagagaagataatgggcttgcagaaattcaagatgaacatagcaaataccgttatcagccaagagaattctagtttacagagcatggggactgatcagcttcttgacttgtttactctggataaggatggcaaagcagaaaaggccgacagctctacttctggaaaagcgagcatgaaatcggttcttgaaaacctgagtgacctctgggatgctgagcagtatgattccgagtacaacctagagaccttcatgcgttctctcgagtaactgctgcacgctggatgcaactgctgctagttcagttacattctgctgatattcagcaaactccgaagtcatggtgaactttaactgaatgtataaatagatctgaagaatattcagcatagtgctggctcttgtttcactggggaacaagttattctcaaatatttgcactgtattaaatttaaatggcaatgtgaaaagatttaaattttacatgctgaatagctgcagacaggaagcggccaggtttccgtgtgctaccaggaggtgctcccgccgggagagccacctctccagtcacttggttcatgatgagatccaccagtgctgtggtgtccgtgagcatttgttttctttaaaatagtacttgtttttataattgattacaaatagggcttcttttgtatttaaaagcctcaatgagccatacttttcccaatttcagagtgactctaacattagtcatccttagaacatgaaatgttaaacaatgaattgaagcaggccctgtggcaacctttgtatatttaaagcagatgcatagagtgtttttcaaatctttattaacatcattttgttcacttttaaagtataaaaactattctaaatacaggtactggtatatttaaggctataataacatcctattagagggtgggtttttgtttaatttatctaatggctaggatatagccagattcaaagaacatatgtactcagtaggtttcaatcatatatatatattttgtaactatgaacacagtttttcagacatagattttacactgcttaaaattggaaatcctgtggtgaaggctgtttactgtagtagagcatgagggaggaactgctcttcatacacaagcatacaaggatatacatatctatatgcacaaagtgtccatcctatacccaatgtgtctggttttggcactaaattcatatagttataccagacagcaataataactgagcatggagctaatggtagtgttaaaacagctcagtggtgagggtgggtagctgtatatagatatgcatgtatgtatataattttataaatcccacataagttaatacaggcctgtgtataaacacacatgtggaatatttgtgtatatatatgtacagataataaacatccttaagatttgtgtctggtcctacacctaggcatcaagttaaaaaccatcagacctcaattgtacaataataagggttttgtttaaaataattaaaagttctacagcacttagatatgaagtttgtcacacttgagtagccttgacaaccatgctgtaatactgaacctagcattccacaagagaataaatacaaattgtgaagtctgtgcaattgtgtgttgtttacagtgaagactaaacagccagcccagatacatgggtttttgaaaagctacactttttcatatcgtaagtttatattcaaatatagtagaccaaaaggagaactcatgattttatgtcgagtatacagtgtgcttgattgtttttataaatatttatttgttatttgcatatcttctaaaagtagggagcagttttatcattgaagaaat

SEQ ID NO: 521 - DNA, 2822 bp, Cricetulus griseus
ggaagtgcggaccgcggcggcggcggagcccggagcggaggccggaggctcccggcccgccggccccggagcggagcggagcggaggatgcagcagccgcagccgcaggggcagcagcagccggggccggggcagcagctgggggtccagggggcggcgccgggggccggggcggcccgggagggggcccggggccggggccctgcctgaggcgagaactgaagctgctcgagtccatcttccaccgcggccacgagcgcttccgcattgccagcgcctgcctggacgagctgagctgcgagttcctgctggccggagccggaggggccggggccggggctgcgcccgggaccccatcctcccctcgaacggggggtcggtcggccgggggaccccggtccgcatccactgcaacatcacggaatcataccctgctgtgccccccatctggtcggtggagtctgatgaccctaacttggctgctgtcttggagaggctggtggacataaagaaagggaatactttgctcttgcagcatctgaagaggatcatctctgacctgtgtaaactctacaacctccctcagcatcccgatgtggaaatgctggatcagcccttgcctgcagagcagtgcacgcaggaagaagtgtcttcagaagatgaagatgaggagatgcctgaggatacagaagacctagatcactatgaaatgaaagaggaagagccagcagagggcaagaaatctgaagacgatggcatcggaaaagaaaacctggccatcctagagaaaattaaaaagaaccagaggcaagattacttaaatggtgcagtgtctggctcggtgcaggccactgaccggctgatgaaggagctcagggatatataccgatcacagagtttcaaaggcggaaactatgcagtcgaactcgtgaatgacagtctctatgactggaatgtcaaactcctcaaagttgaccaggacagcgctttgcacaacgatctccagatcctgaaggagaaggaaggagcagacttcatcctacttaacttctcctttaaagataacttcccctttgacccaccgttcgtcagggttgtgtctccagtcctctctggagggtatgttctgggtggaggtgccatctgcatggaacttctcaccaagcaaggctggagcagtgcctattccatagagtccgtgatcatgcagatcagcgccacgttggtgaagggaaaggcacgggtgcagtttggagccaacaaatctcagtacagcctaacaagagcacagcagtcctacaagtctttggtgcagatccacgaaaaaaacggctggtacacacccccaaaggaggatggctaaccctggagtatcatccccttcctcctcccccaggcaccactggaccaattacctttgaatgctgtatttggatctcacgctgcctctggttccctccctcatttttcctggacgtgatagctctgcctattgcaggacaatgatggctattctaaacgctaaggaaaaacaacaacaaacaacacacactgaactgtttcaagtactcaagactgactacagaccaaccaccttgctggaacccttgctagcaggcattcttataaagaaactctcaagcctccttatattgctggaaactcagctgtgctccagactagagcctccttacctatgctatgggtttttaatttattttctcttatttcatgtacactgctttttttggttacagtgtatgatggatgtgtatgaaaaaaaaatgtatctttgggaaaacaattacagtttgttaatttgaagatgctggtcttgactcatctttatttttattcccacatcccctgactgctgggtggtggggaggggtgccaggcccaccatgctttggtagcgaggagaagctacagagaggctgcattttgctgctagcacaagagaaatgccaagctgaagcacttgcctgatgtgaccctaggttgctcctgaaggcctcttggagaacattccttggaacagtctggcctgctgaactacagtgcagaggcccagaaacaacctgattgataacggcttctttgtattaatctccattttgaaatgtccaagaaaaagatgagacttgagtagccgcttcataaactccttttgagtggggtggggcccaggctccaggatgcatgaggttttctctaatcccagcaacccgctgagtggctgtacaccttggttcccagccttcccatcctctctgctcacctttcatctgcttcattaggtgatctaagaaaagacatgaactttggattctttctagccatttcccaagttgctgtcctactgtaaccagcaatgtggctgtgttgtgtggtgggtcctcagctcagccccaggaactgcacgaaggagagaagtttgcagagccaatgggcattttaatttggccatcctccctgctcctcctttcttttagggatttgaatgtcttgctgcttaggtggatggagagttcaccagtcctacttgatgctgctctaattctgcctacacccaccagattaggggtgctaatacacagtgaggctgagacacgagaggatacaaggggaaatgtcattccatggaactgaaatctatctcatagcctgtgtggcttccttctgaacttaaagccagccctggctgacatgtagattgtgtttttagtaatgtgtactgtgagctgtcctctgtataatgtattttgtaatgttatttttctcatctaccaaaggatgaatcaaataaagttatttaaata

SEQ ID NO: 522 - DNA, 2821 bp, Cricetulus griseus
  modified_base (2035)..(2035): a, c, t, g, unknown or other
tgcgccccgccgcccaggccgccgccccccgcccgcgccgccgcccccgacggggaggaccatggcgaaggtggagcaggtcctgagcctcgagccacagcacgagctcaagttccgaggtcccttcactgatgtcgttaccaccaacctaaagcttggcaacccaacagaccgaaatgtgtgttttaaagtgaagaccacagcaccgcgcaggtactgcgtgcggcctaacagtggggtcattgatgccggggcctctctcaacgtgtcggtgatgctgcagccttttgattatgaccccaatgagaaaagtaaacacaagtttatggttcagtctatgtttgctccacctgatacttctgatatggaggcagtatggaaggaggcaaagccggaagaccttatggattcaaaacttagatgtgtgtttgaattaccagcagaaaacgctaaaccacacgatgtagaaataaataaaatcacacctacaagtgcacccaagacagaagcaccggcagctgccaagtccctgacgtcgtccctcgatgacgccgaagtgaagaaagtgatggaagagtgcaagcggttgcagggggaggtgcagaggctgcgggaggaaggccggcagctcaaggaagaagacgggctccgggtgaggaaggcgctgcagagcaacagccccatggcagctctggctgccaccgggaaggaggaaggcctcagcgcccggctgctggctctggtggttttgttctttatcgttggtgtcattatagggaagattgctttgtagaggctgcatgcgaaggatggcagattggattgatggatccaccacatcatgggatttaaatttatcataaccatgcgtaaaaagaaattaatgtatgatgacatctcacaggtcttgcctttaaatacccctccccatgcacacacaaatgcacacaccaatatagcataatataatgatcttttagaatgttaaaaatgtatagtaaatggatgggggagaatggtctgttactgagggacatcgtgattaaccacagtggcatattgcagctgtcacattaaactcgggtaggccttggcacatgttcctagatcacccctcttaaagcaagaagctctccctcacatgttggggctggcctgtgggagcaggagccctgcaagggagggtgtgctgtcgcttccccaggcctgctgttctgtccaagccatcggctcctcaggcatgcagagctacagaagccaaaacacattgcatggtggccacttcttgtgtccctgtaggtcatgagtgagagacatgagtggaccgaccgacccaacacttagaaatcaagtctgtgctctgttctcttaaagggaccaagctaaattactgttggttcatgtagtgacactgagctgttacagagacgcataatgcatatttaacttatttcaggaagtgttttgttgtaggtcagtaacagctgtcctgaggagggacagtctttgtagtgacagtcagctctggttacccagtcttctagatagttctcccctcactctctgctactactcgtccttctagaacataggccacgtctgtcctgcccttctcaggacgaatgactcaggctgcaggagggtgaggggcacggaggtgagggggggagagcctccacacatccgggtaatgaagagtcttgactgggaagtaatttcatgccgtaaaagaccaatccagttctgctcgactatgtagcatcttaaaagaagaaattaaaataaagccccaaattaagagttcttttgtcactttgtcacatttgctgtgtgtgggattattactattaatcatcgttagtgtgctatggaaggttggttttaaaatgagctctatcagtcggaaacacatgtttaatgatttgactgtacacacatctgtgtacacacatatacacacatatattactatcacttttattatggcgcctcagctcaccagcggtgtcttgtctgccaccctgacccagccggngtttcccaggctgagcagggagagccagggctccggcatggcctgaacacattcccacatgatgaatacatgtggctgtttccattcttctcactgcccatgtgcctgggggaatgaactgggcgctttagaaagaaattaccactgtgtctcggtgaggtagggttgctttatctggaggctccttaacaccttgtaaattaaatgtgaatgagagaagttcattaaaactggcattatagaagtggcctattgaggcttgaaagcagctgagctagtgtctgggttctctctgaacctatggagaaacacacgagcaagtgacagacgacggctgatgcaggcttaatcatctcgctaatggatgtgggccgaaataaaacagattacatgctactttccgtctcccttcagaaaacaccaactccgggagacaaatcagatcttttaacacaatctcattaaggccccttgctaacaagaatgcagagcttacacggcttaccaagatgatggattagcacacacactccgcacatcgactcaccagctcctgctttaaaacaacaaggcctccgtcttctttatggacggccgcctgcattcccatctcttttgctttttaagaagtaaactaaattcagccgctagcctgttagtgcagcatttattttattttattttttgaaaaaagccttttcccattgagtctcttacatgccttcaaaggtcggaatttattgtctgtgatactgaaaccatgtgcacaaaactgtcttctttcat

SEQ ID NO: 523 - DNA, 2821 bp, Cricetulus griseus
tatgttggtgtcccagagctaaactatgagtgaatttcggattcaccatgatgtcaatgaactactcagcctgctacgcacccatggtggagatggggctgaggtctacattgacctgctgcagaaaaaccggactccatatgttacaaccacagtctctgcccacagtgccaaggttaaaattgcagaattttctcgtactcctgaggagtttttaaagaaatatgaggaactgaagtctaaaaatacaaggaaccttgacccactggtatacctgttgtcaaagctcacagaagacaaagagacactacagtatttgcaacagaatgcaaaggaaagagctgagcttgcagctaatgctgcttcaagcagcactaccagctttaacatccctgttgccacctctaagatgtccacacaggagctagaagaactgaggaagcagcttggcagtgtggccacaggctccacactgcagcagtctctggaacttacaagaaagatgcttcgagacaaacagaacaaaaaaaacacaggccagcccctcccggtcttcccagcgtgggtaatatgagaggccaacactggctggagatttcctgattggttcgggcttaagctcagacacagctttgcctataggtaccctgcccttgacctcccaggaatcagcagtggtggaagatctgctctatgtgcttgtgggtgtggatggcaggtatatcactgctcagcccttggctggggaggcagaaccgtaccttccttgtggaccccaacctggacctgtccatccgagagctggtaaacagaatcctccctgtggctgccagctattctactgtaaccaggttcattgaggagaagtcttcattcgaatatgggcaggtgaaccatgccttggctgctgccatgaagaccctagtaaaggaatacctgatcctggtcacacaactggaacagctgcacaggcagggccttctgtcactgcagaagctctggttctatatccagccagccatgcggaccatcgacatcctggcctctcttgctacctcagtggataaaggcgagtgtgtaggcggatcaacactgagccttctccatgataggagcttcaactacaccggggacagccaggcacaagagctgtgtctctacctgaccaaggcagccagtgcaccctactttgagatcctggagaagtggatctacaggggcatcattcatgacccatacagtgagttcatggtggaggagcacgagctgcggaaggagaagatccaggaggattacaacgacaagtactgggaccagcgctatactgtgctgccacagcagatcccatccttcctgcagaaggtggcaggcaagatcctcagcacaggaaaatatctaaatgtggtcagagaatgtggtcatgatgtcacatgtcctgtagccaaagagatcatctacacactcaaagagcgggcatatgtggaacagattgagaaggcattcaactatgccagcaaggtgctgctcgacttcctcatggaggagaaggagctggtggcccatctaaggtccatcaagcgctacttcctgatggaccagggggatttcttcgtgcacttcatggacctcactgaggaggagctcaggaagccagtagaggacatcacacccacacgcctggaggctctgctggagctggccctgcgaatgagcactgccaacactgaccccttcaaagatgacctcaagattgacctgatgcctcatgacctcatcactcagcttttgcgggttctggccattgagaccaagcaggagaaggcaatgactcacgctgaccccacggagctcacactgagtggtctggaggctttctcctttgactacatggtcaagtggcccctgtcactgattatcaataggaaggcgcttacccgctaccagatgctcttccgccacatgttctactgcaagcacgtggagcgacagctctgcagtgtctggatcagcaacaagactgccaagcagcatgcgctgcactctgcgaagtggtttgctggtgctttcactttgcggcagcgaatgctcaacttcgtccagaatattcagtactacatgatgtttgaagtgatggaaccgacctggcacatccttgagaaaaacctgaaatctgcttccaacattgacgatgtccttggccaccacacaagtttccttgacaactgcttgaaggattgcatgctgaccaaccctgagctgctgaaggttttctccaagctcatgtctgtgtgcgtcatgtttaccaattgtatgcagaaatttacacagagcatgaaactggacagtgagttaggccgactgacactggagcagggtagtgtgcaaggacaacccacggagactgagcggattgaggatcgtccccggaaggagcctaccaggaagcacctgtctgagtatgtggatactcctcagctggcctctggttttgaggccaccatcaataactttgacaaaaacttttctgcccatcttcttgatttgctggcccgactaagtgtctacagcacaagtgactgtgaacatggcatggccagcgtcatctccaggctggatttcaatggtttctatgccgaacgcctggaacgtctgtctgcagaaaggagtcagaaggctgcgccccaagtgcctgtcccaagggggcccccagcaccaacacctagggtggccatccctgcacaatgagctcacttcttaaatatcattcttcctggaatatgtgtgttgtgtgttattactggttaaatatggtttgagtttc

SEQ ID NO: 524 - DNA, 2821 bp, Cricetulus griseus
tgcatgcttgctctaggctcagtgaaatccatcatcactgacagtgtgaaaaatggtaggatccattttgacatgcatgggttcctgaccaacgtcatccttgcagacctcaacctgtcagcatctcctttcctcttgggacgggcactttgggctgccagtcgttttactgttgctatgtcccctgaactgattcaacagttcctacaggcaacagttagtggtcttcatgaaacacaacccccatcggttcgaatttctgctgtgagagccatctggggttattgtgatcaactgaaagtttcagagagtacacatgtgcttcagcccttcctccccagtgtacttgatggcctaattcacctagcagcccagttcagctcagaggtcctcaacctggtgatggagaccctgtgcatcgtttgtactgttgacccagaattcacagcaagcgtggaaagcaaaatctgtcccttcaccattgccattttcctaaagtacagtaatgatcccgttgttgcctcgctggctcaggacatcttcaaggagctgtcacagattgaagcttgtcaaggcccaatgcagatgaggctgattcccactctggtcagcataatgcaggccccagctgataagatccctgcagggctctgtgcgacagccattgatatcctgaccacagtagttcgaaatacaaagcctcccctttcccagctcctcatctgtcaagctttccctgctgtggcacaatgcacccttcacacggatgataatgccaccatgcagaatggtggagagtgcttgcgggcctatgtgtcagtgacactggaacaggtagcccagtggcatgatgagcaaggccacaatggactatggtatgtgatgcaagtggtgagccagctcctggacccacgaacttctgagttcactgcagcctttgtgggccgcctggtctctactctcatctccaaggcagggcgggagcttggggagaatctggatcagattcttcgtgccatactcagtaagatgcagcaagcagagacactcagtgtcatgcagtctctgatcatggtgtttgctcatctggtgcacacgcaactggaacctctgttggagttcctgtgtagcctcccaggaccgactggcaaacctgccctggagtttgtaatggctgagtggacaagccggcagcatctattttatggacagtatgaaggcaaagttagctctgtggcactatgtaaactgcttcagcatggcatcaatgcagatgacaagcggctacaagatattcgtgtgaagggagaagagatctacggcatggatgaaggcatccgtacacgctctaagtcagccaaaaacccagagcgctggacaaacattcctttgttggtcaagatcctaaagctgattatcaatgaactctccaatgtcatggaggccaatgcagctcgccaggccactaccacggagtggagtcaagatgactccaatgatatgtgggaggaccaggaggaagaagatgaggaggaggaggatggtttagctggccagcttttatctgatatccttgctacaagtaaatatgaggaggattactatgaagatgatgaggaagatgaccctgatgccctgaaggatcctctctatcagattgatctacaggcatatctcaccgacttcctttgccagtttgctcagcagccctgttacataatgttttcgtgccaccttaatgacaacgagaggcgggttctgcagaccatcggcatctaaaaaggggagtcttcaacctgtgtcccctctcctggtccagccacagaccattctgcagccctcgccggtcttgagatgcactttttctcagcctggagtggcttcctggcccatggtctccacagtgacactgacagctcagtccttgctcaccagggctggcatttaaaaatgctaaaacaaaggacatttctaaatcctgtgaagataccccagatctggaactgtttttctccccagctctgcccccacctccattcctagcatcttttgttggccagaccagaaacattgatacccagaaggattatgggttcctgattattttgccccaccccaggagcacaggaagtcagtaccatttgtattccgaagcgtacctgttcgttttcatgggatatctcatgtgttcagataggagcccccttgaaagagatcactatgctttctaccctcagcacctgaagctctagattctcggtaggagcaagctggaacagctacatactaagccctttccagtaacctcccctccatgctttcctcgtgcaacactaaggctcctctgtcaaaggagccatcttcccatctctgcttcattgcatgacacagcccctcccccaggctgttcctatatatacatgcacacacaaaataagccagacagatggtaacttgtctttcttttttttttagaagaaaaaaaatcaggaaaaaagatttttatttctaaatctgcctgacccatctatatttaatatgcctcttttatgcataaccacagagcctgatagtcaaatgtcacccctgtccctcaggaatcctccaaagtggttgagttgtagccctcgagtttgcaacatgtatttttctaggacagtaaagcaatctttacaaatgaatttagtctgcatactataaggtgtctcagcacctctaccttctgtttattccctttagaaggaaagcaaaacagaagaaatagtggggcctattttggcatcctactgtgatttggcaaagagctctaaaatcttagaga

SEQ ID NO: 525 - DNA, 2821 bp, Cricetulus griseus
  modified_base (415)..(415): a, c, t, g, unknown or other
  modified_base (436)..(436): a, c, t, g, unknown or other
ctcatcccaaggagttcaactagatgttcctccacagtctttggacccagaagttttattaaaagttaaatctgagattgaagaagaactgaaatccttggacaaagaagtctctgaagccttcaccagcacaggctttgactgtcacacctcacctgtgtttagccctgctaacccggaaagctcaatagaagactgcctggcccatcttggagaaagagtatcccgggatctgaaagagcctttgaataaagcattgcaagtgattctcagccagccagtgacatatcaggcataccgtgaatgtacagtggagactgcagttcatgccagcggatggaataagattttggtgcctctcgttttgctgcaacaaatgcttttggaattgacacggcgtggtcaagagcccctnagtaccctgctgcagtttggngtgacgtatctggaggaccatgcagcagagttttatcattcaacaaggtggctggggtactgtctttagtcttgagtccgaggaagaagaataccctggaatcattgcagaagatagtaatgacatttatatcctgcccagtgacaactccggacaagttagtcccccggagtccccaacggtgacaacatcttggcagtctgagagcctacctgtctcactgtctgctagccagagttggcacacagaaagcctcccggtgtcccttgggcctgagtcctggcagcagatcgccatggaccctgaagaagtgaagagcttggacagcagtggggctggggagaagagtgagaacaactcttctaactctgacattgtgcacgtggagaaggaagaggtgccagaggaggcgttcccaggagccgctgctcccctgctcccacagaccactgccaaggaggccacagaaatgagagtggagaaaggcagtcccactccatctgtgtttgccgagtttggggaggaggagctggaagcagcggccgtgagacctgctgccttggaggggcggagcaggccgtccagctgagtgcggagggggctgggagcaggaaagagagccacaccggggagcccaccactgctggggcagccaagggtgccatgccctctgagggcaaggctgtactgctatttggaggggctgctgcagtggccatcctggcagtggcagttggagttgcgttggctctaagaaagaagtaacagccttttcagaaagaagacaaaaggacctacggctttagttgtattcactggaacatagactgccaacagctgagtggacatttacaggacactgggggaattgggctttctattcagcgtggcagtggcttgagatagattgttcacattggcctggttgtcatcctgagggccttggctcctgctagattcggaagggtaagagtgaagttcccatctagagcaggcctgtcaacttgggcagtaattctctgtaggaggctgccttgtgcattacgtaatgacaggcaacatctctggcttctacccactaaatgccagtggcaccccactaccagtgagcgcagccagaaatgtctcctacattgccaaatgtcccctatggacaaagtcatcccctgttgagggccactgctttaagggatagggtttaattaagagaatctgggggaggaagccgcagctggggacagccagctgttcatcctgttgcactttctcgtaacaggtgaacttgctgtgctctgtctgcagctccttttttcctggtccccgattctgtagagtgaggctctcccccattgcaccacctctcaggtaccgcagcagtgcgtctcatcctgtacccccttcacacccaacaaagccccaagcttcccacagctccatctttcaaagatactgcctgtaggaaccttttaaaagataaatactcaggccaggtttggtggcaccatctgtaatcccagcatttaggaagtggaggcaaggcgattatcacaagttcaaagctagcctggtgtacatactgagtttgaaaccagccaggactgcatggtgaaaccttgtcccaagaaaagataaatacactgaggctgtgtaggagacctagggtttcctagtctgattgccagcgcagattacaggctgcagacattgttcacagaggcatgaaggtggtctacacacctgtcaaggtcgcttcgacctcttacaggtgtagccagccaccccacgtgcctatgacttagcagtgacacctctgatggcatgtgcaccatctggaaccctgggttagtgtgcttcccagtacctgaccttggacattggggcatcatcagcttctatgtgggtctcctgccatgaaggaagcagtgtcatcctttggcttacagaacaaattggatcataacctttattcagtgtaaatcattcagataaatgataaaactttatcatttattattaggtatcacttaatgaaaagtgggacagaaacttgaatttaagaccaaaactgttgctgaggcactggtttggtcttctgagttcaagaggagacctcttggtctgaactcaccccaacccgcagggtgaccgaccaagaggatccatgcacgcactcactctagctagtgggactcggcaggaccttctgtcacttggctgatcccatccctcaaggaggggtggaaccagcccctctcatgcctgcgggccacagtgccacctgcaaggtactcgtgcttggtgtgaagtctcctcagatttaacttagtcatgtaacattacttcttagatcctgaaatttataataaaatacttttaactactcta

SEQ ID NO: 526 - DNA, 2819 bp, Cricetulus griseus
  modified_base (494)..(494): a, c, t, g, unknown or other
tgtgtcatcagggcctaatgtcgtttgaagggtttgcaaggttctgatggataaagataattcgcctcaaaaatgatgagtcgcaagagaacaagaaggaactgcagctccccctctcctactactacattgagtcttcacacaatacctacctcacaggccatcagctcaagggagagtcctccgtggagctgtacagccaggtcctcttgcaaggatgcaggagcatagagctggactgctgggatggagatgatggcatgcccattatttatcatggacatacactgacgaccaagatccccttcaaggaagtagtggaagcaattgatcgaagtgccttcatcacctctgacctgccaatcatcatatccattgagaaccactgttcattgcctcagcaacgaaaaatggcagagattttcaagagcgtgtttggagaaaagctgactgaatgaaaacgaccgccaaacgctgtgtcgcaggtattctcngaaactgatccagcacaccgcttgtcagctaggacctaacccggccagcgacccgaatcgactcatccaatccaaccccctcatgttctggctccatgggatacagcttgtagccctcaactaccagacggatgatcttcctttacatttaaatgctgcaatgtttgaggcaaatggtggctgtggttatgttttgaagccccctgtcctgtgggataaaagctgtcccatgtaccagaagttttctccactggaaagagacctagacaacatggaccctgccatctattctttaactatcatctctggccaaaatgtgtgccccagtaacagcaccggaagtccgtgcattgaggttgatgtcttgggcatgcccctggacagctgccatttccgcacaaagcccatccatcgaaacactctgaaccccatgtggaatgagcagtttctcttccgggttcactttgaagatctagtatttcttcgttttgcagttgtggaaaacaacagttcggcaataatggctcagagaatcattccactcaaagctttaaaacgaggttatcgacatcttcagctgcggaacctccacaatgaaatattggaaatctctagcctattcataaatagcagaaggatggaagaaaatccctctggcagtacgatgccagcctctttgatgtttaatactgaagagaggaagtgttcactcacagagtcacggtgcatggtgttccaggtccagagccctttgctgtcttcactataaatggaggcaccaaggcaaagcagcttctccaacagattctggtgattgaccaagacaccaaacttagtgccacagactactttctgatggaagagaagttattttatatctaaggaaaagaatgagtgcaagaaaccaccattccagcgagctgtgggtcctgaagaagatattgtacagattttaaacagctggtttccagaagaaggctatgtaggcaggattgtcttaaagcccagaaggaaaccctagaagagaaaagcattgtccaagatgaacaaagaggtgatcttgagctcggaggaggagagtttctttgtccaagttcatgatgtctctccagagcaaccccgaactgtcatcaaagcccccccgggtcagcactgcacaggatgtcattcagcagaccttatgcaaagccaaatattcctacagcatccctgaacaaccccaacccaggtgactatgtgctcttggaagaggtgatgaaagacgcacccaataagaagtcttctactccaaagtcctcacagaggatccttttggaccaagagtgtgtatttcaagcccaaagcaagtggaaaggtgcagggaaattcatcctgaagctaaaggagcaggttcaggcatcacgagaagataaaaggaggggcatctcctttgcaagtgaactcaagaaactcactaagtccactaagcagccccgaggactcacatcacctcctcagcttgtggcctcagaaggtgttcaaatcaaggaggagaagcctgtgggtgccttgacctccagtgacacagcagcttaccagcagtgactgaggcagcatgtttgacccagctatatagtaaggtgaagatccttggcgagaactgggaaccagaggcacagaggttggaaaaccttgaaaactggtcataggttgaatgagaagtggaagtctgggggctttggaaatgtaaatatgtcctgtaaggtctgttaacagttactcaaattagttcctatatgtgtaccatggtgcacttactttaggatgcctttttgcaaacagaaatgttctttttttcaaaagctattattcatatgcccacagatcgttccaatttcagttctcacaaaatgaatttagaatgatgtacaaattagtatctactgagttgtgatgtcttaataagaagcctcatcattttttaaaagcaaaagcagactgagttgatgtttaaggtagatttatttattttgcaatgttggtactgacactgtacttgtgtatttattagacatagctttcttgatattgctatgggttacaagcattagtggttcaatctatttcaagacatcctaaaaataaaacatttgaacatgagataaacaaccccttctctgcacattctaaaagagacatgtcaaaatacaccacacagctttcacatcagtgagattcttgcttgcaccattattctcttgccaacgaaactcagactattctcatttggcagttgtacagcactaaaagttcccttttaaaaaatatacttaaaccaaaaaaaaa

SEQ ID NO: 527 - DNA, 2815 bp, Cricetulus griseus
  modified_base (199)..(199): a, c, t, g, unknown or other
acgagacttggtggcctattgaggcaaagctgagcgacctgcaaaaagaagccgagaagctggagtctgagcaccctgaccaggctcaagccatcctgtctcggctggccgagatcagtgatgtgtgggaggaaatgaagacaaccctgaagaaccgagaggcctccctgggagaggctagcaagctgcagcagttccnggcgggacttggatgacttccagtcttggctctccaggacccagactgctatcgcctcgggcaagcggacagatgaggtggacagcgaggatgcctttggcaacttccacagatcatggccataaccttcaaactgtgcagctgttgataaagaaaaatcagaccctccagaaagaaatccagggacaccagcctcgtattgatgacatctttgagaggagtcaaaacatcatcacagacagcagcagcctcaatgctgaggctatcaggcagaggcttgctgacctgaagcagttgtggggactcctcattgaagagacggagaaacgccatagacggctcgaggaggcacacaaggcccagcaatactactttgatgcagctgaagcagaggcttggatgagtgagcaggaattgtacatgatgtctgaggaaaggccaaggatgagcagagtgctgtctccatgttacaggctattccagctcgaacagggaggttgacgacctggaacagtggattgctgagagggaagtggtcgcagggtcccatgagttgggacaggactatgagcatgtcacgatgttacaagaacgtttccgagaatttgctcgggacacaggaaacattgggcaggagcgtgtggatacagtcaatcatatggcagatgacctcatcaactctggacattcagatgctgccaccattgctgagtggaaagatggtctcaatgaagcctgggctgacctcctggagctcattgacacgagaacacagattcttgctgcctcctatgaactgcataagttttaccatgatgccaaggagatctttggccgcatccaggacaaacacaagaaactccctgaggagcttggacgagatcagaacactgtggagaccctacagagaatgcacaccacctttgagcatgatatccaggctctgggcactcaggtgaggcagctgcaagaggatgcagcccgcctccaggcagcctacgcaggggacaaggctgatgacatccagaagcgtgagaatgaggtcctggaagcctggaagtccctgctagatgcttgtgagggtcgcagggtgcggctggtggacacgggagacaagttccgcttcttcagcatggttcgtgacctcatgctctggatggaagatgtcatccggcagatcgaggcccaggagaaaccacgggatgtgtcatctgttgagttgttaatgaataatcatcaaggtatcaaagctgaaattgatgctcgtaatgacagtttcacaacttgcattgaacttgggaaatccctgctggcaaggaaacactatgcttctgaggagatcaaggaaaagttactacagttgacagaaaaaagaaaagaaatgattgacaagtgggaagaccgatgggaatggttaagactgattttggaggtccatcagttctcaagggatgccagtgtggctgaggcttggctgcttggacaggagccatacctatccagccgcgaaattggccagagtgtggatgaagtggagaaactcatcaagcgtcacgaggcatttgaaaagtctgcagcaacctgggatgagagattctctgctctggaaaggctgacaacattggagctactggaagtgcgaagacagcaagaggaagaagaaagaaagagacggccaccttctccggagccaagcacgaaggtttcagaggaggcttcgtcccagcaatgggatacttcaaaaggagaccaagtttcccagaatggtttgccagctgagcagggctctccacgggttagttaccgctctcaaatgtaccaaaactacaaaaactttaatagcagacggacagccagtgaccattcatggtctggactgtgaagctcactaccgtttgtcaagaaccactctttctgcagcctgttggtgatgaccttttggcttccatgtcacccaaagtgttaaaattttcagttaattcatagccttccttggtttcacgtttgtttgcgtttaatttatgcttatttggatgctcattgcctcaaagcagcatactcatttttgtttatttattgtgagcttttctactttattaagattttacatgagtaattgaaattaaattacagcataatgaagaaactagattctaacaggtacggcacatccaagttatactaacagggtacaattctctgctacaggtgctatatgttatttacaagtattattaacctatagtagtttttcaactaggaaggctggcgtgtaaggaaggagaagttcactactaggttatttgtgcctgcagtcattctgtaacattccatggagaatgcgttcattggaaggacaggaaagaagctgagtgatcttgttgggaagctgtttaaattttaggtgtgggaccccaaatgttctaagaccctcaagtcatttattactttgtacaaacccaataagtctctcttttctgccaagtcctcaacctagaattgtaggcctctgtgcaacacacatcacagccagcctgactgctgccaccagctctgtcttggtcagtgtcaccgctgccagcactcaggtcatgcatggcaggtgccagcagctct

SEQ ID NO: 528 - DNA, 2814 bp, Cricetulus griseus
ggaatggtacaagaaaggtatcgaagaactaagaaaaaggaattgctgttatagtaacaggccaaggtgaacagtgtgaaagagctagacgccttcaagccaaaatgatgactaatttggttatggccaaggatcgtttgcagcttctagagaagctgcaacccgttttgcaattttccaagtcacaaacggaagtctataatgacagtactaacctgacttgccgaaatggacatctccagtcagaaagtggagcagttctgaagagaaaagatcccctaacacatgctagtaattcattgcctcgatcaaaaacagtcatgaaaagtggatccacgggcctttcaggtcaccacagggctcctagttgcagtggtttatccatggtttctggaggaagacagggacctggttctgcagctgctgcacataagggtactccaaaaccaaacagaaccaacaaaccttctacacccacaacggctgttcgtaaaaagaaagacttgaaaaattttaggaatgtggacagcaacctggcgaacctcataatgaatgaaattgttgacaatgggacagctgttaaatttgatgatatagctggtcaggaattggcaaaacaagcactgcaagaaattgttattcttccttctctacggcctgaattgttcacagggctcagagctcctgccagagggttgttgctctttggtccacctggaaacggaaaaacgatgctggctaaagcagtagctgcagaatctaatgccacctttttcaatataagtgctgcaagtttaacttcaaaatatgtgggagaaggagaaaaactggtgagagctctctttgctgtggctcgagaacttcaaccgtctataatttttatagatgaagttgatagtcttttgtgtgaaagaagagaaggggagcatgatgctagtagacgactaaaaactgaatttttaatagaatttgatggtgtgcaatctgctggagatgacagagtacttgtaatgggtgcaactaatagaccccaagagcttgatgaagccgttctcaggcgtttcattaaacgggtatatgtgtctttaccaaatgaggagacaagactgcttctacttaaaaacctgttatgtaagcaaggaagtccactgacccaaaaagaacttgcacaacttgctagaatgactgatggatactctggaagtgatctaacagctttggcaaaagatgcagccctgggccctatccgagaactgaaaccagagcaggtgaagaatatgtctgccagtgagatgagaaatattcgattatctgacttcacagaatccttaaaaaagatcaaacgcagtgtgagtcctcaaaccctagaagcatacatacgctggaacaaggactttggagacaccactgtttaaaggaatgcctttgtaagcccacagaacattatacttaacaagagacatgagcttcagagaagttatcacctgcaggaacactcagacttcgtacacagtaacttttaaagagttcctttttgtgcaccaaacttgaagaggaacaagacagacctaaataaaatatagcaatgtgaatggagtttttgtttaaggccttcttgcctggtggtcatggttttctctagtgggcactgttagttagagcacagcagaaatagattctggttctttattgatagtaatcattatgtaaataataatttgtatattgttctttcatgtctgttttctgttttattgccttgccaccaaacagcttagaaagcaatataatagccacagagaaaatctggcatgacaaaggttgaaggttttgagtcactctgtcatgtaacatgtagatcagtccttgtctgccctgcagttatttttttctaatatgtcagaaatccattatagacttaacttattccagctgaaattcattttttgtgttggacttattctggtattttagagagccactttcaactgctataatttgcaccaatatgagagaagggacatattaggaagaaagacatttctagcttattgcttactactttcttaataggataattactaaatgccagtggcaccaccatctttttactaattactgtcccttccacaaaattgaaaataccgaatttttctacacggcatatattttataggtttcctgtgcttactttttaactaaaaagctctagtctgttgatctaccttttgtttccataaatgtataataattctttgttgtttgtataaatatggctggacttttattataaaaatgcattataggaagtagaggctcatgtgtggccttttaagaattgtatcaaggcaaatggatatttgcccttagtttactggttaaaagtttgtttacagaatttttctttggtgcttaaatgatgcagtgtaaattatcatgggtagaaagaataatgttgtggtagtaacaccaacccttcttgtaagaaagatgtttgagaaaaacacattaaaaaaacttgccctatcccaaggattggtatgctcttcatgttaacatgacaagagtccttgcatgctcggtgaacttactgattacctaactgagccaaaggaaagcctcataccatctttctagatctgctaaggctacaaagcttttctgagactagaagccaattgaatttatttttgtccttttgtgcttacagtgtaacaggataaacagaattttaagttaaatatatgtggcattctctgttgataatgtaaactgtttatgtgtcccacaaaatttaactttttgtagaatgaa

SEQ ID NO: 529 - DNA, 2812 bp, Cricetulus griseus
  modified_base (144)..(144): a, c, t, g, unknown or other
ccccgcatgtgacccggccagcccccggcgagtgtgccctcagtagcttcggccccgggctgcgcccaccgcccaacatcagctctccagctcgctcgtccgggatggcagcggccaaggccgagatgcagttgatgtccccgntgcagatctctgacccgttcggctcctttcctcactcacccaccatggacaactaccctaaactggaggagatgatgctgctgagcaacggggctccccagttccttggtgccgccggaacccggcagcaacagcggcagcagcgccttcaatcctcagggggagccgggagaacaaccctacgagcacctgaccacagagtctttttctgacatcgctctgaataatgagaaggcgatggtggagacaagttatcccagccaaactactcggttgcctcccatcacctacactggtcggttctccctggagcctgcacccaacagtggcaacactttgtggcctgaaccccttttcagcctagtcagtggcctcgtgagcatgaccaatcctccggcttcttcatcctcagcaccttctccagcagcttcaacgtcttcctctgcctcccagagcccacccctgagctgtgctgtgccatccaacgacagcagtcccatttactcagctgcacccacctttcccactcccaacactgacatttttcctgagccccaaagccaggcttttcccggctcagcaggcactgccctacagtacccgcctcctgcctaccctgccgccaagggtggcttccaggttcccatgatccctgactatctgttcccacaacaacagggagacctgggcctgggcaccccagaccagaagcccttccagggtctggagaaccgtacccagcagccttcacttactccactatccactattaaagccttcgccactcagtcgggatcccaggacttaaaggctcttaataccacctaccaatcccaactcatcaaacccagccgcatgcgcaagtaccctaaccggcccagcaagacaccccccacgaacgtccttatgcctgcccagtggaatcctgcgatcgccgtttttctcgctctgacgagctcacccgtcacatccgcatccacacgggccagaagccgttccagtgtcgaatctgcatgcgcaactttagtcgcagtgaccaccttaccactcacatccgcacccacacaggcgagaagccttttgcctgtgacatttgtgggagaaagtttgccagaagtgatgaacgcaagaggcataccaaaatccacttacgacagaaggacaagaaagcagacaaaagtgttgtggcctcttcggccacctcttccctctcttcctacccatccccagtggctacctcttacccatcccctgccaccacctcatttccatcccctgtgcccacctcctactcctctcctggctcctcgacctacccatctcctgcacacagtggcttcccctcgccctcagtggccaccacctatgcctccgttccacctgctttccctgcccaggtcagcagcttcccatctgcagctgtcactaactccttcagcacttcaactgggctttcggacatgacagccaccttttctccaaggacaattgaaatttgctaaagggaaagaaagaaagcaaagggagcagggaaaaaaaatgaaaagacaatggacaggagggcatctttttctgactccctcagaaggggctcctcttaagtcagagccacgacctctctctagccaagagaaggtctgttggccaacagtccttttaccgtccctgcctccccattcctattccctttgacttcagctgcctgaaacagccatgtctgagttcttcacctctatccaaagaacttgatttgcatgggtattggattaatcatttcagtatcgtctccatcgtatgcctgacccttgctcccttcagtgctacatcaagttggcaaaaaaaaaaaaacgggtttgggccctcagaaccctgccctgtatctttgtacagtgtctgtgccatggattttgttttccttggggtacccttgatgtgaagataatttgcataccctattgtattatttggagttccgtcctcactttgggggggagggggagcaaagccaagcaaaccagtggtgaccctcttattttgtgatggctgctgtgacaacatgtgtggagcatcttttgaagcagcagtcctaggtattaaccagagcatgtgtcagagtgttccgttaacctttttgtaaatactgctcgactgtactctcacatgtgacaaagtatggtttgttttttttttttccttttttaaattttgcccgtccctttggttaaaagagtttcacgtcttggtgccttttgtgtgacacgccttgccgatggcttgacatgtgcaattgtgagggacatgctcacctctggccttaaaggggtaggagtgatgttttgggggaggctttgagagagaaatgaggaagagggctgagctgagctttggttctccagaatgtaagaagaaaaattttaaaacaaaatctgaactctcaaaagtctattttttaactgaaaatgtaaatttatacatatattcaggagttggaatgttgtagttacctactgagtaggcggcaatttttgtatgttatgaacatgaagttcattattttgtggttttattttactttgtacttgtgtttgcttaaacaaagtgacttgtttggcttataaacacattgaatgcgctttattgcccatgggatatgtggtgtatatccttc

SEQ ID NO: 530 - DNA, 2811 bp, Cricetulus griseus
aaatgtgcctggtgctccaaagagtactttggcaatccacggtccgtcacctctcggtgtgacttgaaggcaaacctcatccgaaatggctgtggaggtgagattgagagtccagccagcagcacccatgtccttcggagcctaccccttagcagcaagggctccagtgtcatgggctctgacgtcatccagatgacaccacaggagatttcggtgagcctcaggccaggcgaccagacagccttccagcttcaggtgcgccaggtggaggactaccccgtagacctgtactacctgatggacctttccctctccatgaaggatgacttggacaacatccggagcctgggcaccaagcttgctgaggaaatgagaaagctcactagtaacttccggttgggtttcgggtcttttgttgacaaggacatctctcctttctcctacacggcaccgagatacgagaccaatccatgtattggttacaagttattcccaaactgtgtcccttccttcgggttccgccatctgctgcctctcacggacagagtcgacagtttcaacgaggaagtaaggaagcagagggtgtcccgtaaccgtgatgcccctgaagggggctttgatgctgtcctccaggcagctgtttgcaaggagaagattggttggcgaaaagatgctttgcacttgctggtgttcacaacggatgatgtgccccacatcgcgctggatggaaaactgggtggcctggttcagccacacgatggccagtgtcacctgaatgaagccaatgaatacactgcgtccaaccagatggactatccatcgcttgccttgcttggggagaaactggcggagaacaatatcaacctcatcttcgctgtgacgaagaaccactatatgctctacaagaattttacagccctgatacctggaaccactgtggagattttgcatggagactccaaaaatattattcaactgattatcaatgcatacagtagcatccggtctaaagtggagctatcagtctgggatcaaccggaagaccttaatctcttcttcaccgcgacctgccaagatggtgtatcctaccctggtcagaggaagtgtgagggtctgaagattggggacacggcatcctttgaagtgtccgtggaggctcggagctgccctggcaaacacacagctcaatctttcaccctgcgccctgtgggcttccgggacagcctgcaggtggaagtcacctacaactgcacatgtggctgtagcagaggacaggagcccaacagtgccaggtgcagtgggaacggaacatacatctgcgggctctgtgaatgtgaccccagttacctgggcaccagatgcgagtgccaggagggggagaaccagagcgggtaccagaacctgtgccgagaggcagaaggcaagcctctatgcagtggacgcggggagtgcagctgcaaccagtgctcctgcttcgagagtgagttcggaaggatctacgggcccttctgcgagtgtgacagcttttcctgcgccaggaacaagggcgtcctatgctcaggccacggcgagtgtcactgtggagaatgcaaatgccatgcaggttacattggggacaattgtaactgttcaacggacatcagcacatgccgggccaaggatggacagatctgcagtgaccgtggccgctgtgtctgtgggcagtgccagtgtacagagcctggagcctttggagaaacatgtgagaagtgcccaacctgcccagatgcttgcagctccaagagagactgtgtagaatgcttgctgcttcacttggggaaacctgacaaccagacctgccaccaccagtgcaaagaggaggtggtcacgtgggtagacaccattgtcaaagatgaccaggaggctgtgctttgcttctacaaaactgctaaggactgcgtcatgatgttcagctacacagacctgcccaatgggaggtccaacctgacagtcctcagggagccagagtgtgcaagtgcccccaatgctatgaccatcctgctggctgtggttggcagcatccttctgattgggatggcactcctggccatctggaaactgcttgtcaccatccatgaccgccgagagtttgccaagttccaaaaccccctgtacagaaaacccatctccacacacaccgtagatttcgccttcaacaagttcaacaaatcctacaacggctcagtggactgaggccccttctgaatggctggagggggactgaggacaaagactgacacgtcttggattgctttccacttgctcacgctagctaggcaagcaacgagatgccctccatggagccttagggccctgctacccacacaggggccacttcccttcaagccaggagaagcaaggacactctggcattctcggcttccctgctgtctccagcttgctgtctccatgaactgctgaagactgggctgcccctcccttccccgcctggccagacaagacggtatctagaagagtctgcgtgcacaaagccagcgtgcagcctggcttttttgggctggttggttttgctatgaaataaaaaggtcacgcgtttatgatgtagatctgattactggctccctgaggactgcctggtatctgtgggtgttggtgatggatttggggaggcgcctgttgaaggtatacaccttgtaaatgatagctttttccttcttgtccatgtctgtttagtacttttgaaatgaaaagaaaagattttctgggattggaagtaaagactgaatccaaaaaaaaaaaaaaaaaaaaaaa

SEQ ID NO: 531 - DNA, 2810 bp, Cricetulus griseus
ggcggcggtagtgtgggttgggctcaagcagacggccgcacctcagactccctggagcggggagcccacgcgggcgggctcctgaaacaaagagcagcgggagtccagacgccgcgggtgggcggtcagccggtcagcaccgagcccgccagcggctgcccgcgctagcccgaagcgcggccggccggcgcggcctgagggcgcgaagatgccgcgcgtcgtacccgaccagagaagcaagttcgagaacgaggagttcttcaggaagctgagccgcgagtgtgagattaagtacacgggcttcagggaccggcctcacgaggagcgccagacacgcttccagaacgcctgccgcgacggccgttcggagatcgcttttgtggccacaggaaccaatctgtctctccagttttttccggccagctggcagggagaacagcgtcaaacacctagccgggaatatgtcgacttagaaagagaagcaggcaaggtgtacttgaaggctcccatgattctgaatggagtatgtgtcatctggaaaggctggattgacctccacagattggatggtatgggttgcctggagtttgatgaggagcgagcccagcaggaagatgcaatagcacaacaggccttcgaagaggctcgaagaagaactcgtgaatttgaggatagagacaggtctcaccgggaggaaatggaggcaagaagacaacaagaccctagtcctggttccaatttaggtggtggtgatgatctcaaggcttcgttaatacgagcacagcacatgtgccatccatctctacatatacactgcttctaattggtatacataactcattgtgcgaccagaaactgtgataactggaggtactacagtatatttcatgacctgaggcagtaaagacatcatcagctgccatggttttgcactataattaatacctgcatttctgatttttaaaacatgtagccagtaataatttgagattttttttttctatgcaagcttatcttgttggcattattttagttgatgaaagtatctactttctccattttaatttaaaagttcatgtcatttaaaaacaagataagaaactgaaatttgtatcagggttgcttaaattattttgtactttcagacgagttggttatatagctttcctccttgataagcgttctttgttgtttgttttctccatatcattttgtgttttttgtattctacatcattttacaaatgaagatgtgttcacatttttacaagctaaaaacctagcagcatagagctgtcacagcctcctaaaacaaaagtttacagttgttaaagtcacagtatccttttaaatactaataccctttcttgacctttgaaacataaacattttaaattagtatcaatttttatttgtctcaaatctgtttcaagttatattctgtgatcatgagtttgggtagaggtattctccataggtgataatgttctacaaaaatgcccaaagaagtcacatactggcttctgttttattcagggattattttttaagtcaatcagaaaaagggatactggaacttcttatatgtaacagcatattaaactggaggcagtgatgaatcagctacaaaggtaaattgtattaaaatcatgttttaagatagctgctttcctgtgtattttgtattgcatgcttttgtaggaacaatattgggtgatgaagattagtcttagaaaatgttcatctgtgcagaagatacattttcttccattaattctgggcaaaacattcacagttatatatgatggtattttgcaaaaggactattaataatgcattttgagatgaatcagtgtaacaatatttttaaaataggcttaatgtcaaattgcaatttttttaaatgtaaaactggaaaaaagtgctaagtcatttggcacatgcttacttttcttggtcatattcattaaatgttaactacatttctgaatttttgcaaaaatgtattttatcataaaatggcattattttagagaattttaaaaactgacatggtcaattcagaaaaatctgaataaggtcattgcatttaaaaaacatataaagatacttgattgtgcaggtgtgtctttcattgtatataagtcttataattcataaacaaatatcctgtatctcaaaataaaaatatttgttatatatttgaagtcgtgcatggtaaaagattgtgtttgaattattataaacaataatgtgttacaaaagatcatgctggctttgtataactgagtactatgaatgaatttggttagtatttggtgatgtacagctcacatgtttacactctcagtgccctaattcctctgggggaattaccttttaaaagtgatcctttattttttaaaaaccatgttggtggtacattttgtctggttctagccaagagctttcagtccaccagtgaataagatcacatggtattaaattttgttgttgccatcattctgtaaatagtgaattttttttattagccttgcactgcttctgtctgtcttaatgctggcattaagattataaaccccttttctccggtagtgtaggctttgaaaactaagttattggtgcaatttcatatttttttcataatctatatttaaaattacatcattgcatcatcttttctaaattcatctccattaaaacttgccttaagctaccaggttgcttttaccattagctttactgtatatttgtatgtttaatttagtttcacattaaaattctgtgtaagtagaaaaaaaaaaaaaaaaa

SEQ ID NO: 532 - DNA, 2810 bp, Cricetulus griseus
gaaaggaggagataaaaagagaggtgttaaaagaccgcgagaagatcatggccgaggatattttgagtacattgaagaaaacaagtacagcagagccaagtctcctcagccacctgttgaagaagaagacgaacacttcgatgacacagtggtttgtcttgatacttataactgtgatctgcattttaaaatatcgagagaccgcctcagtgcttcttcccttactatggagagttttgcttttctctgggctggaggaagagcatcttacggtgtatcaaaaggcaaagtctgttttgagatgaaggtaacagagaagatcccagtaaggcatttgtacacaaaagatattgatatacatgaagttcggattggctggtcactaactacaagtggaatgttgcttggggaagaagaattttcttacgggtattctctgaaaggaataaaaacatgcaactgcgagacagaagattatggggagaagtttgatgaaaatgatgtgattacatgttttgctaactttgaaactgatgaagttgaactctcctatgcgaagaatggacaagaccttggtgttgccttcaagatcagtaaggaagttcttgctgaccggccactgttcccgcacgtgctctgccataactgtgcagttgaatttaattttggtcaaaaggaaaagccatattttccaatacctgaagactatacttttatccaaaatgtccccttagaggacagagttagaggaccaaagggacctgaagagaagaaggattgtgaagttgtaatgatgattggcttgccaggagctggcaaaactacctgggttactaagcatgcagctgaaaaccctgggaaatacaacattcttggaacaaataccattatggacaaaatgatggtggcaggttttaagaagcaaatggcagatactggaaaactgaacacgctgttgcagagagctccacagtgtcttgggaagtttattgagattgctgcccgcaagaagcggaattttattctggatcagacaaatgtgtctgctgcggcccaaaggagaaaaatgtgcctgtttgcaggcttccagcgaaaagctgtcgtagtttgcccaaaagatgaagactataagcagaggacacagaagaaagcagaagtagaggggaaagacctaccagagcatgctgtccttaaaatgaaaggaaattttaccctgccagaggtggctgagtgctttgatgaaataacctatgttgaacttcagaaggaagaagcccaaaagcttttggagcaatacaaggaagaaagcaaaaaggcactcccaccagaaaagaagcaaaatactggctcaaagaagagcaataaaaataagagtggcaagaaccagttcaacagaggtggtggccatagaggacgtggaggattcaatatgcgaggtggcaatttcagaggtggagctcctggtaatcgtggcggatataataggagaggcaatatgccacagagaggtggcggtggtggaagtggtggaattggctacccatacccccggggccctgtttttcctggccgaggtggttactcgaacagaggaaattacaacagaggtggaatgcccaacagagggaactacaaccagaacttcagaggacgaggaaacaatcgtggctacaaaaatcaatctcagggctacaaccagtggcagcagggtcaattctggggtcagaagccatggagtcagcattatcaccaaggatattattgaatacccaaataaaacgaactgatacatatttctccaaaaccttcacaagaagtcgactgttttctttagtaggctaactttttaaacattccacaagaggaagtgcctgcgggttccttttttagaagctttgtgggttgatttttttttttttcttttcttttttgtacatttttaattgcagttttaaagtgaatcgtaagagaacctcagcattgtgcacgataagagaatgtgtcagtatttcagggttctacattttatctgtaaaatgtgacttttttttatcacaacaaaagtaaaatgttgctttgtacctggtgtcttttattaagcatttactcccccatttctcacagagaataacagtcgggagtcattgtcacaataaaatagcaatgttagcaaccagattcatggaaggactaagtggtcctcatgaattgcataagattctgtattgctcataatacactccatcctctctgtaaactggtgggtaatagtggaaaggaaatttctgacaaaccgggaaagctattcttttttctgtttaacaatggaatttgaacaattgggaatgaagataaaatttagaaccaagattgagaagatggagtgtatgtagaagggctgttaaaaatgtaaacttggttgcattatatgtggaggctcaaacttgtgaaggttaaataccataaatttttccatttgttctgcattttgattctgaaaagaaagctggctttgcccatttcttattaaaaaaacttgttgtaaatccagttgtctaatgggatctatatgaagttagctatgtctgtatgcccttctcccacaaaatactgtataactagtgtgcttgtagtagttaactccaccatctttgtaagctaatgaaattgtgagtcacccatttatatcttttaatcatgtcagttcttgaatgggtatctccttagcctgctgatttctttttctttctaaagaaagtgggtggagaaattaatttagacgtttgtttgcaataaaaagaattcatttt

SEQ ID NO: 533 - DNA, 2806 bp, Cricetulus griseus
ctgacccggggccggcgcggcttccgccctccgcggggcgcgggcggcctgcctttgcgcccgagcccgcgcccgcgccccggggctaccagccgggcacacgacgatggggaacacaacctcgtgctgcgtgtcgtccagccccaagctccggaggaatgcgcactcgcggctggagtcctaccggcccgacacggacctcagccgcgaggacacgggctgcaacctgcagcacatcagcgacagggaaaacatcgacgatttgaatatggaattcaatccttcagaccatcctcgggccagcacaatattcctcagcaaatctcagacagatgtgagagaaaaacgcaagagtctcttcattaaccatcatcttccaggccagacatcaaggaagtacagctcctgctccaccatcttcctagatgacagcacagtcagtcagccaaacctcaagtacaccatcaaatgtgtagctcttgcgatatattaccacatcaaaaacagggacccagatggaaggatgctcttagatatttttgatgaaaacctccaccctctttcgaaatccgaagtgccaccagattatgacaaacacaacccagaacagaaacagatttaccggttcgttcggacactgttcagtgctgctcagctgacagctgaatgtgccattgtcaccctggtataccttgaaaggctcttgacgtatgcagagattgacatctgtccagccaactggaagcgcattgttctgggagcaatcctgctggcctctaaggtgtgggatgaccaggctgtgtggaatgtagattactgccagatcctgaaagacatcacagtggaggacatgaatgagctggagcgacagttcctagaattgctacagttcaatatcaatgttccttccagcgtatatgccaagtattattttgatctccgttctctggcagaggcaaacaacctgagttttcccctggagcccttaagcagggagcgtgcccacaagcttgaggctatctctcgtctctgtgaggacaagtacaaggacctgagaaaacccacgaggaagcgttcagcaagtgctgacaacctgattctgccacggtggtccccagccatcatctcctaactggggcaccctcctgaggccatgccatccctcagtttctccttttgtttgagaaaagatgaacttgggtgggtttgtttggtttgtttttctcttttccttctgtttttaacacctagccccatcaaggctgccttcacgcccgcctccatgctgcgttctgtacgcagagaggctttaagggacgtgaaatcagtgttctggaaacccagtatcaagccttcttggccattgtgaacagcacttctttcatggaggaaaaagactctaatcctggaggaggaaatgaaggaaagggaagttgtgttaaagcagagagtacttgatactgtttctgggtccctgtctggttatagataccagttggagccagaggtaggtagcagagttgaatgcccatccaagtcgggagatgcacactgtgcccttggaatgggtatgctctataagaaagacttcctgcattccttctcgctgctttcctgggactggggaggggagttgtttgttcatttttattctggtttggttttgatcccacagagcagagaatatagtttgtacccaccatggcacagacatccaaataaatagtactgattagtttaactaaagggaaaaaatgttactatttcctgaggtatttttcacagaatgattgaataaaaaaaataacaactcaacttgcattttcattgtgggtgcttggagaagctacacaaactgtgaaggctcatgcttccttaattataaccaacttttgtgttttctgactgtttctgatttgctttgggctacatcagaatcttttgttgaataaaataaaagggttaaaagaccctgtcaatgagaaaacctgaagtctaataatccaagacattcatgcacaagtgctttgcttctgctcatcttcttaggttgcagtgaccgaggtttgtgtagtttttccttgtttgagagcaggaagtgaaaaattaactacccttcaattacacctctgataatttgttctgagtgggaaacaaagtcagcttctcgcttcaagaaccttaaacagaggtcgaaaagtgtagaaatgccatttcgtattctctcatctctataactctaaaaagaagcctatttttcttagccaaatatgaatacctcttagatgaattccttcctctcatgtataataccttattttaccagcccatttcaggaaagaagtgctgacttgatagcagaaatcttatttttattccttttatttgaatgggagatttggaaattgacttatgtaaatatttcaatgcacctgatactattttgtggagtttattaaactactttaaaagattgtacagtctatttattgtatgtgggtacacacagtctgatatctgacatcaacagtgactccttacagcctggctcagttttattcagactgttggctattgtgttcaagccttgtgcactggactctacctctgaataggaaacttttccctacgcatcaatgagtgttaatctgtattaattagttgtgtttcttgcactgaggatttcagttgtaccttttggcttgagtcactaggcatgtagaccgagacccatttcattttcctatacaatgataaagacttactttttgttctctggttgtcctaagtttgccaaaagaaaaag

SEQ ID NO: 534 - DNA, 2804 bp, Cricetulus griseus
aagagggtgcacttggttgccattttgctttcaatatgacagctgtcaatgtcgctctaattcgagataccaagtggctgactttagaagtttgtagagaacttcagagaggaacttgctctcgagctgatgcagagtgcaggtttgcccatccgccaagagtttgccatgtggaaaatggccgtgtggtggcctgttttgattctctaaagggtcggtgtactcgagagaactgcaagtacctacaccctccaccccacttaaagtcgcagctggaaattaatgggaagaacaatctgattcaacagaagactgccgcagtcatgttcgcccagcagatgcagcttatgttccaaaatgctcagatgtcatcccttgcatcttttcctatgaatccatcacttgcagctaatcctggcatggctttcaatccctacatgccccatcctgggatgggcctggttcctgctgaacttctaccgaatgctccagttatgttttctggaaacccacctgttgcattgccaggagttcctgccccaaaaccagctcgttctgatagactggaggtttgccgtgaatttcagcgtggaaattgtacccgtggggagaatgattgtcgctatgctcaccctacggatgtttctatgattgaagtgtctgataatagtgtgacaatctgcatggattacattaaaggccgatgctcccgggagaaatgcaagtactttcatcctcctccacacctgcaagccaaactgaaggcagctcatcaccagatgaaccattccgctgctgctgcaatggctctgcagcctggtgcacttcagctgataccaaagaggtcagcacttgataagaacaatggtgccaccccagtctttaatcccaatgttttccactgccaacaagctctggctaacatgcagattccgcagccagcatttatccctacagtgcccatgatgcacggtgctacaccttccactgtgtctgcagcagcaacacctgccaccagcgttcccttcgttccaacaactacaggcaatcagttgaaattctgagcagcagagttacagagtacccaaatctctcaagaagaaacttgttatggcctttttatacatattcccgtatgtcctcttctaccaacacaactataagcatggtgcagtcaatatattaaagcacatacaacagtcaaaaaattcaaatttaaaataaatgaacttccacagtgtactgtaggcttactgtacattcttggtggattaattctgtttttgaagtgttaccttactgtttgtttacaggatagtgtgttggattgatgtagaatgtaacgaatatgtccagtaccattttaccccgttgatatattgtattaaattgggttctgtttagcttttccatgctagtgttttgttgtttatacgtggtgtttgatttcagttaaatgcattagtggggaaccagaggtatatgtgattgaaaaacatgacaggttcatgttaatatgcactctttaaaacatttctataagtttctgtttgtaggtcgagcagcagacacacacgacacacacacacacacacacacacacacacacacacacactcctgcatacaccacataatgggtaagcttcccagcaagccttagatgtaacccatagctcagggccagttggctagaaattactcttcttttttccttcagataaaattttgtgtggtgctgagaatatggctcagggctttgtgtgctgtgcaagtactctaacaatgtgtccattcagatataatattttaagtccagaactattgaccataaattagtagggataagccttgaagcatcacaaaagatagtcaatgaatttatagcatgtgtatgcttacagccacttggtcacatgctgaagcttaaacatagtgactgtatttaaagcagtaaaacaagatggagaattaactataacaaatgcatatgactaaagccaaaagatgacatcaattggtattaacttatgacagtcataatttatagcccctctatctgcccctggctataagtgaattaccaacattaaaaatctggtttattccagaggaattttatgtttattacagaaccctgttactttttaaaaaatacctctgtagcaagacctaaaagaattaagcaagctttttatcccaaacacaaccttgagactatctgtcatagaactacatggttccaaagctttatttctgtacacagatgttatctgttaatgacagaaaccaaactgtttgttgctgtgtctgtgtctagcagttgagtgaatgatatgaccatccatttcattagattctgggaataaccttttcaaaataagttccttttattattatagctattgctttagttataaaatgagccatttgctcccaaattacaataattgaaatgaagtccattttttaaaaggtgaggtctcactcactatagtgtgtaaactagtccaaattccatgacttaaatggattgattcttcctaagaaaattcttagcactgtgcaacaattaagcacttaagcaataaccaaaatattttacaaataaaaactgttcacataatattttgtccccaaatgcagtaattcattccctcaactgcaaatgtttggactttttcaagttacagtgttgtattccctgtttgtgtttagaagtgtgcattatgtagctcattttagtattctactttttatgttttttttttattcttttaataaagttttcaaattccttggtta

SEQ ID NO: 535 - DNA, 2803 bp, Cricetulus griseus
tacatgagcgaaaacaagctgaagctgatggaagacatggatacagtaatcaagcctcgtcctcaggtggcaaaacaagaaaaaaccaacggccaaagtctatccacagagatcatattgaatccccaaaacaccaaccaaggccctccagtctctagcctctctttggcatcgctgaacacaggtgacaatgagagtcttcactcaggcaagaggacaccaaggtcggagtctgtagaaggcttcttatctccaagtcgctgtggcagtcgaaacggtgagaaagactgggaaaacgcatcaacgacttcttcagtggcttctgggacagaatacacaggaccaaagctctacaaggaaccgagtgccaaatccaataagcacataatccagaatgcgctagctcactgctgtttggctgggaaagtaaatgaaggtcagaaggaaaaaatactagaggaaaatggagaagtcagatgccaacgatgattgagggactttacaagtacaattctgacaggaaacagtttagccacatacctgctaaaactttatctgctagtgtggatgcaattaccattcatagccacttatggcaaaccaaaagaccagttacacccaaaaaactcttacctactaaagcgtaggaggcgggaaatgcttgcttcagaacctttgtggtaaatttgtacttcatctttcctgcctatagaaaacctttctaattgccaacaagatttttatccattaaaactggaccttaactctgttgttgtgaacaactggaatgtacacagtgtttggagtgcagaagattctcctaggtgataaggccaagtgatgaagggaatgctttgattcacaaacagaggtttgtatgtgaccaggctcgcctgcctggcattagagaccttgaagcactgactcctcgtggacacagtgggacataggcttgaactagtgttatgttttacaatagccctctatgttttaatggtattacagcatttgcaagaatcatcctaagtatttaccttctctatttattattcacacaagtattaacatttctgtttaataaggaggtgtaaagagctgctcctgggttccctgcagaccacacaagctttacccagagtatcttgtaagaagctgctgattaaatcagtgccgttttttaccacttctggccaacttcagaataatttagattgtacttttaacaacaacaacaacaaaaacactttctatttcttttaaagtacgtcactttataagctggcagaagtgagtaacacttgagtgttgcctttcagtatgaaaatgtaaggcttcctgggcagttctcgggaggcctttatatttataactgatatagaaattatatttagaatttttaaacatgtacaaagggctacattttgatttgaaagtagctttatgttattttagttttactgggttttccttcttttttagccccttttcagtgggacagcgtaggttaggacacacatggaagcccctctatactgtctttgttctttagcaagtataccagggttaaggttagttggggaaaaacttcattctcaggaaaagacttgaatgattttgtgaccctgttgtgtttcagtgttgtgacaactgtgtacactcggggggagagacatattgtttataactgagagagtagtttgttttctttcatgggatatggagatgaaactatgtacatttctctaattgagttgtttagagagagaactcatgtctcatgtaatgtatttacttatttaaaaagaaggacggaatgggatgtccctgagctgtactttattataaggcctctaggtatcagtgcatctgggttttcaacattttctcaaatgctgtcaatattttactgtaatttatgttcttatatttatgtatatttgttaaaactgtaaaaaaaaattttcacggattttttccaaaacctgtgcaaaatgtatgtgtagctgaaaactatttgtgatctgctgcttgcatgtaagagaccaggctatgtaactctcatattttaaatgtatacatattatgtatatatgagtattaaaaatggggaatttcacattttacctttcagacaccaatttttatcacaattagaaggaaagggtcaaacaaatatccttaggctaagactagtttaaaaaattatgaacaaaactaatcaaaacaaagtgaataatagacaaaggaatttaataagcattttatattactaaacatggtctttttccctatcaaagcagtcttcttgctgtcatctgaatattgaataaagaaaaataggctgcaagacaatggaagaactaatgaacactaaccacacctgtctctcttcttaaattatatccagcgactgaactgaatgtctagtgtctaaaggtagggtgtgactatcgccacgaagctcattgctctcagtatattttactttattaatgcaagaggaatacagatatatttctttagtctgcagatttttttattatggtgcagctttttaaattatgttttaaaattatacaaatgaaaatataccattccataaagtttggagatttccatcagtcttactgaaacacaagtgttgtcattgttggaggtcaaatcaccatgataattattcagtttaaattgccaaatccttgtcatggtaagcagtgtggcctgtcaactcctgctattcaacacaacttctgaagtttttaattcctctcagtttcttggttttggttttggaggactgttg

SEQ ID NO: 536 - DNA, 2803 bp, Cricetulus griseus
  modified_base (271)..(271): a, c, t, g, unknown or other
ggaccagctgcaggaaaagttggtggccttggagacaggcatccagaaggagagggacaaggaggcagacgctctggagactgagacaaagctctttgaggacctggagttccagcagctggagcgggagagtcgcgtggaggaggagcgggagctggccggccaggggctgctacgaagcaaggctgagcgtgcgtgcgcagcgtgaccaagaggaaggagcgcctggctgtactggacagtcaggctgggcagatccgggcccaaaacngtacaggagtcagagcgtctggcccgggacaagaatgccgccctgcagctactgaggtttaccgctccaagatggatggtgaggccaccagccctctgccccgggcccgtagtggccctctcccttcctcctcaggctcctcatcatcctcgtcacagctcagcgtggctaccctgggtcgtagtccatcaccaaagagtgccctgctagcccagaatggcaccagcagccttcctcgtaacctggcggccacgttgcaggacattgagaccaagcgccagctggccctacagcagaagggacaccaggtgattgaggagcagcggcggcgactggctgagttgaagcaaaaagcagcagcagaggcccagtgccagtgggatgccttgcatggtgcagcaccctttgcagcaggcccctctggcttccctgcactcatgcaccattccatcctgcaccacctgccagctggcagggagcgtggcgaggagggcgagcatgcttatgacaccctgagcctggagagctcagatagcatggagaccagcatctctacagggggcaactcagcatgttcccctgacaacatgtccagtgccagtggtctggacatgggcaagattgaggagatggagaagctgctaaaggaagctcatgcagagaagagccggctcatggagtccagggagcgggagatggaactacggaggcaggccctggaggaggagcggcggaggcgggagcaggtggaaaggagactgcagagtgagagcgcccggaggcagcagctggtggagaaggaagtcaaacttcgggagaaacagttttcccaggcacgacctctcacacgctatctgcccaaccggaaggaggactttgacttaaagacccacatagagtcgtcaggccatggggtggacacctgcctacatgtggtgcttagcagcaaggtctgccgtggctacttgatcaagatgggtggcaagattaagtcatggaagaagcgctggtttgtctttgatcggctcaagcgcaccctttcctattatgtggacaaacatgaaacaaagctgaagggggtcatctacttccaggccatcgaggaagtgtactatgaccatctgcgcagtgcagccaagagtccgaatccagccctcaccttctgcgtgaagacccatgaccggctgtactacatggtggccccgtctgcagaggccatgcgcatctggatggatgtcattgtcacaggagctgagggctacactcagttcatgaactaactaccacgcacctcctgggtacaggtcagcaccaggacctatgccctgccactcactgctcggcttgtccttggagacggcagcaccctgggcactgggccacaaaggatcaggatgtagtcgagtacccccagggcttttgtgcaagaagacaaattgttctatgaagagttaggtgcttgagggttgggcttgggtccctaaaggaccagcagagaggagagggagagactttgttgcctcttgggagcccagaagttcagggttcccctcctgggtgtagcaggccggaaaaggtgtcgcagagctgggctctcaattctgtcctggcacctgctagccccagcttgttttctcttttgtaaaggacaaattatggtaccagaatctgccaaagatccccttctcatcttaccccctgtgcaggggaggggggttactgagcagagccatgtataaagttggggaacagctcaggtctatacttcccaacccgctctgcctcctcattctcccacctccaaactttccactactttgctcaaggaccagagacctcaagtgtcatccttgaggtccagccctatcctcctgttataaacccatcaccatggtctccatggtgactgcttcatcaccatggttacacactaattgccatggccactctgtggctcagcccactgcttcggctgtgggccaagttaaggtacgtgccatcatctctccaacccaggcctgggggcctgtcacctagcaggaggatgcaccacctccctggggcagtgtgtctccagcccccagtccagccctctcccttccactgtgccttgcttcgagccagaagggacggtgttcgggtgtccaagtccagagatgccacagcagcactgaagggagaggaagctaagattctgtcctcctgtcctgacaggactggatcccaataaagaaggagggtagctcagggcacccagaaggaaccctgagctgtgggtggggagggtgaagccgaggccctgagctgtggcgccctccctgcagtttcccaagggtgatagggagagagtggaggatcgggtctccagctggctggcttcagcctttgcgccttaacactaagccacctttcctgccctccccagcacgggaccctgggttgctgggcctggctgggtgttttgcagtatttgtaaacacttcagcagaacaataatgaaagcattttgactatgtaaaaaaaaaaaaaaaa

SEQ ID NO: 537 - DNA, 2802 bp, Cricetulus griseus
  modified_base (825)..(825): a, c, t, g, unknown or other
  modified_base (1611)..(1611): a, c, t, g, unknown or other
gtgctggacgagaacaagaacactgccctgcacttggcttgtagcaagggccacgagaaatgtgccctcatgatcctggcagaaacccaagaccttggccttatcaatgctactaacagtgcactgcagatgccactccacattgctgcccggaacggcctagcttctgtggtgcaggccctgctgagtcgtggggccacagtgctggctgttgatgaagaaggtcacaccccagcactggcctgtgctcccaacaaagatgtggcagactgcctggccttgatcctttccaccatgaagcctttcccacccaaggacgccgtcagccctttcagcttcagcctgctcaagaactgcggcattgcagccgccaagacggtgggtggctgtggcgccctgccgcacggggcctcctgtccctacagccaggagcggcatggtgccattgggttagatggctgctactctgagtagccccctccagtgtccctctccctgccggtggcttgatatcttattctatttatttagaaaaaaagtctaaacatttagggcactttaaaggagaacacgactgggggtggggcagaggtggggagggtagcactggggagcagctgctcacccctttgccacactgtcctggcctggcagaggtctggggcccgcagggagcaccccaggctcttggtaccccccagggcaaccccttctgccaagtgtcccaaaatgattgctaaatgcctggctcccccctctttgactccatctctgtttcccctgtttgctgccagctcccctaatcttccctctgactctccggtntccccctcctttgcccctgcctgcccaggccagaccccctcctcctcttccatcccatcactcgcctccccgcttggccctgcactgatagattcctggaatgtacctgagaagccaaaactgggttggagtgaggaggggcagtgttctctttaaatgtagcattgcatctggccctggtcccttcagacgccctgtccacccatctccttggtgagcctctgcacagttggactcagtcccaaaacccagtgtcccttcctcacacgcaatacctcagccagggccaagacacagaacttgaatagaggtcctgccctctctaccccacagtgcaccctcgcccagtttggctgccatcagtattgccccctgagaactgagaactggatgggcttcgtttacacagtacaggggtccctcccagggatccctccacctccttcccctacccaagctcgctctactctcattacccgtttttcagttgtgtcccttgaatgtctcgccacccttgcccagggtgagctgaggggagaagggctgtcccagggagccttttcctccccacagataccctgcaccatacctcacgctggttcccagaagcctggggtgtttgactttcctttctgtggtcctgtttatctctgtgtctttctgcccctacccctcagatcctaaaccatttcaaagcttccacatgaccattatttggtgagaaggattgtgcagtcttttagtttttattttgttttcaaagccaaaggccttgcagtgcccctnttgcccgcaacccttcatcgccctctccttccctatacgacaatcaatgtctggttctgcatagcttgctccctaacttcagttctctctcctaaaatcttcccatttcaccccctccctctcatcttggtgctgggaattaggtggtggggggcatggggagcagggaaatggttgccccagggatgacttggggtatcagtcgtgttctcctttatcaatgcttgaccgtgacagaggaatccgactcagcgtttgtcgggggtggggcccattgtttttttttgctagatgagatttctggtggttgtctgttccctgttgtcctggggcacattgtcagcagtgctgggaatattgacagggaagccctctgtccctcctcatgtggctatgaggaggcctggagggcgagcagcctccactccttatgccaaaggaaatcccgcaccccacccctgggctccccagctccccagcccctagtgttttttgaagcattttgaccattctcatggccactgcatatttatttttaaatgttttaaagattttttttttgcttcaagtaataagcacttttgtgaaaaggcctatttcaagttaggaccctggggacagccctaggtcccagcaaaggagacagagcgagggctacataggagacagggaaacagacatgggaatcagaggacgacatgagaagagccagtttttagtttctgattttagggggtgtttctgattgggcggtggctattgtagggttgtgtaccatccttcagaaaaacaaatggcacaaactgtgggtcccaggatggaccaacagacccaggtcactgccactgtccaactgagactctaagactggtgggccacctcccccaccccgtggccccctgagccataggactgctgctaaaaccactgaatgtacagcccaggttggggtggggagtagcccctgggggagggggcttctccttttgttggtgctggtggggggtgggagacatgagactgagggactggcccaccccatgtagacatgtgttccttggggtggaggggctgaggagggccgcctccctctctaaccccagccatggcccctcttccttcctcacccctatccgttttgactgtaagtccagctcacctttgccttcaatatgtaaccaaaggaaaact

SEQ ID NO: 538 - DNA, 2801 bp, Cricetulus griseus
gaagaaatagaatgtgcagttttaaatgatggtgatgcactgaccattcaggaaaacagcagaatcagcagggtcaatgaactgaattctttgaaggatgtgtctttgggtagaagctttgaggataaaggcgttactgatggagaacatcaggtctatgtttcagaagtgcatgtagtaactgacagaggtttcagtgttgacaaacaagaccttcaaacacagcaaaagaatgaatttttaaattcaagaattcagtctgagacgtggagtttggtagactcaactgaaaattcagaagccattaggagggaccagtgtaaaagtgaggaaaatgatttatttgcttctaaatgtgctgacctatgcatggattctattaaaacttctgatgttaatgaagttgattcttccaaagaaggaaatagaaagtttactaattccaaaaacccaaaccttgattccacagaagaaaatgttttggatgattcggctgcaagcataaaaaatggtgacagtggtaacgactttgtgacttgccatgataccaatgaggatgattttggtgactttggtacagccagtggcaccactccaccttttgttactagtactcaagattcaatgagtgatgtcacttttgaagagtcctcggagcattttctacattttagtgaaccaggtgatgattttggagaatttgaggatacaaatgctgtttcttgccaagaggaaatgatatttactgaatccaacctaaaacagacctctgatagtttatcagaggaagatcagttggcaggaaagtctgctggaaaagacagtgaacctgactcaaaactggaaaatggtcaagacagtgaatttggagattttgattctgtgccaaatactcaagacagcggtagtgctttccaagactcagatgattttgcagactttagttcagcaggtcctactcaagctgtagattggaatgcttttgaggatgaacagaaagatggttgttcttgggctgcctttggagatcagcaggctactgaatcccatcatcgaaaagaagtctggcagtcacataggacagatgaaaatattgatactctgggaacccctaagatgcacagtgtctctttagcaacttccaaaggaacagttgctggtggccatttgcaggattcaggcacttcagttcagacagctttactcaaccggttggagagaattttcgaagcctgttttccttctgtacttgtcccggatgctgatgaggaagttacttccctgaagcacttgctggaaatcaacacctcaccgataaaaacaagagaggccttagctgaaagcggtgaactgctggatgtatggacggaactgcaggatattcatgatgcacatggcttgagataccagtggggtggctcccatagcaacaagaagcttttgtgtgctttgggaatagacactcgaaacattctgtttactggcaataagaagcaacctgttatagtgcccatgtatgcagcagggttgggtatgttagagcctaccaaggaaccattgaagccactatctgctgcagaaaaaattgcttctattggccagacaaccatcatgacaccagaaatgaatacatgtacatctgatccattccaggagtctctcccacccgtccagtttgactggagtagcagtggccttactaaccctttagatggtgtggatccagagttgtatgaattaacaactgctaagctggagacctccacctcaagcctcaaagtgactgacgcttttgcgaagctcatgtctacagtggagaagacaagcacttcgaccaggaaaccaaaaagagaggaacacctaagtgaagaagcagtgaaggtgatcgccagccttcctgacttaaccttcatgcatgccaaggtgttgatgttcccagccacactgacgccttccacaagctcccaggacagtttcaaatactttccctttcctccatcccttcctaccatcaaaacatatctgctgtaatttaaaaataaataaatacagtcaagttcagctgatttgtcggtaagccacactagaaaggtatacatagtaatgtatatttatttacatactgaagtcctaaatttatattagaaaaaatgtaaataattggggatgaacatttttgaagatttattcttttgtgttgctggggtgtatacatttatgtctttgtgaaatatactggtggtgtccttctatcacaaaagctcaaatccctgtctgattttcagttttatatgtgatggtttgtgtcaggcctggcttttgttaacttttctgggctctgtgtttagtcttttcaatctggcatattgctgtgtgaccttttgcagaggtcatcgatgctctctggttgtggggtgtggatcactgtcagaatttgattggaggcttgaacgagattgtgcctgtttttaattagtgtgatttggagaaggaccaaatgacatgtcttaaaatgaaatttgttagaaatctttctgttctatcataccattattttttgaggattttgcacagtgtaaaaatgacataatcatagattgctatggtttaggctgtatatacagttaaaaaaaaaaaactaatgggttttaaatgtttggggaaattcctatggaaaaaagagagacatgtagaagagcctctaacaaggttaatgtgcatgcccaagggttttaagatttcagtgtgtaaatttccttttagcttacacaataataaaataattaaaagaaaaaaaaaaa

SEQ ID NO: 539 - DNA, 2800 bp, Cricetulus griseus
gctgtgcgtggtgcgtggggccctatggccctgagtggcaggacgaaccccttaccctttccagtgcaccatcgacgaccccaccaagcagaccaagttcaagggcatgaagagctacatctcttacaagctggtgcccacgcacacccaggtgcccgtgcacaggcgctataagcactttgactggctgtacgcgcgcctggccgagaagttcccggtcatctcggtgccccacctacctgagaagcaggccaccgggcgcttcgaggaggacttcatctccaagcgcaggaagggtttgatctggtggatgaatcacatggccagccacccggtgctggcacagtgtgatgtcttccagcattttctgacctgccccagcagcacggacgagaaggcctggaaacagggaagaagctcttcacaaatacgacagcgtctagtggctggacataggactgcgcacttgttttcagtccaaggctaatttctatagcagaataaaaactgctttcaaagagctattgccaactataggtggtggtacaaggatggttttgtgttcaactgaaccccagctggctatataattatgtaggaaagaaacagttaatatggttatgtagcagaaacagtaccacactttgtaactaaattatactatgtatgcctacactaccattgtaacttttggataatgattatactatttgccttattgctttttgaagtatgggtatattagtgtatactttgtagacctcaaaacccatgaagagtctcaaagaagctggctggataaaagcctgctgtggatgcctttttattctcatagatcgagattatctaaattcaacctattctctgtttacaaactccaactagagcagctatgcgacttcgtgcctttagactggttgttttcatttctgtcccactgctgtttaagcccccaacttttctgatggaaagagtgaaaggccagtgcattggtgacaaactgatgaaaacctcgtatttcgtggggccggtgggagaatcagtggccaccatcactttgcacgggaagcatcatcgcctggtgagatgctggcaattacagagtagggtaaaaggtaggtgcaccatattcccttcacaccggtcgtagcatggcctctcaactcaagggtccgcagactgggcgtgaggatttcagcagatgcccttaggggagaaggaggaatccgatcagttggggataaagtgtagaaacagtgagtgacagacaacacacttgctctttagttcttgggagggcttccttctgttccttttttttttagtcttttttagcttgaaattttctttaatgttcagcttttggttttgtttttaaatggatctacactgttaactgaatgagactccactgtgattcactcgtttacgtaatcaaaaaatttcagggatgtctgtaaatttcagtgttctactcaatgagaagtgttggttgatttaaggagggaccagaaataatttcttctattccagtactgaagacaaaaaaatactgatttatactgtgtttttaaaaactaaatattgataaagctcccctcagaacatttaaccttaaaaattattttaaatatagccttttattgttataagggaactacaaatgactataaataccaaataaaagattcaaaagcagcttcatttaaaaagcacaatgagattctggcttgaaatgcctaaatctcaatgtttttttgtagttgctgagctaaataatgtgattcttgagtttacagatgcaaaagctgtcactgaaggttgaaacacctgtatctactgtccctgtgaactacacttacgctaccccagaagctctggtactgagggtgagccagggttacatgaaagggtcagcttgacagaaaggtcaaaaagcaaaaggctactgggatagttactcaacagcacatttactctctatgaagtaatcacatatgggttggattttctaagaatggattaatgatcattttgatgttcttatacttcagaacttagagccggacttggcatcatgtggcattgtctttactacagacacgtgggactgtcagcaaaagccaagttctcttaaaaagcaacttcctcttgttgattgcaaagtacagttaaataaagaaagcccatatatatttaaaatttaattttattgcagaagtttggaggttataatgatagcatttaatttaagtttgagttggtatggaataagcaagctctctgcttttcaaatgatttgaaagtcacatttatttgcctttttgttttgatggtggtttgattttttttaagtaaaattactaaacttgtgcaatagtagcaaggaaattacctgaggtgtcttgtatgattgtgctttagccagggtggacatagcttaaattataaaaactaagattaaagtacaaagaagtgtaagttcatgctgcctccttccttcctaaccacatagcataatgccactgattcatgggactttaaatgaattctgtgggtgaaagcaccagagttactagtgtccattttcatccaagacccttcttctctaacgttcttggtcctgttgaaacatttcagtatctacaaatactgcaatgttactacccaagagaaaagccattgtgtgtatgctggtcaccatgatcagtgtggtaccatttcctttttttgtcgttgtttgttttgttgtttttgtttttaaataaactatcacaccctccaaaaaaaaaaaaaaaaa

SEQ ID NO: 540 - DNA, 2799 bp, Cricetulus griseus
atgggtttttgctgaagatcaagctggggcactatgccacacagctccagaacacatacgaccgctgccccatggagctggttcgctgcatccggcacattctgtacaatgaacagaggctggtccgggaagccaacaacgggagctctccagctggaggtctggctgatgccatgtcccagaagcaccttcagatcaaccagacatttgaggagctgcgtctgatcacgcaggacacggagaacgagctgaagaagctgcagcagacccaagagtacttcatcatccagtatcaggagagcctgcggatccaagctcagtttgcccagctggcccagctgaaccccaggagcgcatgagccggagacagccctccagcagaagcaagtgtccctggaggcctggctgcagcgatcacagacatcatctccagccctggtcaccagcacattcatcatcgagaagcaacctcctccaggtcctgaagacccagaccaagttcgcagccaccgtgcgcctgctggtgggtgggaaggctgaacgtgcatatgaacccccctcaggtgaaggcgaccatcatcagtgagcagcaggccaagtccctgctcaagaacgagaacacccgcaatgattacagcggcgagatcctgaacaactgttgtgtcatggagtatcaccaagccacaggcaccctcagcgcccacttcagaaacatagtccctaaaacgaatcaagaggtctgatcgccgtggtgcagagtcggtgaccgaagagaagttcacaatcctgtttgactcacagttcagcgtgggtggaaatgagctggtctttcaagtcaagaccttgtcgctcccagtggtggtgattgttcatggcagccaggacaacaatgcgacagccaccgtcctctgggacaatgcctttgcagagcctggcagggtgccattcgctatgcctgacaaggtgttgtggccgcagctgtgtgaggctctcaacatgaaattcaaggcagaagtgcagagcaaccggggcctgaccaaggagaacctagtgttcctggcacagaaactgttcaacagcagcagcagtcacctcgaggactacaacagcatgtcggtgtcctggtcccagttcaaccgggagaacttgccaggacgaaattacactttctggcagtggtttgacggtgtgatggaagtgttaaaaaagcatctcaagcctcactggaacgatggggccatcttgggtttcgtgaacaagcaacaggcccatgacctactcattaacaagccagatgggaccttcctgctgagattcagcgattccgaaatcggaggcatcaccattgcttggaagtttgactctcaggaaagaatgttttggaatctgatgccttttaccactagagacttctccatccggtcctggctgaccgcttggggacttgaattacctcatatatgtgtttcccgatcggccaaaggatgaagtatattctaagtactacacaccagtcccatgcgagcctgccactgcaaaagccgctgatggatacgtgaagccgcagatcaagcaagcttgttgataatggctttctgcaaatgtccaatggtgttttgtctctaaaccagctctttttatgttttcccatttgcaccctaatttgatgtcaaatttctctcttcctgcatcaggtctgggtcctctgtacccaggtcacctcttttcccttcagtgtcacaaagtgtcctgaggaatagctggtaggaattgtgacctgcacctggggccagcctgccaagcgagcagccactactatggggtgctgggtgccgttgggagttggggaaatgcagtcagtcagcaggtttgctaggaactttggtagactgcagaagcaaaaaaaaagcctcagtgcaattttcttccagtctctgcagtgtcaccagagggaaggaaggggctgctgtgggcaggcagggagaggggcaagcagagagcggttaccactcaggcctgcaaagccctctttggcttcctctccaaacaagggcagagccacacccaggagaggagggccccaaaaccttatttttatacatgcaagtaaataaacatatttttttacaaaaataacttctgaatttatcagtgttttactgttaaaggaacatactcctgtgtcgtaaattatttattggaagatgactttttaaaagctgctgcttgccttggctgggttttgtacactgattttttctatgcctggtggtagcctctctgcctcgggtgctcgctggatggaggaggtgtgaggcccctccctaaccccctcaggagaaagctagaactgcttgaggaatccaggcttaagggactctttacccacctgtcatgtggcctgtttgtcccagtaaccctcacaagggtgtggacttgacacacttctcgatttattgtggacatggccccagggcatggggatagcagagcggcctggcacacctggaaggttccaagcttcctctcaagttggattggagcagaaggtaccaaacagcaaaggcttccacacagttgtgtgggggcttttgtaggggtggaaggagattcaacgtggctagctcttacaatgaaaatattcttttataatttttctttttaacatgttatttcagatacatattttagtgtcgaggcagattagtatatagccaccaaaaagtattgtgtataaattggggcagccagaaaattgtgtattttatgttacaataaaggcgtcttctgaagggacaa

SEQ ID NO: 541 - DNA, 2795 bp, Cricetulus griseus
cacgtcaggggctacggcataatgcatcatctcagagtataagcaaacgacccatgcagcagatgcaacccaccgctcccagaaacagtaatctgcgtgagctccccatagcaccttcacacgtgttggaaatgagtggtaatcgctgttcctccacacctgcagctcaggtgaagcctattgtcaacacttccccaccctgcagggctgtggtggcttctaggagctcacagggaaaaactgatgcaaaagtcaagccgcttagccctggggctcaacctaaggaagaagcaaaagcagaaccagagttccctgatgaagacgaagagacaaggttatatcgcttaaagatagaggagcagaagcgcctgagagaagaaatcctgaagcagaaggagttacgcaggcagcagcaggctggtgccagaaagaaggagttactaaagaattctcaaccaggcttaactggagtggtctcagaaagccctcacaggctctggtaaaacataggtaaaaattcgggtgattatgattgacaggcacttgccctgggaagccagggtgtgagatgggtggctgggaatggtgccatggaagtggcaattctgcttcttgtaaatacctctgaagtgctgcctgtttcagcagaaactcccaggtgggcagagtgctagctaagcaagcacagggaactctgtggccagtggctcagtcaccctgcaggcagccctcttggcctagttttcctggcacaggttgaggcacagcttgaagggtggtcagacctactcgggcctctgctttttaaatgccctagctctgtggtgtgtgctgtcattgctttgattacctcactgcccttgagggctttgagtttcctttgggtaacccttgtatcacttgtgtgagggatggatttctcagcagggctgttgctctccaagataagtgtgtctgcccacattagtcatgttggtcaattccagcaggtgagactcactttgtacaaagcatcccatggaagtccatactgtgcagacattgaacacagtgccttattatgtttccccatgagcacgtcagcgttcgggacgcactctagagtgggcaatgacactaggacacactcaggactttttagttgtgtcttacacctgtcattttatcttacttacataccttaataggattgaggaagataggagtctgttgtcacttactgtcgctggataatgaggagataggatgtcttagaagaccttgtggctatggtgccacttgtgagcacaaagcctctgccttaccgctggcaggctgctctgagggccagccctgcggtgcctttaccaagcttggccccagcccatcccagtgctatcagctggtcgtcccactgcacccccactcatttctcttagacacaggggttgttgatagatatttcactaaattggtgagtttggcaatatgtcagctctagttggatgagatagaggccatgtaggaacttgaagattaggactcagtaaaaggagtttaacaagtttgcttctttctcaagtagtttttgagtgttgggcctttaaaacccaaatctgcatttttgtctgaaaagtaggcactgatgcattgaagtcacttaaggaaacatcctcatcaacagcactgttcacctcaggccttaggaccgctttgagtgtgatgaggtacccaggagcatgtgtgtcccagatctgctgcaaccattatctctgttctttctttatcatgcatttcaaatgaggagaaaaagcattagcatactgtgtaaatacggaccttttaagattaaaacgttattggaaatgctttcaactcaaaacagcaacaccttagctatttgttagttctttttttgttgtcttatcaaagtttaatggagacactttcataattgttgttgtgtgtacattcgattttcataaagatggtagtaagtcaatcctggctggggctctggctccctccttaccttctgctttttcccctcgtgttcccacctgaggcgttgtcactgtccccctcccagtgattgtcatgcttgcacgctccctgctccccttccatggtttccacacctgcagtggtcactgatactcacttgagtcaggctccctctggcagaaggggacattgtggatgtctgcaccagggccacatctccagtttctctaacccttttgcctcgacaggtctttccttgggatttgctcctccagaacctgaattggagagcctgaccttttgcttgttattttgcagtgtgactctgggcctaaagatgccagtgcctctcagctgtggtctgcatgtcattaaccacccctctctgtttttacccctctacctttgcaggacccagggcgtgggtcagttagtggtagcgtgctctcattcgcttggaagtggtggccatgtggccattatactgcccttgctgatatggccctcgtcgtcgtgtaatgtgtgtgcgcctccctgctgtgcgggcagcttggagtgcgggatatgttgctggaagtgcgctggctgcttagaaaccacgagacaccgccttgctttcttcggcctcactgtttctgccggtcacgtgctcttcccgtatgagtgacactgccgtgctttactcccggttttccttggcattaaccacttgggaactcttgcaggctgtatatgtagaaaaatagtagtgacataggtagaaaaagaaaatgtattgtgtgtatcatttgtgtggtttcatagacaaaaaa

SEQ ID NO: 542 - DNA, 2794 bp, Cricetulus griseus
caaccgcaaccagcgcaaagactcggagggctattctgagtctccagacctggagtttgagtatgctgacacagacaagtgggctgcagagcttgcagagctttacagctatacagaaggaccagaattcctgatgaatcggaaatgctttgaggaggacttccggatccatgtgacagacaagaagtggacagagctggataccaaccaacaccgtacccatgccatgaggcttctggatggcttggaagtcactgcccagactgttcaccaggattgtgagggtgacaaggcagagtggagaacaatgagacagaccttcagagctgaactgggctcccctctgtacaacaatgagccatttgccatcatgctatttgggatggtgaccaaattttgcagtggccatgccccccacttccctatgaagaaacgttctcttgctgctctggaagactgtattgtgcacactgggtggctttgaggagctgcagagcatgaaggctgagaagcgtactctccttggccttcctccactgcctgaggatagcatcaaggtgatccgcaatatgagggctgccctccccaccagcttctgcctcagacctgattgagcagcagcagaaaacggggccgacggggaacacaaggccttgataaaagcaggacaatttagatgccttcaatgagcggggacccctataagactgatgactctcgagaagaggaagaggagaatgacgatgacaacagcctggagggggagacatttccccttgagcgagacgaggtgatgcctcccccactacagcaccctcagactgacaggcttacctgcccaaaagggctcccttgggctcccaaggtcagagagaaagacattgagatgttccttgaatctagccgcagcaagttcataggctacactctaggcagtgacaccaacacagtggtggggctgccaaggccaatccacgaaagcatcaagacactgaaacagcacaagtatacatcaattgcagaggtccaggcacagatggaggaggagttccttcgctctcctctctcagggggagaagaagaagttgaacaagttcctgcagaaaccctctaccaaggcttgctccccagcctgcctcagtatatgattgccctcctgaagatcctactggctgcagctcccacatcaaaagccaaaacagactcaatcaacatcctggcagatgttctgcctgaggagatgcccaccacagtgttgcagagcatgaagctgggggtggatgtgaaccgccacaaggaggtcatcgttaaggccatttctgctgtgctgctgctgctgctcaagcactttaagttgaaccacatctaccagtttgaatacatggctcagcacctggtctttgccaactgcattcctttgatcctgaagttcttcaatcaaaatatcatgtcctacatcactgccaagaacagcatttctgtcctggattaccctcactgcgtggtaaatgagcttccagagttaactgcagagagtctggaagctggtgacaacaaccagttttgctggaggaacctcttttcttgcattaatcttcttcggatcttgaacaaactaacaaaatggaaacactcaaggaccatgatgctggtggtgttcaagtcggcacccatcctgaagcgggccctgaaggtgaagcaagccatgatgcagctctatgtgctaaagctgctcaaagtgcagaccaaatacttggggcgacagtggcgcaagagcaacatgaagacaatgtctgccatctaccagaaggtgcgacatcggctgaacgacgactgggcatacggcaatgatctggatgcccggccttgggacttccaggcagaggaatgcgccctccgtgccaacatcgaacgcttcaatgcccggcgctatgacaggacccacagcaaccctgacttcttgccagtggacaattgcctgcagagtgtcctaggccagcgtgtagatctacctgaggacttccagatgaactatgacctgtggctagaaagggaagtcttctctaaacccatttcctgggaagagttgctgcagtgaggagcactgaaacagactgttatctcatcataccgagggactgtcctcatcattgctgcagtgctcttgttgccctccaggtggcagcacagctccattgagtcctccacagccagccctgggcctgtgagtaaatctaggttggcctctggttgattcctagcatcctactcaggagcagtcatctccaagctgggatctactcttcctccgctcccccagtttctgccctcccctcttggataggattgactgcaactcatttcacagttagccccaggctgggaaaagccgagatgggccttgcatcccttctcatcaacagctgcatctcaaggtcccattgactcctgagcacctttggcattgcagttggtcaaggaggaggggttagtgtgagggccaagaatagagagttggcaccttggttgtgttctgggggtatcgatgccattccagcatcctgctgtgttttgtccagaagtgttagataccacagattctgtaccctggttttggatgtgataaaagagcaaggcttcccaaagccagaggtgccagtttcctcttgattgccatgacctgtaaatatataaaactctatgtgttctcttgtgtcatggtggggtttttaatgtgtttgtgtattctgtttacattaaaagaaagcaaaaaactaaaaaaaaaaaaaaaaaa

SEQ ID NO: 543 - DNA, 2791 bp, Cricetulus griseus
tgtgtctgtggagaggagaatattctggttcaagagtttgtaaaatttggatccctggatacatacctgaaaaaaaacaaaaattctataaatatactatggaaacttggagtggctaaacagttggcatgggccatgcattttctagaagaaaaatcccttattcatgggaatgtgtgtgccaaaaatatcctgcttatcagagaagaagacaggaaaacagggaatccaccttttcatcaaaacttagtgatcctggcattagcatcacagtgctaccgaaggacattcttcaggagagaataccatgggtaccacctgaatgcattgaaaatcctaaaaaatctaaaatctggcaacagacaaatggagttttggcaccactctgtgggaaatctgcagtggaggagacaagcccctgaatgctctggactctcaaagaaagctgcagttttatgaagataagcatcagcttcctgcacctaagtggacagaattagcaaaccttattaacaattgcatggattatgaaccagatttcaggcctgcctttagagccattatccgtgaacttaacagcctgtttaccccagactatgaactactaacagaaaatgacatgctgccaaactatgagaataggtgccctaggattttctggtgcttttgaagacagagaccctacacagtttgaagagagacacttgaaatttctacagcaacttggcaagggtaattttgggagtgtggagatgtgccgatatgaccctctacaggacaacactggggaggtggtggctgttaaaaagctccagcacagcactgaagagcatctcagagactttgaaagggaaattgaaatcctgaaatccttgcagcatgacaacattgtaaagtacaagggagtgtgctacagtgctggtcgacgcaacctaagattaattatggaatatttgccatatggaagtttacgagactatctccaaaaacataaagaacggatagatcacaaaaaacttctgcagtacacatctcagatatgcaagggcatggagtatcttggtacaaaaaggtatatccacagggatctggcaacaagaaacatactggtagaaaatgagaacagagttaaaataggagattttggattaaccaaagtcttgccacaggacaaagaatactacaaagtaaaagaaccaggtgaaagtcccatattctggtatgctccagaatccctgacagagagcaagttttctgttgcctcggatgtgtggagctttggcgtagttctgtatgagcttttcacatacattgagaagagtaaaagtccaccagtggaatttatgcgaatgattggcaatgataaacaaggacagatgattgtgttccatttgatagagcttctgaagaataatggaagattaccgagaccagaggggtgcccggatgagatttacatgatcatgacagaatgctggaacaacaatgtcaatcagcgaccctctttcagggacctagcacttcgggtggatcaaatccgggacagtttggctgcgtgaatgagatggcctttactcagagaccaagtagacttccagaatcagagcaaagctctgtagccacattgtcatggacccttatccacacatccttataatgctagccagaagaaagtgtgaggctgtctgctcagaactttggaaattttgtggattcttttccatgcaccatctgtaaaagacacagctaaaaagtcttgcaagatgcttgtgaagagctgcgtgagctcactgtgcagtcattgcatctcctcctccggcaaaagaagaaaatagacattttcaactcagcattttgaaaaaatgaaacacttataatgtaaattttgcagtgttagagacacacagaatgtacttgtacagtttttaccatgtggagtgtacaatactttggcatcttgtgtgatttacacgagggctggtgtttattaatgttttctaatttttccatagttgatctatagtaacttcatgatacaaattaaaatgctcagaaaattgaataaataccttttctttgttgctcttctatgctgctgtgtcagggcttatagttccatatcactgtaaatatttttcaaagcaaaggaacaaaagtctagttttatttgtataggaaatctccctaaccctaaagaattttgaaatggaacaatcttacaaagacatagcacaatctattttcttatttgttttccttgtgtctgtttatggtaaatgtgtttttatgtagaactgtctccaactttttctatgactatagtgaatagtattcttttatattttttgagattaaaaatgccagaaatactttcctctcttaaactgttaactgccaacaagacattgaaattcctaaaacctgtcattatatattaaattgaagcataagccataaataatttgtaaaatgtacaaactctttatgatgcataatgggtgagaatatggccaaagactgtgtgagggttttccatgcttgctattcagtggtaggagaaatgtcccttcatcaaagtctcccacgtggataggaaggaagggagaagtcagggagcaggtgcttgctcattctgttcaagaacgccagaaaatttgtaatgtacatctttacaagaggagagaccatacatattttcaaagtatgagtaattgttatctactttagtgctgctccattttagacaatgtcatgtcaaaaataaaaagattttgtgtgttatttataacaa

SEQ ID NO: 544 - DNA, 2789 bp, Cricetulus griseus
cgacaagatggcagcaagaattcatccagcagttcaacaaccaggccttctcagtgggacagcgggtgttcctccggagattgtggagcagatgggttgtaaacatgttaaaggcatcctgttgtacggcccccctggttgtggtaagactctcttggctcgacagattggcaagatgctgaatgcgagagaacccaaggtggtcaatgggccagaaatccttaacaaatatgtgggagaatcggaggcgaacattcgtaaactttttgctgatgccgaagaggagcaaaggaggcttggtgctaacagtggcttacacatcatcatctttgatgaaatcgatgccatctgcaagcagagagggagcatggctggcagcaccggagttcacgacaccgttgtcaaccagctgctgtccaagattgatggcgttgagcagctgaacaacatcctggttattgggatgaccaatagaccagatttgatagatgaggctctccttcgacctggaagactggaagttaaaatggagataggcttgccagatgagaagggtcgactgcagatccttcatatccacacagcaaggatgagaggacatcagttactgtctgcagatgtggacattaaggggaaggtctggtgcgagcagcacagtcgacggccatgaaccgacacataaaggccagtacgaaagtggaagtagacatggagaaagcagagagtctgcaggtgacaagaggagacttcctggcttctttggagaatgacatcaaaccagcttttggcacaaaccaagaggattatgccagttacattatgaatggaatcatcaagtggggtgaccctgtgacccgtgtcctggatgacggagagctgctggtccagcagactaaaaacagtgaccgtacgcctctggttagcgtccttctggaagggccccctcacagcgggaagactgccctagctgcaaagatcgcagaggaatccaactttcccttcatcaagatctgctcccccgataagatgattggcttttctgagacagccaagtgtcaggccatgaagaagatctttgatgatgcttacaaatctcaactcagttgtgtggtggtggatgacatcgaaaggctacttgattatgtccccattggcccccggttctccaacctggtgttgcaagctcttcttgtgttactaaagaaggcacctcctcagggccgcaagcttctcatcatcgggaccaccagccgcaaagatgtccttcaggaaatggagatgctgaatgccttcagcaccaccatccacgtgcccaacattgccacaggagagcagctgctggaagctttggagcttctgggcaacttcaaagataaggaacgcaccacaattgctcagcaagtcaaagggaagaaggtctggataggaatcaagaagttactaatgttgattgagatgtccctgcagatggaccctgagtatcgggtgaggaaattcttggccctcttgagagaagaaggcgctagccccctggactttgattgaaaatggattgtttacagcagtgaccaagggaagtgaccaaggtgaagatggcctgggatcgtcactcatcgtcctcaagacaccagactaagtgaaacattcaccgccctccccacacttgctcagcatgactagcgcagtgaactccctcgtgtttttgagacatcctagtgtttcccggaattatctttgcctagagaagcaggctttgaatatccaagatgctgttctcaatcatattcagagatatttccaagttgcaatcaggagagctttcctaatcggaagtccgatcattcctgtggtggctgtgatatgccctgagtgtaattagtttgctctgtggtaagagatatgctaatcattaccacttggtagatgctgttaaaaccttatgaaagatacatatggaaagctgtacatccctaaacagaaaaaatattaaaataatttacaagcctctcagctctaattagtgtccaactctaagtgggtcagctccttgggatgacgtcagaggcttattagtgccatattcttccttttcctcagctgaatggcttataatttactctcctctatctcaagtgatctgtaatgtctaaagcacataagtaaaacactattatccagcaaaacaagccacctcctagtcctctccctcaggccttgaatatccattccagtgtactcagttcttccaaaacaggaggggctcacccagccctttggagggtgatttgtctaatcagtgggttagaagaaatttaattagttcgtcattctcggtgatgagtcttagggagcatgcccctctccccgctgctgctgaaaatacaaagacagtgatcagaagtcagccaggaggcttgatgccgcaggggcacctaggtatgatcctgacactgtccccacagtagaaggcaaatcatctcctaatttgctgtctgtatactttgttttgggttctcatccctggcttattttgtggctttaagagtgaattgtgttgtgaaactgtgatgcctgtggccagtactgtggtccctgtccatcaccatggtccctgttgtctgtggtcctgactttctcctcccaacaaagccgtatatggactaacttatgtttcttgttcaatgaagttaatgtcttgtgtttttgcccaaaactatattgaaaaagataaatattatattgtgtaatgcaaattgaaggaatgcaataaagagtaaatatacttgaaa

SEQ ID NO: 545 - DNA, 2787 bp, Cricetulus griseus
gaaaagaaaacaccattgaactcaaaaggagagaaacagactcctaaaaaaaccaaaaagttactccagttaaaaaagaagtctgtaagtccagaagattctgaaaagaagcgtactaattatcaagcttatcgaagctacttaaatcgtgaaggtcccaaagctctgggctccaaagaaatacccaagggagctgaaaattgcttggaaggactgacatttgtgatcacaggcgtgctggagtccattgaacgggagaagccaagtctctaattgaacgttatgggggcaaagtaacaggaaatgtgagcaagaaaaccaactatctcgttatggggccgggatagcggacagtccaagagtgacaagggcaacagaacagcagtgggaacaaagtggaaagcctgctctgggtggataagtacaagcccacatcactcaagaacataatcggacagcaaggtgaccagagctgtgccaacaaactgctacgctggctcagaaactggcataagagttctcccgaagagaaaaaacatgcagcgagatttggcaaacattccagcaaagacgatggttccagtttcaaggcagcactgctgtctggccctccaggtgttggcaaaacaactacagcttctcttgtgtgtcaggaattgggctacagttatgtggaactaaatgcaagtgatactcggagtaagaacagtttgaaaacaattgttgctgaatcattggacaacacaagcatcaaaggcttttatacaagaagagcaactccttcattattgttttgtatcttcgtttccaaagacctcgggttgaacagattaagagtgcaatgttgtctattgcatttaagaggcttaaagatcccccctccagccatgaatgagataattttgggagctaatcaagatgtcagacaggttttacataatatgagtatgtggtgtgcaacaaagtaaggcactcacttatgaccaagccaaggctgattctcagagggccaagaaggatatcagactgggcccatttgatgttgcccggaaagtgtttgcagctggagaggagactgcacacatgtcactgatggacaaatcggatctctttttccatgactattcgataggccccctctttgtccaggagaactacctccatgtaaagcccatggctgcagggggcgacatgaaaaagcacttgatgcttttaagccgggcggcagacagcatatgtgatggtgacttagtggacagtcagatccggagcaagcaaaactggagtcttttgcccacacaggccatttatgccagtgttcttcctggagagttgatgaggggctatatgactcagtttcctaccttcccaagctggctggggaagcactcatctacaggcaaacatgatcggattgttcaggacttagccttgcacatgagtcttagaacttactccagcaaaaggacggtgaacatggattacctgtcacacatcagagatgcacttgtgctacccttggcctcacaaggggtagaaggaattcagcatgttgtcacacttatggacacgtactatttgatgagagaagactttgagaatatcatggaagttagcagctggggtggcaagcccagtcccttttcaaggctggatcccaaggtgaaagcagccttcacaagagcttataataaggaggtccacctgaccccatactcacttcaggcagtaaagacactgagactcagcacaggcccagcactggattctgaataccatgaagagtcacaggaagacgacagtcagcctgatgagaaagaacaggatgcaatagagactgacgccatgatcaagaaaaagacaagatcttcaaagccttcaaaaccagaaaaagataaggagtccaaaaagggaaaacgaacaagttggaagaaatgaaaccattgttgagtactaatagctgcttttcacttaccctcttgactagtccagctggtctagggaatgaaaaccttgccctttgccagagtaaccatgtgtagcaccatggggtggcctggtggtcccattataaaggacggtacagccagacagtctaactagccagctctcatgcacctcttatagaggtgggtaggactgctccagccctgcactgtccctgccaactgaattagattgctggtattcagaatgactgtggaaccaaaactaggagtccacaggctttggagtcagattttagttaaccatagcaagtctgggcacagtggaactgaggcatcttttgtagcttaagttcatcctgatgaccgttagaagactagtgctgtattttttttttttaaacatagtagttcttattttatggtgaaattctgtaaataaaccttaatacaaagcagccaccacctggagctgagtgttcttggtccactgtcagggatcttgcagagtatgcatcaggaatcagatgtccatgtagtgcagggatcacaggttgagaccagtagagtctaggatgagtcagattctcaggctcattttggctgggagatgctgtcctgtgatagagttcatagtcctactggaatttcagattgtgtctagaactgtgcttgttgaaggaccctgagccatgaacataacctggcctttaggtggttagctctttacaacagtgagcgctcagaggtctatgctgcctctgtgaggtatatgaccaaaaagaagaagaggatcatgttctgcctttgaggcctcatggccttgttgggagaggagaca

SEQ ID NO: 546 - DNA, 2787 bp, Cricetulus griseus
gcctgtgcgccgcgctgcacagagattcccacgtgtctctaagaagtggatggattgcttcggattggagctgtcaactgtggtgatgatcggatgctttgtcggatgaaaggagtcaacagctaccccagcctcttcatctttaggtctggaatggctgcagtgaaatacaatggagatcgatcaaaggagagcttggtgagcttcgccatgcagcatgtccagagcatggtgacagagctgtcaacaggaaattttgttaacgccatagaaactgcttttgctgctggtatcggctggctgatcacattttgttctaaaggagaagattgtttgacttcacagacacgactcaggcttagtggcatgttggatggtcttgttaacgtgggatgggtggactgtgatacccaggacagcctctgcaagagtttggatgtcacagcaagttccactgcttattttcctcccggagccactttgagtagcagagaaaaatccagtgttttgtttcttaattcattggatgctaaggaaatatacatggaaatcattcataatcttccggactttgaactgctttcagcaaatatattagaggatcgtttggcacatcatcgatggcttgtatttttaatttcggaaaaagtgagaatgtaaatgatcctgaattgaaaaaactgaaaactctgcttaaaaatgaacatattcaagttggaaggtttgactgctcttctgcaccagacatctgttctgatctctatgttttccagccctgtctagcagtgtttaaaggacaaggaaccaaagagtatgaaattcatcatggaaagaagattctatacgatatacttgcttttgccaaagaaagtgttaattcccatgttaccacacttggacctcaaaacttcccggcaaatgacaaagaaccatggcttgttgacttctttgccccgtggtgcccgccatgccgagctcttttgccagagttacggaaagcatcaacgttgctctatggccagctcaaagttggcacattggactgcacggttcatgaaggactctgcaacatgtataacattcaagcttatccaacaacagtggtattcaaccagtccagtatacatgagtatgaaggacaccactctgcagaacaaatcctggagttcatagaggatctcagaaacccttcagtggtctctcttacacccaccactttcaatgaactagttaaacagagaaagcatgacgaagtctggatggttgatttctattctccgtggtgtcatccctgtcaggtcttaatgccagaatggaaacgaatggcccggacattaactggactgatcaatgtaggcagtgtggactgccaacagtatcattctttttgtacccaagaaaatgttcaaagatatccggagataagattttatccccaaaagtcaaataaagcttatcagtatcatagttacaatggctggaatagggatgcttattctctgagaagctggggtctcggatttttaccccaagcgtccatagatttaacgcctcagactttcaacgacaaagttttagaagggaagactcactgggtggttgatttctatgctccttggtgtggaccttgccaaaattttgctccagagtttgaactcttggctaggatgatcaaaggaaaagtgaaagctgggaaagtggactgccaggcttacccccagacatgccagaaagctggcatcaaagcctacccaagtgttaaattttaccgctatgaaagaacaaagaaaagtatttgggaagagcaaataaattccagagatgcaaaaactattgctgccttaatttatggaaaattggaaactctccaaagccaaggaaagagaaataaggatgagctctgatgatattgaagaaaagatactgtaataaaaaggaatctggaaaatgacatcagaagatccgttttccaaacattaagatgctcttgaggaaacagatgcacgtgacctcggccttgcagttgtcctgtgcagactgagcacctgtgtgatgctgccttctgtagacacttccttttgagagcctggcattgccatctgagcctggaggccacatatggttccttgttgttgttaatccttttagaaatacagatgccattcttagctcagggccatacagaaatactccctaggccaagtccagtccagggactagtttgctgactaccagaactgatgtttggacacctggctctacatgtgggtctgttagcctcatactgtacaaagtggatttgggtttttgtaattttatgatggacctgaaagaaagtgacttggttttcagtcaccccttctaaaaactctgcctctgaccatatattttattttgactactttcacaatatggcaaaataaaaatgcacccatttttcatactctatactagtatatatacagaggtttgctttcataagtatattcctactgatggttttgtttgttttgtttcaaatgtcttcctaatatttacacatttgccttctgggttctctgttttgaacattcagtaaagtattgccataacacctgaagttgtttttactaaaatcaagcacatgatggactcttcccatttgtcaattgtttggactcaaagggtcacagggtttctcctgcaactcaaaaagcagagtgacctacagtttgattctctcatagtgtgtgagatggtcaaaggacaccagtgaataaagacaaatgatttttctaaaattctttt

SEQ ID NO: 547 - DNA, 2787 bp, Cricetulus griseus
cttgttgagaaatcaggtgtcaccttggatggaaagaaggtcttggtggtaggggctcgtgggcccttggaacctgccctgcaattccttttccagagaaaaggttccatgacaatgagttccccatgggcaacacctcagctccaaggcaagcttcgaagaggcagacattgttgtgttaggctctcctaagccagaagagatcccagcttcgtggatcccaccaggagccactgtcctcaattgcttccatgatatcttgtcagggaagctgagaggtggctctcctggggtccccgtgaacggactcatttcagaagagaatgtgagtctccttgctgcagctctgcggatacagaacatgatcagcagcggcaggagatggctccgagagcagcagcacagaggaggtggcgacttcactgcttgaaactgcaacccctctccccggtacccagtgatattgagatttcaaagaagacagactccaaaagctgtggatgtccttgccaaggagataggattgcttgcagatgaaattgaaatctatggcaagaccaaagccaaaagtccgtttgtccctgctggagaggttaaaggatcaaaaagatggaaaatacgtcttggttgctgggatcacgcccaccccacttggagaagggaagagtacagtcaccatcggactggtacaggcactgacagcccacctgaacgtcaactcctttgcctgtctgaggcaaccttcccagggacccactttcggagtgaaaggaggagctgcaggtggtggatatgcccaggtcatccccatggaggagttcaaccttcacctgactggggacatccacgccatcactgctgctaataacttgctggctgcagccatcgacacaagaattttacatgagagtactcaaacagacaaggcactgtacgaatcgggctggttcccttggtgaatggagtgagagaattttcagaaattcaaactctctcggctgaaaaaactgggaataaataagactgatccaagcacactgacagaggaggaagtgaggaagttcagccgcctcaacattgacccctctacaatcacatggcagagagtgttggataccaatgaccgatttctgagaaaaataactatcgggcagggaagcactgagaaaggaaattcccggcaggcacagtttgacatcgcagtggccagtgagatcatggcagtgctggctttgactgatagcctcgccgacatgaaggagaggctaggaaggatggtggtggccagtgacaaagatgggcagcctgtgacagctgaggacttgggggtgacaggtgctttgacagttttgatgaaagatgccatcaaaccaaatctgatgcagaccctggaagggacacctgtgtttgtgcatgccggcccctttgctaacattgctcacggcaactcgtcggtgttggcggataaagttgcactgaagctggtcggagaagaagggtttgtggtgactgaagctggctttggggctgatattgggatggagaaattcttcaacatcaaatgccgagcttccggcctggtgcccaacgtggttgtgctggtggccactgttcgagctctgaagatgcatggaggtgggccaagtgtaactgctggagtccctctcaagaaagaatatacagaggagaacattcagttggtggctgatggctgctgtaacctccaaaaacaaattcagattgctcagctcttcggggtgcccgttgtggtggcactgaacgtcttcaagactgacacccgtgcggagatcgacttggtttgtgagctcgctaagcgggccggtgcctttgatgcagtcccctgctatcactggtcagttgggggaaaagggtctgtggacttggctcgggctgtgagagaagctgcaaacaaaagaagccgtttccagttcctgtacgatgtccagcttccaattgtggaaaagataagaaccattgcccaggctgtctatggagccaaggatatcgagctgtctcctgaggcacaatccaaaattgatcgctatacgcaacagggttttggaaatttgcccatttgcatggcaaagacccacctttctctgtctcacgaacctgataaaaagggggtgccaagggatttcattctgcctatcagtgatgtccgggccagcattggtgcagggttcatttaccctttggtgggaacgatgagcacaatgccaggactgcccactcgtccctgcttttacgatatcgaccttgacacagaaacagagcaagttaaaggcttgttctaacggaacaacaccccacaggcttcaaacaacaacaaagtctccttgccttcttgctgcagttggagaaggaaagtgaattttgaaatctgcttgttatgcaatgctggagaaattgtgagacaggccaaagacctcttcctcgtgtgagatgaattctgttcccagccaagtgcaaggacctgagacacaactggaagaagcaaagttactctcggttcctatagagtttacaccgtttctgctgcttatactttggagtgtttattttacggggactggggaattacaagagtgtgaactaaaagctaacgttttcctctatagagtctcctctttctttttttttattcttccttttctcccctgtgttggatgggatgtcaggcctcagtttgcacaggtcagcattctactgctaagccgtatctttattttgtcttaactgaaaataaacacgtttctagaaaac

SEQ ID NO: 548 - DNA, 2786 bp, Cricetulus griseus
ccggaggcgggtgccggccgggccgggtcccgctgcgagcccgaggccccgggcagcgcgctgagtgtggacctggcgggtctgctggggcagctggcgcgcagcttcgcgctgctgctgccggtgtacgccctgggctacctggggctgagcttcagctgggtgctgctggcgctcgggctcctcgcctggtgtcgccggagccgcggcctcaaggccagccgcttgtgccgcgcgctggagctcctggaggatggaggagcgagccgtgcgcctcggggtgcgcgcctgcgacctgcccgcctgggtgatcctggagccctgattggagacatgcctctatgggggcactgtccatcttcttccttaggtaaaccacttttagagattaactggacaggactgactaatctcctggacatccctggactgaatggcttatctgacactatcatcttggatataatatcaaactatctggtgcttcctaatcgcatcactgtccctcttgtcagtgaagttcaaatagcacagttgcggtttcccataccaaagggtgtgctacggatccatttcatcgaagctcaggatcttcaggggaaagacacctaccttaaaggccttgtcaagggaaagtcagacccctacggaatcatccgggtgggcaaccagatcttccagagtaagattatcaaggagaacctgagtccaaaatggaacgaggtgtatgaggctttggtctatgagcaccctggacaagaactggagattgaactctttgatgaagatccagacaaggatgacttcttaggaagtcttatgattgatcttattgaagttgagaaggagcgccttttagatgaatggttcactctggacgaggtgcccaaaggaaagctgcatctgaagttagagtggctcacgctgatgccagacgcggcaaacttggacaaggtgctggcagacatcagagctgataaagatcaagctattgatggtctttcatccgcactgctcatcttgtatttggattctgcaaggaaccttccgtcagggaagaaaatgaacagcaacccaaaccctcttgtccagatgtcagtcggccacaaggctcaagagagtaagattcgatacaaaactagtgagccagtgtgggaggaaaacttcactttcttcattcacaaccccaagcgccaggacctggaagttgaggtcaaagatgagcagcatcagtgttctctggggagcctgaggatcccactcagccaactgcttatgagtgacaacatgaccataaaccagcggttccatctcagcaactcgggtccaaacagcactttaaaaatgaagattgccctccggggtcctccatcttgagaagcaggaaaggcctccagactaccagcactcagcccaagtgaaaacggccgtctgtctccaaagaaagggcggaaaatgccggtcaagtctcagccgtccatgtctccaggcaccagtggcagcaacactgctccatcaacaccaggcatgggagaagataagcctgtcagggaggagaagcccccagcccccagaggccagccctctaggacatcgtgacctaggcaggagctcttccagcctcttggcctctccaagccacgtctcagccaaggaacccaccccaagcattgcctcagacatatcactgcccattgccacccaggaactgaggcaaaggctgcgccaactcgaaaatgggaccaccctgggacagtctcccttggggcagatccagctgaccatccggcacagctcccagaggaacaagctcattgtggtcgtgcactcatgcagaaacctcattgccttctcagaagatggctctgatccgtatgtccgcatgtacttattgccagacaagaggaggtcagggagaaggaaaacacacgtggcaaagaaaacactaaaccccgtgtttgatcagagcttcgatttcagtgtgtcgctgcctgaggtgcaaaggagaacgctggacgtagctgtgaagaacagtggtggcttcctgtccaaagataaagggcttcttggcaaagtgctggttgctctggcatctgaagaactcgccaagggctggacacagtggtatgacctcacagaggatggaacaaggccacaggtgatcacgtagccacgctggacataaggcctatttctcaacgtgtatcgaaccacctcaacatggaacacacttcttgcagatgtaccaatgctatttttataattttaagtattgagttatacataccttaataattttataaagctgttggcactgtaggaaaatttggccaacattattgttaaattcccccgttgagttcccaaacctcttgtgaggtgaggctatatcgcagtgttataagctatgcatgtctgtaaacaaagtatgcacaaatggtttttgcatagacgttttctatgtgtgcattttaacctacaggagaaaagggctttccgccatgagatcgtttaaaactatgtacacttacagcaggaaaatgcagctttgtaatcaaaattggagtagttcctttcacttgcttcctggaactaaaccacccatgggaagcttatctgactaaaccttccaaagtgcctatgatgaatacagagtgttctgtttctactctcctcccgtctgcagatgagagtgtgcctcagtttgtaatgtaccatgggtgcatttgtaacggagcctgtggctattaaaactagttgctccatcatgctattagatttttttt

SEQ ID NO: 549 - DNA, 2785 bp, Cricetulus griseus
caaaggttacacgttcctccaagttaacaaagtctacactgaagactgttcaggaaacaagtgctgagactgtaaacaccaaccacggtgatgacatggtttctgctagaacccgcacaagaaggcagcatgcccaaaacctgaatgtcacaccagaacaacaggagtcctcagcaattgctactcctaagaagaaaactagaaaagtaaaagaatttcctgggtcttctgacagtacccattttaaaataagcatagcatctgagacacagctaacccctcaaaattctctcactcctaggagaggaaggaagaaaagggaagttagccaagacacactaacaagcccaggcactgtgaagcaggagccgagccagccactgaggaaatgccttcaagaacagaagacaagctctcatctgttagaaaagggactcctagaaggtataagaaatctgtagaaaatgagcaaagtcctaacattgtaagagatctaaacatcagtacagcagcaagtcatagcgggaccaacaaaaagaggaggaatactaattcagaagattctcaaaatgtagaatataaacaggaggaacccagtgaccagcaacggcctcttaaacgaagaagagtcagagagagagaagttagtgtgtcgagtgtgatagaagagcctacacttgattcagcccagttgccaactcaaacagaattgaatgtgccggccacacctaggaaatgtggtagaccaaggaaagtagtgtcattagaagatggtggctccagggctgttgagggacagaaaagcccccagaagagagaagttttgagtgtccgaagatctactcgaaacaccccagctagaaatgtgagtactctagaaaaatccattttagtgccaaatgaggaagttgctaaagtgatgacctctaataaaaaacctacaaagaagtctgcaaacgaaagccaaaaaagtccattaccagcaatatcagacttcaaggctgaaacaacccacaaagagccagctaaccaggaggaaagattgcttgctgctgcagcttcgactaaatcttcctggagcacaaggactaggtctagaaagaccatgttgttgacggacttttcagaacccaaaactgagcctttattttctcctccttcagtgaaggctccaaagaaagcaaaagctgaaaaaatggaggccactgcccagctgaaagagttggtatcagatttatcatctcagtttgttgtttcccctcctgctttgagaaccaggaggaaaaatgtatccagcgcctccaagctactagatgaactggagagtgaccctaaaccactagaaatcatagaagaacagaaaacaagaagcaggactgtgaagacaaaagcaagcagaaacacaggaaaaggaagttcttggtcacctcctcctgtagaaattaagctgatttctcccttggcaagcccagttgatgcagtaaaggtcaacaaaccaagaaaaactacagaagcagcaggaaaaactcttggaagaggcaaaaagaagctgtcttcctttccaaagcaaattttacgcaggaaaatgctgtaatttttagcccaagattttaacatgtaccgtttgtaaagtcatcagtatttgtgtgaattattaaaagtcacctgatttgaaaggaaataatttatataaattgtacaattttgtaaacaagtaaataagtaaagtaactccatatggagtggggttcttctagttcaggcgttttataaaacttcatacgtttatataatatgtaaatatggcttattattaggatgttaaataaactactgtaaagtatacactgtgtctgtttaaattttttgaggggatttctgtcttagtcgtgattttatatgctactagacatttgtccattttctttctcattgatactagagtcagtcttacaatgagggtgggagactgattctttttaaagttgctgttttataatttatgcactttgagtgttactcagatttctaatcattacatgtactttccttggactttgcctgatagtgtgttgaatttggattgtgggcatgtgattgcctttttgtagttttacaaattttgtataatctacctcaaaagagtaattttccagtactgctttggttaactataatgctggcatttcttgttcagtaacttaaagactatcttgtctctcagttcagagactaattatccaggttagattgaccggttcactgcttcttagcaacctcatggaaggatttgagaaggagaatatggaggctatgaaattcatgaataaataagtgttgtcaaataatttatggcaggtaattgatagtgtgtaatgaatggacccttaataattgatacctagaaacagactacctttgtcagctaagctttggatgttttcgtgtgaagtgtagcagtgtgctttgttatttttctaccaaatagcattatggataatgagaaaatggggaaaatgcctgtgccgagcacggaccgtgtgacagtggcggtgcgggtacggcctttcagccaggtcagtccatgttcattgccttgttgacaattactgcctgattttattccttttttaataatagtttctgtaatttgtatttaagctgcttgtcatttatgaaatattaaacttatttaaatgaaattgtcaaatgaaataacaaagatactaaacataatttagtaaacaatttaatttcattccttggtacaagtagcacaataaaa

SEQ ID NO: 550 - DNA, 2780 bp, Cricetulus griseus
agtacaatgttgtgatcatcgtaatggcctgtcgagagtttgagatagggaaggaaaaagtgtgaacgctattggcctttgtatggagaagatcctataacatttgcaccatttagaatttcttgtgaaaatgagcaagcaagaacagactacttcattcgaacacttttacttgagtttcaaaatgagtctcgtcggctctatcagtttcattatgtgaactggccggaccatgatgttccttcatcatttgattctatcctggacatgataagcttaatgaggaaataccaggaacacgaagacgtgcctatttgtattcattgcagtgcaggctgtggaagaacaggtgctatttgtgccatagattatacatggaacttactaaaagctgggaaaattccagaggaatttaatgtatttaatttaatacaagaaatgaggacacaaaggcactcagcagtacaaacaaaggagcaatatgaacttgtccacagagctattgcccaactatttgaaaaacagctacaattgtatgaacttcacggagcacagaaaatcgctgatagtaatgaaattaccactggaaatatggtcagctccattgatagtgaaaagcaagattctcctcctccaaagccaccaaggactcggagttgccctgtagaaggggatgccaaggaagaaatactgcagccaccagaacctcacccggttcctcccatcttgacgccgtctcccccttcagccctttccaaccgttactactgtgtggcaggacagtgacaggtaccacccaaagccagtgttgcacatggtctcatcagaacagcattcaacagacctcaacagaaattacagtaaaccatcagatgttacagagaaaaatgaatcaactgttgaacacatagataaaaaattagagcgaaatttaagttttgagattaagaaagtccctctccaagaaggacccaaaagttttgatgggaacacactcttgaatagagcacatgcaattaaaattaaatctgcttcatcgtctgtggttgacaaaacctccaggccacaggagttaaatttaggtgatataaaagttgatgttcctcagaattcttgtgtggactgcggtgcggcacattcagacagagccccagattcttcagaagaatctccaaactcacacacactgtcacggccagaccgcttgcctcttgataagaaaggacacgtgacatggtcatttcatggacctgaaaatgctacccctgtatctgactcatctgaaggcaaatcaccagataaccattctcagcctgtaaaaactgtgagttcaacagcaagctctacaacagaagtggaggctcgtgagctcgtggatccccataacagctcccctgtgtcgggagcattgctcagctttaccaaccctcttcactctgatgattcagatgcagatgaaggggattcagatggtgctgtgaccaagagcaaaactagcatttcaacagcaagtgccactgtttctgctgccaggagtgccgaaagcgcttccactaggaaagtgttgccaatgtccattgctagacaggatttgggaggaacgctacattcgggtgctgaaaaagatgttgatgttagtgaagagtcacctcctcccctacctgaacgaactcctgaatctttcgtattagcaagtgagcacagtacacctgtgagatctgagtggagtgaacttgcatgtcaggagtggtctggacaaatagagtctgaagacttgataacctctggaaatgaaaaatatgatgcaggaggtatccacatagagacatgtacagactgtccacctactttcagtgacaagaaaaatcaagtaacagaaagtctaacagaagccacggatattggttttggcaatcgctgtggaaaacctaaaggaccaagagatccaccttcagaatggacatgattcagggagttaaaagacactttaaattatactggacaattcaagtgccactgaaagccagatttataggactccgtctttcaaatgtgggactgacagcagtgtagattgttaccttaataagattttgctggggccatctacctgccttatactacacttaggaaaaagtattacatactgtttattttgtaacttcaagtattattgccttaatgtctcttaaccctgttacaagctgcttgtagatctgttaatatagtaatacttttatgataaattgagttaaaggactactcttttgctgttttatcatgtatgcattattttgtatatgtacagggcaagtaggtatataatttgataaagttgaagttataaaatattattaacaagatgtaagaatttctgcatggtctaagtctttgtgtaccttatttgtaaattatttgccctgaagttttagaaaacagtttctgaattttaaaattgctgggttcatgcacccagcactgcaggttatcagagatcaaagattgtaacaataatgcattttgtaaattgtaagcaagaagttatttttatattattactgtctaattgttcgtcctgatggttcttgttttcatctagccacagagattcagtaagtgccttggaacaatattgaattctcttagcttgtgtgtgttactttaaaatttgaactcaattgggattagaagactatcagaatatatgtatgtttcagggtatttgacctgttattaaaaaaaaaaagttttacactgctaaaaaaaaaaaaaaaaaaaaa

SEQ ID NO: 551 - DNA, 2780 bp, Cricetulus griseus
  modified_base (454)..(454): a, c, t, g, unknown or other
ctcgatccaaggatgatcccggaaagggttcttactgggcaatagacaccaatccgaaggaagatacactgcctactcggtcaaagaagagggcacgatctgttgaacgggcctcaactccatatagcatagattcagattctttgggaatggagtgtattatttcgggaagtgcctctccaaccctggcaatcaacactgtgactaacaaagtaacattgtacaacactgatcaggatggtagtgatagccctagaagcagccttaacaacagtctatcagaccagagtttggcgtctgttaatttgaacagtgttggaagtgtccatagttacacaccggtaactaaccatccagaaccagtctctcatccagatgatatacaggatgactttgattgggattcaatagtgtaggctctttctgcaagacagcagactccagcatcctttcngtttagtgaaaggaaggattaaagtccagttgagagaacaaagcgatgttaccagtgctatctaaatttcattttgaagacaatcagagattctagctgggtaacttaactgcttttatctgacccaagcaagaactacatgtttgtctcccaccagtgccctctgtagctcctaattgttgtgatttagacagctttttgcatatttgtgtcagtttgatgttaaccacaagtgccagactgatttttcagacagagcctattttgctgcaagcagtttatagatacatatgtgtaaatatatgtacaaacattactgaaaggcttcaagtttttttctaattggactattgtgtcttgacaagaaagttactgccagtttttattccttgttaggccattttctgcaggatgctttcagacagtgtagggcgctaaaaggaactggtctttctaaagcccagttttctttgtttaatcttcagaaataggagtaatcatgaattccagtgagtaagtcaaagagctctggaatgtgtggactaattgaagctggatattgcttggctcttcaaacaaatcactgtctccatattcatttaagtatttattattcaaaagttattttaatatttattgctactttctgtgaatgcagttcttttgggttcactaaggagaaatttgtctgaaagcatggttatttttctggataaaagtttacagacaaagacaatcagaaatatttgtcattctctttatcactccttttaccaggtgagtatggttccttcttacttagccttcctgctgatggagacttaatagctatctaggcatttcctggaatttgaaccagagtctgtttaggcagcagggcacggaggcagggtttattcagcagtgtcctctctgtttgacttgctgttggctctgtgtatgccgacaaaggaactatcttggagcttttattcagttggtttgttctcatgtcatcacagtttggttgattgtgttgattttataatgaaagtaggagaaaggagattctctccttgcagtgaatagatttctaattggttctttatgggtggaagggaggaagaatctgttttaatgaggaaatagattctgtcaaatcaaggagaaatagctgctcaccagttgcttgttagtgtctgggcttagcagtgctaaatcatgttaactaagcctcagcaagtctgtggtttctgtgtgtgtgtgtgtgtgtgtgtgtgtgtgtgtgtcagaggattctcaaatagtagccaacaggcctctctcagaaggaccaggtgaaatgagatggctgtctgcagaggaaagcatgggaacattgggttcccagtagtttactcaagtctctgttttctggacatcaaacagctgctccatgactaggattgctactagcattgtgcactttaaatatttgggtgttggagtactgcagtctctgaaacagaatggcttgatgattttacaaattatgtgaagctaatttcccatttggctattattactgatttgcagtgattgacatatttattaatatttaaactgaccaagaatggcacttgagtccagactcatcactcttctgtggtccttgttccccagggttcagagcaggcccagtgggctgtggccaggcagtgccacctgatgggtgcagagtccctctagtggccatttctgttggtaattgatgatgcagagcaagttctcttgggtttaaattgaccagagattttggggtaaagactaataaacatacataaacagatggggtgctctgtccaggagaagagtccgactggcatttgtggcagtgtttgaaatgtaaatgtattcttgtgtgttcctgtaaatatttaatacatgtctctcagatgtcctttgaagtgggaggggatcgaccttgggataatttcaaatggaatagagtattttgatatgttcatcgagagggtgatgtgtacatacctatattgtatatatgtggtgacatgcattggcttttgtgcagaaacaacctgctctctgtgctgctgttggacagtcagtgttttaatgtttctacagttttcctattgcacgatttcatattctgccgatggtgagtggcacccattctttgtaaccgtttagtgctgtaaagaaatattccaagtgtcattaggattgtcgctgccagaactgatatgcatggatggcacttaaaataaatatattatgataactgtaaaaaaaaaaaaaaaaaaaaaaaaaaaaaaaaaaaaaaaaaaaaaaaaaaaaaaaaaaa

SEQ ID NO: 552 - DNA, 2780 bp, Cricetulus griseus
atgtcggattttgacagcaatccgtttgcggatccagatctcaataatccgttcaaggacccatctgttacacaggtgacaagaaatgtgccaccaggacttgatgaatataatcctttctcagattctagaacgcctccaccaggcagtgtgaaaatgcctaatgtacccaacactcagccagcaataatgaagccaacagaggaacatccagcttacccacagatcacaaaggaacatgccttggctcaagctgaacttctcaagcgccaagaagagctagagagaaaagctgcagagttagaccgccgagaacgggagatgcagagcctgagtcagcatgggagaaaaaataattggccacctcttcctagcaattttcctgtgggaccttgtttctatcaagatttttctgtagacattcctgtagaattccaaaagacagtaaagcttatgtactacttatggatgttccacgctgtaactctgtttctaaacatcttcggatgcctggcttggttttgtgttgatgcttcaagagcagtggactttggactgagtatcctgtggttcttgctttttaccccctgttcatttgtctgttggtacagaccgctatacggagctttcaggagtgacagttccttcaggttctttgtgttcttcttcgtgtatatttgtcagttcgccgtgcatgtgctccaggctgcagggtttcataactggggaaactgtggttggatttcatcccttactggcctcaataaaaacatcccagttggaatcatgatgataatgatcgcagcacttttcacagcatcagcagttatctcactcgtcatgtttaaaaaagtacatggactgtatcgcacaacaggtgctagctttgagaaggcccagcaagagtttgcaacaggagtgatgtccaacaaaactgtccagactgcagctgcaaatgcagcttcaactgcagcgaccagtgcggcgcagaatgccttcaagggtaaccagatatagagggcctcgcagcagtgcactgttacttttgactgtatttttttctccagttactgtattctacggatatttttatgttggaaacacacagtacacacagcatgggtatttcctattcacatgtgcatggtctaaaatcttaatatgtccatgcccctcacagaagaaaactaccatctgctaaataaatattctccatatttttgggggatggtgttcctcagattatttcagtggtgacacactgaaatgagtatgtgacaaaagatttaaaaagcactcgatactaaccacagcggttcttccaggagtcagtacagataagggttgtacattggaaatgaaactatatctgtttcttttctttctctgttaatattgcaggaacgaggacagaaagatttgggtgtttttagatcggcttgctttctaggaggctcagtcaccagtgaagagcctgtgtgctttgtagtagataatgtatattttaccttcttttattttatttttagactagttgatattttgataacaatctctgaccttgcatgggtaccatgtctcttaagtgaaacgaattagtattctgggttctgtactgcttatagtggtaggagctggggctctttatagaatcagaaatgattttctgtaatagtttcttttaagtaaaaatttactggagtataaagactttaatataaatgtgcagtgcattatccaaaagagaaggtagtgaattgatgtcaatagaatatagtgataattacctttttctccctcttaattttcagtattcatatagtaaaattttactgtatggaaactttggtatattcctctgactaatctttttaattgaactgggattgtatttggcagcttcgtgtgtgtgtgtgtgtgtgtgtgtgtgtgtgtgtgtgtgtgtgtgtgtgtgtgtgtgagagagagagagaattttggcacaggtattaaaggctagcctaacccttgaataaaaagaacacacagtatttaagggatttttcttttagcctctcacttttagttgcattaaaaataaaagcccctagcatttctaatatacttgatttcttaatgtacctgtcgtttactttttgagacagactaaatacatgtaaaacatcgaccaagcaagaaagtacaagtacagttaaatgtgttattaatataatcatattgacattgttcctatgcagcacaggccgatgtgggttcagacttttaatcattttttaataataattaaatgtctcaagaacatttgtaaatcagacttattttattttgaaagtcttactagttttagatggcagaatgataggttgtgatttattcaagttgattttaaacaaagaatggttgctgagacaggatagtcctctcagcagcagtctcagccatgaaatgagcttcatgtagaacaggcatccatgtcacttttcagttttcgatatcaaatagtggctattttatttaaatatagggtctgaacactggaaaataattgcttggtgatttgtgatttggggcttggtttatttctctagggatttttgtatattttgttggtgcataatattgcgctgcccttatggcaactgtcatggttctgtgtaaatgccctccatttgtccctctcatgttgcatgttttcagtggtttggaagttttgtatatttattgtattaatgcagagtgtcataaaataaaataatgtttactggaaaaaaaaaaaaaaa

SEQ ID NO: 553 - DNA, 2779 bp, Cricetulus griseus
  modified_base (23)..(23): a, c, t, g, unknown or other
  modified_base (41)..(41): a, c, t, g, unknown or other
  modified_base (57)..(57): a, c, t, g, unknown or other
gcgctggccccagacccagcatnacccacaactgcagcagnttctctggtgttctgnaaccctgagggcagtcctacagctatggagcagcctgtgttcctgatgaccaccgctgcccaagccatctccggcttctttgtgtggacagctctactcatcacctgccaccagatctacgcgcacctgcgctgctaccgctgccccaacgagcagcgccacatcgtgcgcatcctgttcatcgtgcccatctacgcctttgactcctggctcagcctcctcttctttaccaacgaccagtactacgtgtacttcggcaccatccgcgactgctacgaggcctttgtcatctataacttcgtcaagctgcatgtatggcacgtgctgcctctggggaaggacctactccatcgggttcctgcggttctgtaaacaggccaccctacagttctgtgtggtgaagccactcatggctgtcagcaccgttattctccaggccttcggcaagtaccgggacggggactttgatgtcaccagtgggtacctctatgtgactatcatctacaacatctccgtcagcctggccctttacgccctcttcctcttctacttcgccacccgggagctgctcagtccctacagccctgtcctcaagttcttcatggtcaagtccgtcatctttctctccttctggcaaggtatgctactggccatcttagagaaatgtggggccatccccaagatcaactcagcccgtgtgtcagtgggcgagggcactgtggctgctggctaccaggacttcatcatctgtgtcgagatgttcttcgcagccttggccctacggcatgccttcacctacaaggtctacgctgacaagaggctggatgctcaaggccgctgtgcccccatgaagagcatctccagcagcctcaaggagaccatgagcccacacgacattgtgcaggacgccatccacaacttctcccctgcctaccagcagtacacccagcagtctactctggagcctgggcctacctggcgtggtggcacccatagcctttcccggtcccacagccttagctgtgcccgggacaatgagaagactctgttgctcagctctgatgatgagttctgagtgtgggcactggtggggagggagaggtgcctcctccagcctccagccaggctggggagcagccagcacagtgttgctgttgcccctttatttattggaccagaaacactcacatatcacttccagaggaacaagcctcaggaatgtgtctacatggccaaaccttcactattgggcaagagcagaggacactggccgtagctgccacacctctgtgtgttggccagaagctgcatcctgagccctctccccaacaagacatctgccgaggctgtcgggcccagccgaccccacaccgtgcaatacccagacctgatctgatcttcccacctgcctgcccttcctgtcctatttttgtccaacgtgagctttgcctcattcctggcaggggggatgtgagtgctctgtggaccctccccttttcccaatctaggcctgcctagcatgctgcaaggggtcagggccagaccccaggggcctcagggcccacctaggaagggtgcctccatgcctatgtgcccttgggtgcacttccagaggaggctggggggatggttatgcagcgggcgtaaggtaggggtggtctcagacccttctgggttccctggccatgtagggcctggtgttctgctccctctgcccccctggcccatctcttctgtgccttagtcacatatgaaagcccctccccagtccccagtctgtcccaggcacttccttgttgagctgcaggcactcaggcacatccagagcggcctccagggatggagcctccaaggtagggtggcagaggacctggcgagtggaatccacacagcatttgggtttggcttcagtagcttcttgaggtggacagagtggtgtagaagagcctggccttgtggccttcactggaaactctccccctggtcacttctggaacaaacaggttccttccctagggtccgtgggaagggccctcatggggctgttgcatcctagcaaccttcttagcctccttcctgagcatgtggggtgccagagggccacactcagctccacccagtaggcctagccagctggtcccaagctttctgaggaaggcaattgacaggtgggagctccttggggcatggccatgggattgcttccaccagtctgtttctcagactttccccttctttccaggccaaagtatgttgctggttcctgtccccactggtccctacaccccctggcacttgcctgctggcatggtgggtgaggctgcgggggagctcagtggcaggaagctagtggtccttgggaacacggaacaggaacctgtacccaactcccccattctttcttcccattctttctttctaggatgcataacctatcttgtctcatttattttttatttttttccagatagagtagctctttgtacataaaagaaaatacttgaaaattaattgtatgatgtatgagaagacagagccccctagttttgtatctcgttgtgtgactgccatgcgttccaccagaaagccgttctattttggtctctgtgatattttaaatgcgtgacagaagcaagcaaataaagtcaggaagaagtatatatatgagataatatagattgtataaaaaaaataaaacaaaaaaaaaaaaaaaaaaaaaaaa

SEQ ID NO: 554 - DNA, 2779 bp, Cricetulus griseus
atctgtgctctagtgtaatgactctgctttggattataatgaggcaaagggtgtgtatgaaaaagttggagaagccacagagactgctctcacttgcctggtggagaagatgaatgtatttgataccgaactgaagggactgtctaaaatagagcgtgcaaatgcctgcaactcggtcataaaacagctgatgaagaaggaatttactctagagttttcacgtgatagaaaatcgatgtctgtctattgtacaccaaacaaaccgagccggacatccatgagcaagatgtttgtgaagggtgctcccgaaggtgtcatcgacaggtgtacccacatccgagttggaagtaccaaggtccccatgactcctggtgtcaaacagaagattatgtctgtcattcgtgagtggggcagtggcagtgatacactgcggtgcctggctctggccactcatgacaacccactgaggagagaggagatgcacctggaagattcagccaacttcatcaagtatgagaccaatctgacttttgttggctgtgtgggcatgctggaccctcccaggatcgaagtggcctcttctgtgaagctgtgccggcaagcaggcatccgtgtcatcatgatcactggagacaacaagggcactgctgtggccatctgtcgccgaattggtatttttgggcaggatgaggatgtgacatcaaaggcttttacagggcgggagtttgatgagctcagcccctcagcccagagagatgcctgcttgaatgcccgatgttttgctcgagttgaaccttcccacaagtctaagatcgttgagtttcttcagtcctttgatgagatcacagctatgactggtgatggtgtgaatgatgctcctgctctgaagaaagcggaaattggcattgccatgggttcaggtactgcagtggccaagactgcctctgagatggtcctagcagatgacaacttttccaccattgtggctgctgttgaggagggtcgagccatctacaacaacatgaagcagttcatccgatacctcatctcttccaacgtcggggaagtggtctgtatttttctgacggcggcccttgggtttcctgaggctttgattcctgtccagctcctctgggtcaatctggtgacagatggtctgcctgccactgcactagggttcaaccctcccgacctagacatcatgaacaaaccaccccggaacccaaaagaacccttgatcagcgggtggctgtttttccgttacctggctattggctgttacgttggcgctgctactgtgggtgctgctgcatggtggttcatcgctgctgacggtggtccaagagtgtccttctaccagctgagtcacttcctacagtgtaaagaggacaacccagacttcgaaggagtggactgtgcaatctttgagtccccgtacccaatgacaatggcgctttctgttctagtaaccatagagatgtgtaatgccctcaacagcttgtctgaaaaccagtccttgctgaggatgcccccttgggagaatatctggctcgtgggctccatctgcttgtccatgtcacttcacttcctgattctctacgtggaacctttgccactcatcttccagatcacaccgttgaatctgacccagtggctgatggtgctgaaaatctccttgcctgtgatcctcatggatgagacgcttaagtttgtggcccgaaactacctggaacccggtaaagagtgtgtgcagcctgccaccaaatcctgctcgctgtcggcatgcaccgatggcatttcctggccgtttgtgctgctcattatgcccctggtggtctgggtctacagcacagacactaactttagcgatatgttctggtcttgactgacagcgctacatacagaagatgttttaacttaatcgattaattttttattgtttaaagcaactgtctatttctgctgaattttcacatgaacatattggctggtgaaggaggtttcatattctagattttgttttgctttttctgactccagtgggacaagattttcctttttttatacacataattaaagtgtccattgacatgtacagagaactaacactattttatgcagatatttttttgtagatgaaaaagcatgtacagtgttctgtttaatactcatacttgtacaaagatagttgagccagcagacattgtcagcaaattaattggcagcagactttaggaaatgaatgtgtgtggtttttaaaagaaaaaaaactaaatagcatgtattgtgtcttttgcatgattctctggatttaatttgatatcacagtctaatttttattcataagccaatttttctgcactgagcagagtcctgctacctcagtcagtatttttggtttgccacttcctgcaccctcagcctctgtcacccccagccccaccccagcccgctcggcttcttctgtaggtctgatggttctgtttacatccgtcttcactagaggttgcctgttctcgcttgtgcagaaaacattgctccagattcaaatcgactgggtttctgtccctcgcctagttttaaggttatttatttaaatgtctaatgtattttattgtaacagacattgttttgccagcattgcctattcattggcacttcacaatctagtttaaaagaaaaaataaaacattttaaatggacagagaaaaaaaaaaaaaaaaaaaaaaaaaaaaaaaaaaaaaaaaaaaaaaaaaaaaaaaaaaaaaaaaaaaaaaaa

SEQ ID NO: 555 - DNA, 2779 bp, Cricetulus griseus
ggattgcaagggtatgatatgtctacatttattagacgatatagtagatatctaaatgaaaaggcagtttcatacagacaagttgcattcgatttcacaaaagtgaagagaggggctgatggagttatgagaacaatgaacacagaaaaactcttaaagaccgtaccaattatccaaaatcaaatggatgcacttcttgattttaatgttaatagtaatgaacttacaaatggggtaataaatgctgccttcatgctcctgttacaaagatgccattagactatttgcagcatacaatgaaggaatcattaatttattggaaaaatattttgatatgaaaaagaaccagtgcaaagaaggtcttgacatctataagaagtttctgactagaatgacaagaatctcagagtttctgaaagttgcagagcaagttggcattgacagaggtgatattccagatctttcacaggcccccagcagtcttcttgatgctttagaacaacatttagcatctttagaagggaagaaaatcaaaagattccacagctgcaagcagggctacaacactttccaatgcagtctcttctttggcaagcactggcctatctctgaccaaagtggatgaaagggaaaagcaggcagcattagaggaagaacaggctcgtttaaaagcattaaaggaacagcgtctaaaagaacttgcaaagaaaccacatacctctttaacaactgcagcctctcctgtgtccacctcagcagggggaataatgactgcaccagccatcgacatattttctacccctagttcttctaacagcacatctaagctgccaaatgacctgcttgatttgcagcagccaacctttcattcatctgtccatgctatgtctactgctcctcaggtagcaagtacatggggagatttaatagttgactttgaatccgtgtttggaaataaatctacgaatgttactgtagattctggggtggacttctcaaaccaacagtggcctctcagaaccagagtcttcctattgccaaacttccacctaacaaattagtgtctgatgacttggactcatctttagccaaccttgtgggcaatcttggcattgggaatggaaccactaagaatgatgtaagttggagtcaaccaggtgaaaagaagttaactggaggatctaactggcaaccaaaggttgcaccaaccactgcctggaatgctgcaacaatgaatggcatgcattttccacaatacgcaccccctgtaatggcctatcctgctactacaccaacaggcatgataggatatggaattcctcctcagatgggaagtgtgcctgtaatgacacaaccaaccttaatatacagccagcctgtcatgagaccaccaaacccctttggccctgtatcaggagctcagatacagtttatgtaactagatggaagagaatggaattattccaagaacataagttcgcaggtggcgactccttacttccagcaaaattcaaactgctgtctctgaaactcttcctccattagagcgctccagtaacccatgaaggcccacggcagggatgggactagtttataggagagcgttgtcaataccgtttataaagccaagaattgccatgatttaagactaagatctgtctttttggtgactaacacttcagttctttcaagtcctattaatacccataatcagtaaccaaccaagaaaagcccgtacttggaaagtgtggagtttgtgtttggaaaagctgcctggagagaagaattgcatactttgccataattaaacaggacttatcgggggaatcaaaatcataattttaattatgcattatatttcttttctccagtccttacaaatacagaaaccataattgaagttaacttttctttttaaaaaaaaattatattcagtttgcagtagacattccttaagtatttgtatttatttatgattaccaattttacataacattaatattatatcaaacctccttaagaaaatgagtatggatgttcacagtatgtttgattttatccacaagaatgaatctgattcagaatgcttttcagctgacatacagagcactaaatattttaaggcaaaaccataggtctgaatcttttaagaattctcagtctctatgggatttagggaagcattataaatgcattaatccttatagtcaattctgtgcctaggattttgcaagggaacagttcactgactaggaaaagcactacatttaaaactcagcattagtgcattgggaaggatctttactgctttgtgcttggcatgtcattattttccatttgacattagggcctttccaaaatgaatgtgaagaattgctttcacgtcaagactttccttcttttcagtaaaactttaggagatgttatggggaaagggaggggaactaaaacccttgaactttttatttggcgtgtgccatgttatgatcatgtaccttttaaataaggggagatagtatctttaaattcaatgtctagccaagagtttagttaatgaagaattaaactgcactgttgatcagtgctttctgtaaatacatcttaatgcttgggttgagaggggccttaagaaggacagttcattgtaggaaagcaattctgtacatgagttaagcatacttgttgcattgtctctgcagattctatttttgtttacaatattaaaatgtatgttagcaaatgggtggattttcaaataaaatgcagcttccacaaaaca

SEQ ID NO: 556 - DNA, 2777 bp, Cricetulus griseus
  modified_base (847)..(847): a, c, t, g, unknown or other
gggatgacaaccacaggccagatcgtcaacctgctgtccaacgatgtcaacaaatttgaccaagtgacgatcttcttgcactttctgtgggcagggccgctgcaggccattggtgtgaccatccttctctgggtggagataggcatctcctgcctagctggcatggctgtcctggttgtccttctgcctctgcaaagctgtatagggaagctgttctcatcactgcggagtaagactgcgcctttcacggatgccaggatcaggaccatgaatgaagtcatcacgggcatgagaataataaagatgtacgcctgggagacatcgtttgctgagctcaaccatgtgatggtaaagccatagtgcatgtgcaagattttaccgctttctgggacaaggcattagacggactccgaaccctgcagggcctgtcctttactgccaggcctggtgaattgttagctgtggtcggcccagtgggagcaggcaagtcgtcactgttgagtgcagtgctgggtgaactgcctccggccagtgggctcgtcaacgtgcacgggagaatcgcctacgtttctcagcagccctgggtcttctcgggtactgtgaggagcaatattttatttgggaagaaatatgagaaggaacgctacgagaaagtgatcaaggcctgtgctttgaaaaaggacttacagcttttggaggatggagatctgaccgtgataggagaccggggagccacactcagcggagggcagaagctcgggtgaacttggcacgggccgtctaccaagatgccgacatctacctccttgatgactcccctcagtgccgtcgacgcagagtggcaacncctgtccagctgtgtggttctgcggaggtatttcttagaaacgtcgagggatgtcaagcgcctggagtccacaacacggagtccggtattctcccacctgtcctcctcccttcagggactctggaccatccgggcgtacaaagcagaggagaggttccaggagctgtttgatgcgcaccaggacttacactcagaggcttggttcttgtttctgacaacgtcgagatggtttgccgtgcgtctggacgccatctgtgccgtttttgtcatcgtcgtggcctttgggtccctgattctggcaaaaacgttggatgctgggcaagttggcttggccttatcctacgccctcacgctcatgggcatgttccagtggtctgtgcgacagagtgccgaagtggagaatatgatgatttctgtggagagggtgattgaatacacaaacctagaaaaggaagccccctgggagtaccagaagcgaccaccccgggctggccccaggaaggggtgattgtgtttgacaacatgaatttcacctacagcttagacgggcctcctggtcctcaagcacctgacggcactcatcaaatccagagaaaaggttgggattgtggggcgaacaggagctgggaaaagctccctcatctcagccctcttcagattgtcagagccggaagggaaaatctggattgacaagatcttgacaactgaaattggacttcatgatttaaggaagaaaatgtcaatcatacctcaggaacctgttctgttcactggaacaatgcggaagaacctggatcccttcaatgagcacacggatgaggagctgtggaacgccttagaagaggtacaacttaaagaggccattgaagacctccctggtaaaatggatactgagttagcagaatccggatccaattttagtgttggacaaagacaattagtgtgccttgcgagggcgattctcaagaaaaaccggatattgatcattgacgaggcaacagcaaacgtggacccaagaactgatgagttaatacaacaaaagatccgggagaagttcgcccagtgtacagtgctcaccattgctcacagactgaacaccatcattgacagtgacaagataatggttttggattcaggaagactgaaagaatatgatgagccatatgttttgctacagaatccagagagcctcttttacaagatggttcagcagctgggcaagggtgaagccgctgccctcaccgaaacagcaaaacaggtgtacttcagaaggaattatccagatatagcattcaccagccctgtggttacgaacacctccaatggacagccctcagccttaacaatttttgaaacagccttgtgacttaccatgacatggagtctgctctgaaggtcgtccccactccccaaggggcgtgcactttgtacactacagcacacttggtttctttcactctgcaacaaatccttcatgtacaaaacactgactggtgtctttggattttccactccatctttattcactgatttcgggtcctaacaaaatggcctatggttttatttaaatgttccagctgttctttacaaatctgattttgaggtgccggccatctacaacagctgtctaccaggttttgtgccttaaaagactctagggccaaagcccatttgctttgtaagctgccatgagcagcttgttttttcctgttgcctttaaaagtacactttccagttatatcagggactctgtttacttgaagactgtgtgacgttgccagttgctctcctctgaccactaatgtcaggtcttggggacctatgtcaagttcaagtttctaaaggttttactgttgtttctgtttcatttcccttttgacaccatcacaggacaaaccaaattcaactgaaataaatgacagttttcatc

SEQ ID NO: 557 - DNA, 2776 bp, Cricetulus griseus
atgttcaaggagccacgccggtgggattaatgtgtttgggcaaatcacggtggagacgtttgcatccattgttgctcacgagttgggtcataaccttggaatgaatcatgatgatgggagagagtgtttctgtggatccaagagctgtatcatgaattctggggcatcagggtccagaaacttcagcagttgcagtgcggaggactttgagaagttaactttaaataagggaggaagctgccttctcaatgtcccgaagcctgatgaagcttacagtgcgcccttctgtggtaacaagctggtggaccctggggaagagtgtgactgcggcacacccaaggagtgtgagatggacccatgctgtgaaggaagcacttgtaagctcaagtcatttgctgaatgtgcatatggcgactgttgtaaagattgccagttcccttccaggaggctctatgtgcagaggaaaaaccaatgagtgttgatgtccccgagtactgcaatggctcctctcagttctgtccaccagatgtcttcattcagaatggatatccttgccagaataacaaagcctactgttacaatggcatgtgccagtattatgacgcacagtgtcaggtcatctttggttcaaaagccaaggctgccccaagagattgcttcattgaagtgaattctaaaggtgacagatttggcaactgtggtttctccgggagtgagtacaagaagtgtgccactgggaatgccttgtgtgggaaacttcaatgtgagaacgtacaggatatgccagtgtttggaatagtgccagcgatcattcagacacctagccgaggcaccaaatgttggggtgtggacttccagcttggttcagatgttccagatccagggatggtgaatgaaggcacaaaatgtgatgctggaaagatttgtaggaatttccagtgtgtaaatgcttctgtcctgaattatgactgtgacattcagaaaaaatgtcacggccatggggtgtgtaatagcaataagaattgtcactgtgaaaatggctgggctcccccgtattgtgagactaaaggatatggaggaagtgtggacagcggcccaacatacaatgcaaagagcacagcactgagggatggactcctggtgttgttcttcttagtcatccccctggttgcaattgccattttcctctttatcaggagaaatgaactacggagaaccttcttcagaaagaagagatcacaagcatcagatggcagaaatcaagcaagtgtccctcgacagccaggggtccaagtgtccctcgacagccagggggtccaagtgtccctgtgaatgcaaacagatttccagtaccaacctatgcagccaagcagcctccgcagtttccatcaaggccgcctccaccacagccaaaaatatcatctcagggaaatttggttcctgctcggccggctcctgcacctccattatatagctccctcacctgatgtgaggttcttatttttcaaacatcttcagggaactgagcaaatgttttttttttttttttttcctgatgttttcttgaaaagcctttctcttccaactatgaatgaaaacaaactaccacaaaacaagctttattaacacagacacagagtggggagccgagagatacgggaacatgcaaagactccaggagacttagagttaacatttccatcaatgaaacctcctctttggtcatttgtgagtctaatgaacttaatgtggattaagttattttgagtgtaagatttgtcattatgtgcttaaatgtaatcctgacttaatcgacttcagttatcattaatagtttctggctgaacatttgaacatgtattaacctaggaaaactgactaactgccagtaatgtctatgttttcatcttgcatggattaacagccatttacacagactcctgtctcttactgtctccacaaataagcagctatcctgaagatttcacaagaaccacaattactaggtcatgacataatttgaaagtatgaaacatggtgtgtattcagttactggattccattctcaggatctctcgagcataataactattatagaaattgatttaacactagatcagttcctggctttcattcttttatgatctttcaactataatgactatggcagcaattaatttaacactaaattttctttatgcatcatggtaaagcattgcagtagcgtcgctttaattgaagtgcacactatatggtacgaggtgtttagtagacccgagcagataggtgcggattgatcagaatcatggagaatgccttccatcgggtgagctgttagaaaaccacttgagaatttgtgagcactttaactctcaactctgaattttgaagcttgatattgagtcatttagaatgtttacatttgctaagatgtgctggatctggtctcttttgactaatattttcataaaaattagggtggggaaaggaaggaagaaatgatttccttagaaaactacagaaattatcatggcctctgtgagtaaccatctcagctgtattaaaatgaatttgtactttgaaaggaatgatattgacactaaaattttaaacacttaaattttttcataatctttcataaagaagtttaataataggtatattaactgaatttcattagttttttaaaataatattttggtttgtgtatatatacatattaaaataaaaacatttacaacaaataaaatacttgaagttcaaaaaaaaaaaaaaa

SEQ ID NO: 558 - DNA, 2775 bp, Cricetulus griseus
tgcttgttggaggaaaaaaatatagtagatcatacgaatgaacagcagaagatcttggagcagaaacgccaggagatcgcagagcagaaacgtcgagaaagagaaatccagcagcaaatggaaagtcgagatgaggagacattggaactcaaagagacttacacctcgttgcagcaggaggtagacatcaagaccaaaaagctcaaaaagctcttttccaagctccaggctgtgaaggctgagatccacgacctgacaagaagaacacatcaaggagcgccaggagctggaccagagattatgagggcccagccatttcccccaaggtccaggctgcactagatgcagctctgcaggatgaagatgagattcaggtggatgcatcatcctttgaaagcactgcaaacagaaaacccaaggccaggcctaagagtggcaggaaatcaggatccgcctcatcctcctcaggaaaccctgcatctcagttttacccacaatctcgggggctggttcccaagtaacccagcaccccctcccaaggtgggaacagcattgtcttctgagagaagatcgagcacagaactgcagagatgacttgagcctaaacagaaccgttcgttcccttgaggagaagagattgcctctttgcagattaaccacctcagtctgcctgaacatgctggtcctgacttggcactcagctcctctgggaagtgtccttgaattagcatctcagaaatgcatgggtaaggtaaagtgcaaagtccaagtggacagcaagaaaatgaccacaaccttgctttccttcttcctccccccctccagcctcttcctcacaccaggtcccttttgttaaacaatatgactgttgaggcctccttaggaccttatgtgtggaggcttggagtaaaatgacagtggagctgggaagtaaaagccctagaactcgaataggtgcctgcctttgtcaggtgaaatgagagatctcacttggaaccaagtcccacggatggcaccaccagtgatccagcttccaggcccctcagtaggagtagatctgcctgtggaatctgttgaatggggcagaggcttccagttcctgctccagaagtacatggtgttgggagcaatagaaaagacattccctttgcctcctgggagagtttggggaaataactttttttaaaaacccttcaaaaccatgactttcctattaaagacctaagtctataaaccagtgccatgtaccatctaccatgtcactttactcttcatttgtcaccgtcttcccccaaatgcatacactcttgagtggactcatgcagacccaccttagagtgtggctacagagtgtgcttagaggtgggtactgtgctgggagcagaagaaggctctgaggagagttcacacttcccgtttacatagacaagtttagtttctaagttttagttcttcatattatggcccctcaagctttgttttatgttggtcattaggtgacagttactcattttccccaggtgaaatgcatgagtgtgtggggctttaagtgatacacagaacttttcccgcaaacaaaagaagaacgccactgacagtcatgattattaaagcgagcctgtcctcagctgtgttcccgcagtggtctgtggaaaccaagtagaagggccacacatgtggccatgatgctgtctcttccgaggcagcctctggtgcttctctcttctcaacatggatccgatactgaaaagagcagatgctaaaatatcttgctgcccccagaatgttgctgctttgagctctgaatggagccaggagtagaggacagatcaagctcactgagggaccaaagctttatgttggtagttatctagaatgttctgggatgctggaaggccctcatgcctgcagcagctgttgtagtctaggagcaagtctttaaaaggatcttagaagagcatctggcaggtgtttgaggctgcgcatacaatcctcatcagactctcttttcgtctcatcaatagaatgtatctggcttcaaatcacacaattcccagacccctagattcagaatcagaggccacagatcataggcatgaagcactttcttaagactgacctgtgttgaattgctcctgtcggatgcctgcatgctgcttgaattgctccacctacacctccatgaccaagggtgccagagtgtggcacagctcaggcgtgggccactgtctgcccttcctgactcttcctaagccctcccttgctgaatgtagactctgccaagtttctgagaagcgtcgattccctgctaacataggctatcagttctgcctccctttcgcctctcaagtttgaggagtactctgtgaacaccttggaccattcagacaccatccatggatgaaatgggctactcatgtactctgaaatccattaatgcagaacgctcagagggaactaggtaaggtcagcgtgccctgcagttaccaagtgagtcttggtctggtactttccgattctggcacctccctctctgccctgatataggcaggcaggaaagggggggggcttgatggctctttggagttaataatgaccctgaccttctcttcggctgtctttagacaaagaatatgtcaatacttgggactcttagttttacaattgatatttatttgtattatctctttgtttagcgatgtaaaagtgattctaaactaagatgtgtaaataaaaatcaatcagatttattgtatctaacaaaaaaaaaaaaaa

SEQ ID NO: 559 - DNA, 2774 bp, Cricetulus griseus
cagtgaccttgagtctgctcgccagttctgccagactgtggggtacccctgcgtagtgcgcccctcctatgtgctcagcggtgctgccatgaacgtggcctacactgatggggacctagagcgctttctgagcagtgcggcagctgtctccaaggagcaccccgtggtcatctccaaattcattcaggaagcaaaggagattgatgtggacgctgtggcctgcgatggcatcgtgtcggctatcgccatctctgagcatgtggagaatgcaggtgtgcattccggggatgctacgctggtgacccccccacaagacatcaccccccaaaactctggagttcggtatcaaagccattgtgcattctgtgggccaggaactacaggttacagggcccttcaatctgcagctcattgccaaggatgaccagctgaaagttattgaatgctgtggccgcatctgcagctgggctaaagctctacctcaatgagaccttctctgagctgcggctggacagtgtggcccaatggatggagcattttgaaacctggccttcccaccttcccattgtggcccactgccgagcggcagagtgttgctgcagttctcatggtggctcagctgacccagcgcccagtgcacatatgtcacgtggctcggaaggaagagatcctgctgattaaaactgcaaaggcacaggggctgccagtgacctgtgaggttgcaccccaccacctcttcttaaatcgggaagacttggagcgcctgggacctggaaagggagaggtccggcctgagcttggttcccgagaggatatggaggctttgtgggagaatatggcagtcatcgactgctttgcctcagaccatgctccccataccttggaggagaagtgtgggcccaagcctccacctggcttcccagggctagagaccatgtttgccactcctgctgaccgctgtgagtgagggccggctcagtctggatgacctgctacagcgtctgtcaccacaatcctcggcggatcttccacctgccactccaggaggacacctatgtggaggtggatctagagcatgagtggacaatccctagccacatgcccttctccaaggcccgctggaccccttttgaagggcagaaggtgaagggtaccatccgccgtgtggtcctgcgaggggaggttgcttatatcgatggacaggtgttggtacccccaggctatggacaagacgtacggaagtggcctcagggggctgttccccagccccctccttcagctcccgccaccaccgaagtaaccacgacacctgagagaccacgccgagtcatcccaggccttcctgacggccgcttccacttgccaccccgaatccaccgagcctctgacccaggtttgccagctgaggaacccaaagagaagccatccaggaaagtagtggagccagagctgatggggacccctgacggcccctgctaccctgcaccaccggtacctagacaggcatcacctcagaacctggggtcttctggcctactgcacccacagacttcacccctgctgcactctttagtgggccaacacatcctgtctgtcaagcagttcactaaggatcagatgtctcatttgttcaacgtggcacacacactacggatgatggtgcagaaagagcggagccttgacatcctaaagggcaaggtcatggcctccatgttctacgaggtgagcacccgcaccagtagctcctttgcagcagccatggcccggctcgggggtgctgtcctcagcttctcagaagccacgtcctccgtccagaaaggggaatcgcttgccgactcagtgcagaccatgagttgctacgctgatgtcgtcgtgctccggcaccctcagcctggagcagtggagctggcagccaagcattgtcgaagaccagtgatcaatgctggggatggagttggagagcaccctacccaggccctgctagacatcttcaccatccgagaagagctggggactgtcaacggcatgacgatcaccatggtaggtgacctgaagcatggacgcacagtgcactccctggcctgcctgctcacccagtaccgtgtgagcttacgttacgtggcacctcccagtctgcgcatgccacccagcgttcgcgactttgtggcttcccggggcaccaaacaggaggagtttgagagcatcgaggaggcgctgcccgacacagacgtgctctacatgactcgcattcagaaagagcgatttggctccactcaggaatatgaagcttgctttggtcagttcatcctcactccccacatcatgacccgggccaagaaaaagatggtggtgatgcatccgatgccccgtgtcaatgagataagcgtggaggtggactctgacccccgagctgcctacttccgtcaagctgagaatggcatgtacatccgcatggctctgcttgccaccgtgctaggccgtttctagggcccagcctccttttttctctcttcaagcccagctgctgggcaaggaatcccagtgccccccacgggggcagcacacttagcagacatccaggggcatccagatagcccaagcatatatgtgtacagactgagaccatgctttaggctccagactagagtactctctggcttgggggtactgtctctgatacttactgggggctcctctgccgcatcatctccgttcttacacctcaaatctgtacagttacttttctactgactataataaatagccaaacagtt

SEQ ID NO: 560 - DNA, 2773 bp, Cricetulus griseus
gtgtccttcaggccacccctgctgccaagaatgggggtcggggggagccgctactgccaggtgctgagcctcccctcacccaaccctggaacagacaagagcactgaggccaaggaccctccagctgcagagaacctatccctcctccacccagctccagctccctctgatagcagtgagccagccccagctcctgtcgccgacggagacatccccagccagtttacacgggtgatgggcaaagtatgcacccagttgctggtgtcccgaccagacgaggagaacatcaccagttacctccagctcatcgaaaagtgcctgactcacgaggctttcacagagacacagaagaagcggctgctgtcctggaagcagcaagtgctgaaactcctccgaacatttccgcgcaaagctgcactggacatgcacagttcccaatgcctcctcgggtccctcccacctggcaggatgggcctcctgagcccttcaggcattggaggtgtctctcctcgacatgcccttaccagccccagtctcgggggtcagggccgacagaacctgtggtttgccaaccctggaggcagtaacagcatgcccagccagagccgcagctctgtgcagcgcactcactcgctccccgtccactcgtcaccccaggctattctcatgttccctccagattgcccggtacctgggcctgacctggagatcaatcccaccctggagtctctgtgtctgagcatgacagaacacgccttgggtgatgggacagacaaaacctccaccatctgacgggacccacagcccagcgcacccataggctccctgggcggcgggcgggggccatcccccaacaggcttcttctcggcagcgagagggtgggctggcgcagctatacattctgatatttttctactcatcctcttaacttttgtttaacattggcacacgccttgctcactcccaggcccattgagggatctcagctgaggccgggggtcagagagggcagccaggggcaaggacaaggaccagacagactaccccacccctcccaaatcccaaatccaccaccatccccatcccaccctgcctcctctagacggctgacacctgtccttccccgagagagcagacttccttagagacaaactgaccaccaccttgtgcagcctgcccttcagaaacacaacagtgggggaagcagtgtggacagcctgctcctccagtatgtcactggagaagagcccctctcccaccattccccaggacagccaccaccttcctcccccctcttcttgccctgtttatcagaggttctctacaattaatttcttaggcctatttaagatacatatttatatagttcttaacggtttttctctgatcattccctctcatttttagaatccccaggcctctctctgagccaggacagtggcagggggagcctgaactttatgagaggagagggcagagccccctcctccagaccccctcgcccttccccatcccagccctggctcccagatgcagaggttgaaggtgggcagccccaggcccgcagtgaggtcaggaagtctgttgccttaatgtcccctttccccaccaacataacccttctctgctccccaggtctgttagcaaaagacttgtgggtaggaaccagggaaaggggattgttggtttttgttttcttgcctacccctctttctgtcagccttccccaaccccattatgtcatgacctcatgtaagtggaacactatatcataacccagaggtgcggcccagcctgagtcacacaaacaaaccctctgccccattactgatgagggctggtgctggggcccaggtggagggagggaatttgggggttcaggctgtggggaagccagggttccctattccaaactcctcttcccctctcaacctacaccctcattgggacattctcaagcttttcacacgaaaaggaaaaaaatgttatttttagatacattttatgaataacttttgttatgaatatggctggtaaccattgtgtatgttaattaaagataaaaaatgttaggaaaaaaaaaaaaccaaaaaaaaaaaatcctggtctgtggcccctccccagctatgagcccagggagggagaagaagccagggggtagagtggcaatggggacctgcctgtggtccccaccacctctcccagtgccgggctgggcggggtgtcaggtgtatttatgtacctcttgcacactcatcaacctatgcaagtccccaccccggccctccaggtttctgtgcctttgctcattccctctaactcccaggcttctctggccctcccactaactgggaagtggggtgaaaggccacctgtttaaaacgagcaggtttccctctcatgggaccctcacctccacgagctggtctagtcttgtcttgttcacttcccatcagggtgactgaccctgcttggcactggaaggtggtaagggataccctccccgagagggaggtgagagcttgccccccacccgacagcagagtgcaggacgcaggcggccccactctgacaggcaggaccctgaccctcctcctcccccatcccctccatggtttcaccctaccctacccacttttgtccccagccccactggcagaatcagctttgagtaactgtacattttctcgctgttggagaagacttatttgttggagtttcaattgttaatggtctgggcttattttggaaaaaaaaaaaaaaaaaacaaaa

SEQ ID NO: 561 - DNA, 2773 bp, Cricetulus griseus
gcggcctctgctgctcctggccccgctggcctggctccttctggcccaggcgaaggacgacgccaagcttgaggacaaccttttggtcctcactgtggccaccaaagagacagagggcttccgccgcttcaagcgttcagcccagttcttcaactacaagattcaggccctgggcttgggggaggactggagcgtggacagtggaccctggcaggcggaggacagaaggttcggctgctgaagaaggcgctggaaaagcatgcgcacaaggaagacctggttattctcttcactgacagttaggtcgttctcagctgaggaactcatctaccccgaccggaggctggaggctaagtatccgacggtctctgatggcaagcggttcctgggctccggaggcttcatcggttatgcccccaacctcaacaaactggtggccgagtgggagggccaggatagtgacagtgaccagctcttttacaccaagatcttcttggacccggagaagagggagcaaatcaatatcagtctggaccaccgctgccgcattttccagaacctggacggagccttagatgaagtcgtactcaagtttgaaatgggccacgtgagagcacggaatctggcctatgacacccttccagtggtcatccatggcaatggtcccaccaagctgcagctgaactacctgggcaactacatccctcgattctggaccttcgagacaggctgcacggtgtgcgatgagggcctacgcagcctcaagggcattggggatgaagctctgcccaccgtcctggtcggtgtgttcattgagcagcccacgccattcctgtccctgtttttcttgaggttgctgcgcctgcgatacccccagaaacggatgcggcttttcattcacaaccacgaacagcaccataagcttgaagtagagaagttcctggcagagcacggcacagagtaccagtccgtgaagctggtgggtcccgaggtgcgaatggccaacgcggatgccaggaacatgggcgcagacctgtgccgccaggaccaaacttgcacttactacttcagtgtggatgctgacgtggctctgaccgagccggacagcctacggctcctgattgagcaaaacaagaatgtcatcgcgccactcatgacccgccatgggaggctctggtccaacttctggggggcactgagtgcagatgggtactacgcccgctctgaggactacgtagacattgtgcaggggcggcgtgtcggcgtgtggaatgtgccttacatctcaaacatctacctgattaagggcagtgccctgcgggccgagctgcagcacgtagacctgttccactacagcaagctggatgctgacatgagtttctgtgccaatgtccggcagcaggaggtgttcatgttcctgaccaaccgccataccttcggccatttgctgtccctggataactaccagaccacccaccttcataatgatctctgggaggtgttcagcaaccctgaggattggaaagagaagtacatccacgagaattacaccaaggctctggaggggaagcttgtggagatgccttgcccggatgtctactggttccccatcttcacggaggcagcctgtgatgagctggtggaggagatggagcactatggccagtggtctctgggtgataacaaggacaaccgtatccagggcggctacgaaaacgtccccactattgacatccacatgaaccagatcacctttgagcgggagtggcacaagttcctggtggagtacattgcccccatgacagagaaactctaccctggctactacaccagggcgcagtttgatctagcctttgtagtccgctataagcctgatgagcagccctcgttgatgcctcaccacgatgcctctaccttcactgtcaacatagccctgaatagggttgggcaagattatgagggcggaggctgtcgatttctgcgctacaactgctccataagagccccaaggaagggctgggctctcatgcatcccgggcggctcacacactaccatgaagggcttcccaccaccaagggtacccgctatattgctgtgtccttcgtcgatccctaactgaccagtgcctgcctcagacctttctcttcattgacaaccactgcccagcagccctctgggtcccaaggaacccagtccaacctccgattcctgaatacctgttgctcttgaagctgccagtcagaaagatcaggcacagaccagagacgggccagagacgggaggctgcccatggtgctcccaccagtcccagcagacggtggtaatattcatcttcctgaagttcccagccttcctccttcctctttctctgggggccagacttctgctggagctgcctgggagactgcagagtgagaagctatgcccagaatacctctcgaagatccagcccctaggatcctgtttcaggtttcagtgccaccaagatctgggcatacctactcccaattccacccccggacctaggactgttgaagccctcccttccaggtttgtatcatcagagccaacagttgtctctgttgagacggtgactcagaaatcctccctgaggggcagaaaagacatctgtgcgaagcttggttctctactgaccctgcttagggggaggggcgtgctatgtccacactgtactgggtcaccctgtcccgatgcctctggagacagggacagagatgagcgttctattaaatgttgttcaaaccactagta

SEQ ID NO: 562 - DNA, 2773 bp, Cricetulus griseus
aaaaaaagagttagaagccatgcgaactttctgtgactcggcaaagcaagaccgactgaagctccaaaatgaactggctcacaaggtagcagagtgcaaagccttagctctggagtgcgagagagtcaaggaggactcggatgagcagatcaagcagctggaagacgctctcaaagatgtgcagaagaggatgtacgagtccgaagggaaagtcaagcaaatgcagacccacttcctggccctgaaagagcacctgaccagcgaagcagccacagggagccaccgcgtcaccgaggaactgaaggagcagctgaaagacatgaaagccaagtatgaaggggcttcagcagaggtgggcaagctgaggaaccaaatcaaacagagcgagatgctgttggaagagttcaagagagatgaaggcaggctagtggaggaaaataagagattacagaaggaatgtggcacgtatgaaatagagaaggagaagaaaggaagaagggttgtggagttggagggccagctgaaagagctggcggcaaagctggcgctttccatccccagcgagaaatttgaaagcatgaagagctcattatccaatgaggtcaatgagaaagtagaaaaggcttcacggtggagatggaaacgtagctacgtagcctttaaaagccaacgaggagatgaagaaatcccatgatgtcagtgtggaggatctgaataagaagctttcagaggtaacacagaagtacacggagaagaagctggaagccgagagactgctggtggagaaagacaggctgactaagaatgtcacccgcctggaagctgtgtttgtagctcctgaaaaacatgaaaaggagctaatgggtctgaaatccaatattgctgaactcaaaaagcagctgtctgaacttaataaaaaatgtgcagaggaccaggagaaaattcatgtactcatgtctgaaaacacaagcttgaaaaagactctgagtagccagtatgtgcccacaaaaacccacgaggaggtgaaggcctcgctgagcagctcattggagaaaaccaacaaagccttgcttgatgccaaaaaaaggtttgacgacataagtcaggaatgttcaaaaataagagacgagaatggggtattgaggaggaacctggagaacgttcagaatcaaatgaaggttgactgtgtgagcctagaagagcactcaaaaaagatgaacactgtgagtcagagcctgaaggaagcgcaggatgctaacgctgctgttctggccgactaccgccgaggccaggaggagatcctcacactgcacgctgagattaaggcccagaaaaaggagctcgacaccatccaggaatgcatcaagctgaaatatgctccactggcccgcttggaagaatctgaacgcaagttcaaggccacagagaaaggactgagggagcagttatcagagcagacgcacaagtgtcgcgtcagggatgaagaagtcaagaagggcaagcaggagaatgagcggctgaggcaggatcttgctgcccttcagaaagagttgaagggtaagaatgctatggtggaagaggccagggaagcagaaagagtgctaagtgggaaaacagaagaactcaacaagcaactgaaggacctgtcccaaaaatacaccagtgtgaagaacgagaaagagaagctggcagaagaaaaggccaagcaagcctccgaggtccttgcagcccaaaatcttctgcagaaacagcccatcccattggagcaggtggaggctctaaaaacatctctcaatgacacaatcgagcacttaagggaagaactgagggataaacagaggtgcctggagaaagagcagcagtcagtgagcaagcttcagcagctgctggagaatcagaagaactcctctgtgcccctggcagatcatctgcagataaaggaggcctttgagaaagaggttggaatcatgaaagccagcctgagagaaaaggaagaggaaagccagaacaaaaccaaggaagtctctaaactccagacagaggtccagaataccaagcaggcgctgaagaatctagagaccagagaggttatcgatatgtcaaaatacaaagccacaaagaacgatctggagacccagatttccaacttaaatgacaaactggccagcctgaataggaagtacgaccaagtgtgtgaagagaagttctctgccaaggactcaaaggaattgctccatctcagcattgagcaggagatcaaggaccagaaggagcgatgtgacaagtccctgacaacaatcatggagctacagcagaggatacaggagtctgcccagcagattgaagcaaaagataacaagataactgaacttctgaatgatgtggaaagactaaagcaggcgctccacggcctttcccagctcacctacaccagtggcagccccaccaggcgggagagccagctggtggatactctgcaacaccgagtccgggatctgcagcagcagctggctgatgctgacagacagcaccaggaagtcattgctatctatcggacacaccttctcagtgctgcacagggtcacatggatgaagacgtacaagcggccttactacagatcatacagatgcgacaaggccttgtgtgctagtgtcagctgacccggagcctgtcctgctggtgctatgcattctgggtgcaactccatggcttctttttggccttactctgatagtatcattaaaataaaatatattttgttctgttgttgaa

SEQ ID NO: 563 - DNA, 2772 bp, Cricetulus griseus
tggagccctgggatgcaggggagctcacaggccagcgaggagctggaggctctggagaatgatgtgtctaatggatgggatcccaacgatatgtttcgatataatgaagagaatttacggtgtagtgtccacatatgatagcagtttatcttcgtataccgttcccttagaaagagataactcagaagaatttctaaaacgggaggcaagggcaaaccagttagcagaggaaaattgaatccagtgctcagtacaaagctcgtgtggcccttgagaatgacgacaggagcgaggaagaaaaatactccaggccccctcgaggccatccagacccccgtctcacccctctgctcatggttctccagctcctgtctctactgtgcctaaacgcatgtcttcagaaggccctccaaggatgtctccaaaggcacagcggcaccctcggaatcacagagtctctgctgggagaggctccatgtctagtggcctagaatttgtatcccacaaccccccaagtgaagcagctgctcctccagtggcaaggaccagccctgcagggggaacgtggtcctcagtggttagtggggaaatattaaagcaagtgaaacatcacctagcttttcaaaagctgacaacaaaggtatgtcaccagttgtttctgaacatagaaaacagattgatgatttaaagaagtttaagaatgattttaggttacagccaagttctacaccggaatctatggatcaacttctaagcaaaaatagagagggagaaaagtctcgagatttgatgaaagacaaaattgaagcaagtgctaaggatgcttttgttgacaacagcagcagcaactgtaccagtggcagcagcaagaccaatagccccagcatctccccttctgtgctgagtaactcagagcataagagggggcctgaggtcacatcccaaggggtgcagacttccagtccagcctgcaaacaagagaaggaggaccgagaagagaaaaaagatgcagctgagcaagttagaaagtcaacattgaatcccaatgcaaaggagttcaaccctcgttccttttctcagccaaagccttctactaccccaacgtcaccacggccacaagcacaaccaagcccatcaatggtgggtcatcagcagccagctccagtgtatactcagcctgtttgttttgcaccaaatatgatgtatccagtcccagtgagcccaggcgtgcaacctttatatccaattcctatgacgcccatgccggtgaaccaagccaagacatatagagcaggtaaagtaccaaatatcccccagcagcgaacaagaccagcatcatacaaagccaccatgatgccaccccgcctcagcggcaggtccacccattgtagccaccccacccgcttattccactcagtacgttgcctacagccctcagcagtttcccagtcagcctctagttcagcatgtgccgcattatcagtctcagcatcctcatgtgtacagccctgtcatacagggcaatgccaggcatgtcccaaattaccatacaacaaggagacaagcccttctttctactttgccatttccacgggctcccttgctcagcagtatgcacatcctaatgccaccctgcatccacatacgccccatcctcagccttcggccactcccactggacagcaacaaagccagcatggtggaaatcatcctgcacccagtcctgttcagcaccatcaacatcaagccgcccaagctcttcatctggccagtccacagcagcagtcagccatttaccacgcggggctggcaccaaccccaccttccatgacacctgcttccaatacacagtctccacagagcagtttcccagcagcacaacagacggtcttcaccatccacccttctcatgttcagccggcatataccacccctccccacatggcccacgtacctcaggctcatgtacagtcaggaatggttccttctcatccaactgcccatgcgccaatgatgctaatgacgacacagccacccggcggtccccaggccgccctcgctcaaagtgcactacagcccattccagtctcgacaacagcgcatttcccctatatgacgcacccttcagtacaagcccaccaccaacagcagttgtaaggctgccctggaggaaccgaaaggccaaattccctcctcccttctactgcttctaccaactggaagcacagaaaactagaagttcatttattttgttttttaaaaaatacactgatttaacatccgataggaatgctaacagttcacttgcagtggaggatgttttggaccgagtagaggcatgtagggacttgtggctgttccataattccatgtgctgttgcagggtcccgcaagtacccagctctgcttgctgaaactggaagttatttattttttaatggcccttgagagtcatgaacgcatcagctagcaaaagaagtaacaagagtgattcttgctgctattaccgctttaaaaaaaaaaaatcaagacttggaacgcccttttactaaacttgacagaagttcagtaaattcttaccgccaaactgacggattattatttataaatcaagtttgatgaggcaatcactgtctacagtggttcaacttttaagttaagggaaaacttttactttgtagataatataaaataaaaactaaaaaaaaattaaaaaataaaaaaagttttaaaaactgaaaaaaaaaaaaaaaaaaaaaaaaaaaaaaaaaa

SEQ ID NO: 564 - DNA, 2771 bp, Cricetulus griseus
  modified_base (2718)..(2718): a, c, t, g, unknown or other
gcaagcccatcacgctggacaccacggacttccaggagagcttcgtcacgtccggcgtgttcagtgtcacggagctgatccaggtgtcccgcacacctgtagtgaccgggacggggacccaacttctccctgggagagctgcagggccacctggcctacgacctgaacccggcgggcgcgggcctgcggaggacgctgcccagcacctcctccagcgggagcaagcggcacaagtcgggctccatggaggaggatgtggacacgagtcctggcggcgactactacacctcgcccagctcgcccacgagtagcagtcgcaactggacggaggacatcgagggaggcatctcctccccggtgaagaagaccgagatggacaaatctcccttcaacagcccgtccccccaggactccccccggctctccagcttcacacagcaccacaggcccgtcattgcagtgcacagcgggattgccaggagtcctcacccgtcctcagcgctgcacttccctgccacgtccatcctgcctcagacggcctccacctactttccacacacagccatccggtacccgccgcatctcaacccccaggacccgctcaaggatctggtgtccctcgcctgcgacccagccacccagcagcctggaccgcctgctctccgcccggcacgtcccctgcaaaccgtccctttgtgggattaggacggagggatcctcttgcaggacagtcctggtacctgggatagccgagctcgccctcccacgtcttcattgccaggggagtcccagaggggatggcccaagcctgcatttccagtggaaaattagaatgagagagaagctccctgccgactcccagcaattaaaaaaaaagacaggaggaaaaaaggacaaaaacaaacaggaaaaaaaaagacaaaaccttcccaaccaagatgacaaaaggtgggagctctgtggcgcctgctgttgattgacagctgcctgcagcccttctgcgccccaaggaccctgccatcacgcccagaccaggcgagcccggcctggcacccacacccagcaccaagagatggacagagtggacagagtgggccacccagccgggccacctttccccagacctctgccgccagccaccagcgccggcctcgggagacctccgctggccgtccccaccgacggtgtttgccaaagacaggaggctggaggagctgcccagcgctggccctgctggggacagatgtcccacaggtactttgggacccctgggagggtcctgcgtcagcctccgcctcggccctctggcccccctccttgcggacctcgtttgaaaggacatgtctctctatgcaatttgtccccagccccaccctggcatgagaggccacgcagctcccgacccccggcctcctcctctcgcacatgggaagtttcagcactttgagaaacaggtggggagccgggacccccccacgccgaggcccccggaggcgggaggtgccgcgatctaagtgcctaacccctccgcccacccgccgacccccttatccatcagggacacagagtggccaaggcaccccacccttgtccccatgtaccccagctcttattcaccgcacgcatccacgcaagccctccaagagagagaagaccccaccagggataagagctgggtgtccccaaacccaggctgaggtgtgcgctgtccctatacttctgccagtgccttacttcctggagacccaccctggggtgcctcactgcagggggataccccctttgcactttgaccccctgatgatgtggggcccggcacagggaccaagaaggctggtggaagtgctctctgaccccaggtgggagggctctggggtgatggggtgacgaggtgggtcctcagggaccctccaagcatgggggaccattggggacatcgcggaggtcactatctaggtgtagggctgaggccagtgagtttgggacaggctgtcttcagggtggacctggccagaccctcttgacccctcccaagccagccagctgggtcccccaggggtcaggacagaaccaactatttacctaactgcatggtgcttaaggccccgcgacaccccacccccaccccgggctgctgcgtgcatgacagctccaccttggtctgcccccgacccgcccgcgaccctcaccgcctctactaaaaaaggaaagaaaaaaaaaggatacacacaaaataatatatatatatatatatatatatccttaccaaaaaaaaaaaaaaaacagacaagcgattacatgaaataaaaaataaaatccaaaaggggtggtatttctatttgtaaaagaaaaatcaaaagaagaaagaaaaaattaataaaagaaaaaaaaaaggaactgggcatggtagcacatgcctgtgatcccagcccttgggaagctgaggcaggaggattgccataagttccaggtccagcctgggctagagtgagctgctgcctcaagtaaaaaacaaagaaagaaaccaaaaaccacaaacaaacaagaaaaaacactattaaggaagtacacaatattggtcatggttttgcccacagcatattccagtcatagccgcatatattacaaactcattttggttgcttgttttgttttgtggatgcgcctaagcaccattgactgcctgctgttcttgtttcttccctactgcaaaaaaanaaaaataaagggttaaaaaaaaggtaaaaaaaaagaaaaaaaaaaaaaaaaag

SEQ ID NO: 565 - DNA, 2771 bp, Cricetulus griseus
gttctactagttaaacttttactaggatctccctcgaaattcttcgaagataatatggaaacttggatgaacaattttcatacctcttgacattggataataagctcctacagaccgatgatgaagaggaagcaggcttattggagcttttaaaatctcagatttgtgataatgctgctctctatgcacaaaagtacgatgaagaatttcagcggtacctgcctcgttttgtcacggccatctggaatttactagttacaacaggtcaagaggttaaatatgatttgttggtaagtaatgcaattcaatttctggcttcggtttgcgaaagacctcattataagaacctgtttgaggaccagaatacgctgacaagtatctgtgaaaaggttattgtgcctaacatggaatttagagctgctgatgaagaagcatttgaagataattctgaggagtacataaggagggatttggaaggctctgatattgatactagacgcagggctgcttgtgatcttgttcgaggattatgcaaattttttgaaggtcctgtgaccggcatcttctctggttatgttaattctatgctccaggaatatgcaaaaaatccagctgtcaactggaaacacaaagatgcagccatttaccttgtcacatctttggcatcgaaagcccaaacacaaaagcatggaatcacacaagccaatgaacttgtcaacctaactgaattttttgtgaatcacatacttcctgatttaaagtcaaataatgtgaatgagtttcctgttcttaaagctgatggtatcaaatatattatgatttttaggaatcaagtaccaaaagagcaccttttagtctctattcctctcttgattagtcatctgcaggctgaaagtattgttgtccatacttacgctgcacacgctctcgaaaggctgtttactatgagagggccaaacaacgccactctttttacagctgcagaaatcgcaccgtttgttgagattctgctaacaaaccttttcaaagctctcacacttcctggctcttcagaaaatgaatatattatgaaagctatcatgagaagtttctccctcctgcaagaagccataatcccctatatccctactctcatcactcagctcacccagaagttgttggcagttagtaagaatcccagcaaacctcattttaatcactatatgtttgaagcaatatgcttatctataagaataacctgcaaagctaaccctgctgctgttgtgaactttgaggaggctctgttcctagtgttcactgaaatcttacagaatgatgtgcaagaatttatcccctacgtttttcaagtgatgtctttgcttctggaaacacacaaaaatgatatcccgtcttcatatatggccttgtttcctcacctccttcagccagtgctctgggaaagaacaggaaacatccctgctctagtgaggctccttcaggcattcttagaaagaggctcaagtacaatagcaagtgctgcagctgacaaaattcctggattactgggtgtcttccagaagctaattgcatccaaagcaaacgatcaccaaggcttctatcttctcaacagcataatagagcacatgcctcctgagtcagttgaccaatacaggaagcagatcttcattctactgttccaaagactgcagaactccaagaccaccaagtttatcaagagtttcttagtgtttattaatttatattgcattaagtatggggcattagcattacaagaaatatttgatggcatacaaccaaagatgtttggaatggttttggaaaaaatcattattccagagattcaaaaggtatctggaaatgtggagaaaaaaatttgtgcagttggcataaccaaattactcaccgaatgtccaccaatgatggacacagagtacaccaagctatggactcctttgttacaatctctcatcggcctttttgagttgccggaggacgacaccattcctgatgaagagcattttattgacatagaagatacaccagggtaccagactgccttctcacagctagcatttgctggcaaaaaggaacatgatcctgtagggcagatggtgaataacccgaaaatccatctggcacagtcacttcacaaactgtctactgcctgtccggggagggttccctcaatggtgagcaccagcctcaacgcagaagcattgcagtaccttcaaggctacctgcaggcagccagcgtgactctgctgtgaactgcttcttcctgaccccatgggcccaggatggtttcttaggaaccatgtggactcctgagcacagctctgctgaaacattacaggtttttcaacctcttgaatttgtcacaaactccatcttacagaggatagtaaataactgctgtaagcaaatgaggtgtttgtgttgatcatcaacataactggtaacttgtctcgttgtggcttcatgggacaagtatttacaatgccatgttatggccatggtctgtgttgagcatttgcacggtttggattatttcaaatttatagcagaccttgactgtggagacttctgtttctactcttttttttctgaagctcatatttctcgtcctttgtactattgtttcttataagcttttattggaaatgtgtcaactctccaagcagtgcacatttcgtagttgaagtctgtaatcagcaataaaaacacaaaatgtgtatctaaaagcatcttcaggacaggatttttggtgcttt

SEQ ID NO: 566 - DNA, 2770 bp, Cricetulus griseus
tcctcctccgaggaattctgtcccttccagctgccctgccctcccctctttaaaggttgacttgccctgcggcgctctaccgcgctccagccctttggcgcctcctgctcaaccccgccgcgcacttccacagcaaagcagaaggacgcccagggagatggagagcaaagccctgctcctggtggctctgggagtgtggctccagagtttgaccgcctcccaaggaggggtggccgcagcagacggggaagagattttacagacattgaaagtaaatttgccctaaggacccctgatgacacggctgaggacaattgccacctcattcccggaatagcagaatctgtgtctaactgccacttcaaccacagcagcaagaccttcgttgtgatccatggctggacggtgacaggaatgtatgagagttgggtgcccaaacttgtggctgccctgtacaagagagaacctgactccaacgtcattgtggtggactggctgtatcgggcccagcaacactatccagtgtcggctggctacaccaagctggtgggaaatgatgtggccaggttcatcaactggatggaggaagagtttaactaccccctggacaatgtccacctcttggggtatagccttggagctcatgctgctggtgtggcaggaagtctgaccaacaagaaggttaacagaatcactggcttggatccagctgggcctaactttgagtatgcagaggcccccagtcgcctttctcctgatgatgcagatttcgtagacgtcttacatacattcaccagagggtcacctggccgaagtattgggatccagaaaccagtaggacatgttgacatttatcccaatggaggcactttccagccaggatgcaacattggggaagccattcgtgtgattgcagagcggggccttggagatgtggaccagctggtaaagtgctcccatgagcgatccattcatctcttcattgactccttgctgaatgaggaaaaccccagcaaggcttacaggtgcaactccaaggaagcctttgagaaagggctctgcctgagctgcagaaagaatcgatgcaacaatgtgggctatgagatcaacaaggtcagagccaaaaggagcagcaagatgtacctgaagactcgctctcagatgccctacaaagtcttccactaccaagtcaaaattcacttttctgggactgagagtgacaagcagctcaaccaggcctttgagatttctctgtatggcacagtggccgagagtgagaatatccccttcactctgcctgaggtctccacaaataaaacctactccttcctgatttatacggaggtggacatcggagaactgctgatgatgaagctcaagtggaagagtgattcctacttcagctggtcggactggtggagcagccccggctttgtcatcgagaagattcgggtgaaagcaggagagactcagaaaaaggtcatcttctgtgctagggagaaagtgtctcatctgcagaagggaaaggactccgcagtgtttgtgaagtgccatgacaagtctctgaagaagtctggctgatactgaacaaaccaacaagagaagaaagcacaagagttctttgaagactgaagtaaacgaagtaaattttataaaaaaaaaaaacaatacccttgtttgggtgtttgaaagtgggttttcctgagtattaatcccagctctatcttgttagttaagttagaagacaggctcaaatactaaaacgtggctaatacaaggtgaggagtctcatggccaatggcatgtcttcccgcatcaaaggacagcagataggagaagcatggtgccttttgtcccataagaaggaatcatttgttcccaataaataggactccttcctgtgacccgattggtcatggtcgaaaatgagtgagaagtgagggcctcttattttgttagaatttctgaggctttaaaactgagaccttttcaagttttcttgtggcatgagtcagatccatttcttcagcagttgaaatacctggcctttgtaactagttctctcaccattgaaaaaaaaaaaaaaaaaaaaagtaatccaaagctacacagagaaaccctgtctcgaaaaacaaaaagaagaagaagaagaagaagaagagagggagggagggagggagggagggagggagggagggagggagggagggaggaaggtaaggtaaggtaaaggaaggaaggaaggaaggaagggagtgagggagggaggaatgaaggaaggaaggaaggaaggaaggaaagaaagaaagaaagaaagaaagaaagaaagaaagaaagaaagaaagaaagagagaaagagagaaagagagaaaaaaagaaagaaagaattatttatgaactagatcttatattttcagaatatttttactatatattaatataaagtgataaagaagtgctatgccagaggctattgctgcaaacacaaactgtgaaactgtaggtgtctgaacacctacccacagacaaagccccacaagtatagctgtcattctgtgtcacttggaaagggaaaagagtcaagggacgtactggagagtgtcagagtagtagttccggatatgctggaatgttagcccttgctaggagaagggtggttgtgcctatgtgattaggacaaaagtgactgatttcatcaggcttccagtcaattctaacaataaaatgatgtgcaatttgtcactggcatcccctttattgctaattcatt

SEQ ID NO: 567 - DNA, 2768 bp, Cricetulus griseus
gtaaacccactgcagctgagccttcttacctggattgaagaagacgctttcctggccacaagccacagtcactccagcctgcagtctctcattcaccgtttgactgtggtcccttctgagatcactgaagagcaaggacagctgaatgtcagttcatctgtgacggtggatggggtcatcattggttatgttacaattccaagaccaagtcaacggtgatacagctggctgatggccaagtgctcaagtgcctttgggaaccaccatctctggctgtggaaccatggaagagctctgaaggattcctacaggctggtctgtctggcagccaggaggccaatggagaaattctacggaaagtggaaagaggttcacggattgtcatagttgttccccaggacacaaaacttaatactacagatgccgaggggaaacttggaggttgttcatcatcggaccttggtcttggctcagattcggaagtggctggacaaacttatgtttaaggaagcatttgaatgcatgagaaagctgagaattaatctcaatctgatttatgatcataaccctaaggtatttcttgaaaatgtggaaaccttcataaagcagatagattctgtaaatcatattaacttgtttttcacagaactaaaggaagaagatgtcacaaagactatgtacccttcaccggtttacaagagtgtccaggtgtccaaggatcctgacaggaagaatattgatcgtatatgtgatgctatgagaatagcaatggagaacatcaatccacacaagtactgcctgtcaatactcacatctcatgtgaagaaaacaaccccggaactggaaattgtgctgcagaaagtacaccaacttcaaggaaatgatccctctgttgctgatactgtgagtgcagaggaggccttgaagtacctgctactcctggtagatgtaaacgaattatataatcattctcttgggacttatgactttgatttagtcctcatggtagccgagaagtcgcaaaaggaccctaaggaatatcttccatttcttaatacacttaagaaaatggagcctaattaccagaagttcaacatagacaagtacttgaaacgatatgaaaaggccattgggcacctcagcaagtgtggacctgagtatttcacagaatgcctaaactttataagagataaaaacttgtataaagaagctctgaagttgtatcaaccagattcactgcagtaccgggtgatcagtgtttcgtatggggaacacctgatgcgggagcacctgtatgagtcagcagggcttgtgttttcccgatgtggggcccgggagaaggctctttcagcgtttttggcttccggcagctggcagcaagctctctgtgtggctgcccagcttcgactgactaaagacaagatagctgcccttgctagaactctggcaggaaagctggttgagcagaggaaacacagtgaggcagccatagtcctggagcagtatgctcaggattatgaagaagcggtgctccaactgctggaaggagctgcctgggaggaagctctgaggctggtatacaagtatgacagagtggatattatagaaaccagtgtgaaaccttccatcttagaagcccaaaaaaattacatggcctttctggactcacagacatccacattcattcgccataaaaaccgtttgatggtggttcaagagcgcaagaagcaagctccacaggtgcacgtggataaggaggtggcccatcgtccagggtcagacctcttctccgagagtggcagtgagatgagtggcagtgagatgagtggcagatactcccacagtaactccaggatatctgcgaggtcatctaaaaaccgacgcaaggcagagcgcaagaagcacagcctcaaagaagggagtcctctggagcacctggcccttttggaggcgctaagtgaaataatacaaagcattgacaagttgaaagatgaagtacaggctatcttgaaggtgctctttctcttcaagtttgaagagcaagggaaggagttacagaaggcctttgagagtactctgaagctgatggagagggcagttccagaaatctggtctcttgcctgcctgcagagttcagtgccgtctgtcctaggtccgagttccactgtgaatagcatcactgcctcttaccagcagcagcagcctcctgcccctgttctcgatgctgggatttatataccaccaaagattgatcagagaatcccgtggaagctgagcctgctggaatgaatgatttgttaggaagacaccactgggaggaccatttgtccactcactcctcatcatgcttctagctccttagctagtactaggcagtctggtatttatgttgagtgtacatcttaagtactatcagacttcgttttagccagcatattacagtgttttttaaattgctgtttttagctgggcatggtgaagcatgcctataatcccagcagcccaggaagctgaggcagaaaggattgatgcaagttcgaaaccagcgtggcctcatcattgatttgatcttcagttcctgttttttaataggaaatgatgtttcattctacctcccccaaaaagtcaagtggaatcacatttctaagttgttttgcattgctgacatagtgtattgtatgaaaacagactattagtgctgccagcctttagtcagatgtgaatgcatagctggcatcttttcacccgactcaaagctgaataaaaag

SEQ ID NO: 568 - DNA, 2768 bp, Cricetulus griseus
caggaacccacacggttgtgcgagtactatcagcccacggccctgctgcgagatgccgaagagggcgagtttctcctgagcttcctgcaaggactaacgtccttgtcctttgaactctcctacaagtcggccatcttaaatgaatggacactcaccccattgtctctctctgggctttgccccctctctgagcttgaccctctcactacctctggggcagaattacaacggaaggagtctctggattcaatttcccattcctcaggctctgaggacattgaagtccagcactctggccataagatccgcaggaacaggaagctcactgcctcttccctcagcctggatacagccagttcatcccagctatcctgcagcctaaactctgacagctgtctgctccaagagaatggctctaggagtccagaccgttctgacggaacccatgtcctacgactcagatctgggcccagtgaatgctgatgactctgacaggtctctgcaagaggtgttgtcagaattcagcaaagcccaggttaactctgtgccaagcagcggaccaagccaagagacagagacctccacgttccagacccctctctccctccacagcctagctactggcacacatgtgcacttggaggggcctgcagagctccttcctgcccacgcatcctctgggaccccaattggtggctacaagcatcagctacttccccaggaaaccccagatgtgcagcagctgggcactgcccaagctgcccctgcagggagcacttcagaccagcagccttcaggtcccgtgggcggaacagcaggccaagggagtggtcagccgaaggccctgcagtatggccgaattgggccgaagcttgtggtttcctctcctaccagtccgtggagagacctggtccgaaaggtgctagcatctatttggaatcggctgaggaggctgtgacactcggagggagtctggatgaaaactgtcaagaggtgctgaagtttgccaccagggagaatggcttcctgctacagtaccttgtggccatccccaccgagaagggtcttgactcccagggctgcttctgtgcaggctgctcacggcagattggcttctcctttgtacgacccaagctctgtgccttctctggcctgtattactgtgatttctgccatcaagatgatgcctcagtgattccagccaggatcatccacaactgggacctcacaaagcgcccggtctgccggcaggccctgaagttcctggcacagatccgggcccagccccttatcaacctgcagctggtgaatgcctctctgtatgaacacgtggagcgcatgcatctcattggcaggagccgggaacagctgaaacttctgggggactacctgggcctgtgcagaagtggtgccctgaaggagctgagcaaaaggctaagccacaggaattatctcttggagtctcctcacaaattcagcgttgctgacctccagcagattgcagagggggtgtatgaaggattcctcaaagccctgattgagttcgcctcccagcatgtctaccactgtgacctgtgcacccagcgaggcttcatctgccagatctgccaccaccatgacatcatctttccctttgagtttgacaccacagtcaggtgtgccgaatgcagaactgtcttccatcagagctgccaggctgtggtgaggaagggctgtccccgctgtgcccgccggcgcaagtaccaggaacagaacagtgtcagctaaccctgctatcctgcccttccgaggccatccaactgggtttgtcgtcagcctaggcttctctgtctccctgtaaggaagactctcaggtgtgcccagagctcttgcctccagagaaggtccaggagtctcagtgatgccccatcggccccttctaacccttctcgctccaggaggtttcccccttcatatttaaacagaaaatatttttttattcttgaccctacccaagtgaccagcaccagcactgtcagcactttgagccttccttgttcagaaagtccctggtcttgccaacctcatccccatgccctccttaccctgccagggtagagcaggctagacaccagaaaggctccaagctccaaactggagaagaggcaccatcctttggctacagagaggtagagggatgtgcctagaagctgccctgtagaagcttcatcagccctagtctcccaaagccctgcgttcataaaccttcagttttaccttgcccagcaggacactgcagttcccagttgagctccctagaagcagggttacccttaagaggctcttgggctggtgtagcatcccagaattgttagcaaggtcatgttcatagccttgaggcatttaggagagtagctatgtactatgctatcctcacctctcctggaccccacagcccttctggccatcccagaatattcaacttagagccagtggcctcaggtggaatggagggcctccctggaaatgtgcctctcatgtctagagaagaggtttcccctccctccctgagctgagtaagctgactcaccttgctcaaatgagtcactttacctgccaccagaagagctcacgtgaacctcagcagtgcccacactaggtcaaaaagatttttttttatgcaatattctgacaagtgggccttgacaatatggagaaggaactgcttctgtggtatttgactgattttgcagtaaagaactggtctttctaaaaaaaaaaaaaaaaaa

SEQ ID NO: 569 - DNA, 2767 bp, Cricetulus griseus
ggagggcttcttcgaccgtggcgccagcatcgtggaggacaaactggtggaggacctgaagacccgggagagcgaggagcaaaagcggaaccgggtgcgcggcattctgcggatcatcaagccctgcaaccatgtgttgagcctgtccttccccatccggcgcgacgacggctcctgggaggtcatcgaaggctaccgggctcaacacagccagcaccgcacgccctgcaagggaggtatccgttacagcactgatgtgagtgtggatgaagtgaaagccctggcttctttaatgacatacaagtgtgcagtggttgatgtgccatttgggggtgctaaagcaggtgttaagatcaaccccaagaactatacagataacgaattagaaaagatcacacggaggttcactatggagctggcaaagaagggatttattggtcctggcattgatgtgcctgccccagacatgagcacgggtgagcgggagatgtcctggatcgctgacacctatgccagcaccataggacactatgatatcaatgcacatgcctgtgttactggtaaaccaatcagtcaaggaggtatccacgggcgcatctctgctactggccgtggtgttttccatggaattgaaaacttcatcaatgaagcttcttacatgagcattttaggaatgacaccagggtttggtgataagacatttgttgttcagggatttggtaacgtgggcctgcactctatgaggtatttacatcgttttggtgctaaatgtgttggtgttggtgaatctgatgggagcatatggaatccagacggtattgacccaaaggaactagaagatttcaagttgcaacatggatcaattctgggcttccccaaagcaaaggtctatgaaggaagcattttggaggctgactgtgacatcctaatccctgcagccagcgagaagcagttgaccaagtccaatgcacccaaagtcaaagccaagatcattgccgaaggagccaatggaccaaccactccagaggctgataagatcttcctggaaaggaacatcatggttattccggatctctacttaaatgctggaggagtgacagtgtcttactttgagtggctgaagaatctaaatcatgtcagctatggccgattgaccttcaaatacgaaagggactctaattaccacttgctcatgtctgttcaagagagtttagagagaaaatttggaaagcatggtggaactattcctgtggtccctacagcagagttccaagacaggatatcgggtgcctctgagaaagacattgtgcactctggcttggcctacaccatggagagatctgccaggcaaattatgcgcacagccatgaagtataacctgggattggacctaagaacagctgcctatgtcaatgccattgagaaagtcttcaaggtgtacaacgaagctggcgtgaccttcacatagacaggtcaccactaacttctttaccacccacttcacctataacttctgcagacctgtcacaagtttacatgtaaccacagaaatctgttcttgtgactcattagctaatggacactgttctcagcaagtcagtctgaatcagccccttaagagagattaggttagaggatcatgtacaagctgatgtgtaaaagtaggaatcacgtgtatcagaaagccggttaggtactttttctacataaagtccctgcctgcctcctggctgtgctgccttgttctaggcccttcccaacagggtcagtgctgttgccagggaaggcagtcaagagcactcagccacttctggacaagtctgggaacttggacacataaaagaataggtgtgtggcattttccaaaggtggcatggtccttaaatgagttattgctattttacatctacaaaataactcagttttctaagttgcaaacaaaaataaaagctatttctcttatgtattttattctttcagaataaaattagtacatgctgctgtaataaaattgcctttaatcacttaagcctaaccttgactcaagcagtgaatgcctaaaaacataatcaatggaagaagctagttttttacagcataaaacagaatcatttatatagcttattggcactgcattgctgtccaggaaaaacaaagtggcactatggaagcactctcctcatacctgcaagtgacagggactctggggaatttgtagcacagtccagggagagcaataacctatttaccatgaaaatgacttgttcctcccatctgaagatctattgtgttgagtaattgaaccataattcaaatagtgtcccagaaaaaaacctttgggctccctgtttggagtctggctggctccaagcacagccagtggccctcaattgactgtatgccccttcttctgaggctttgcattctgcataccgcttcactaacagcaggctggtgactgcctggagttgacttttgtttggggagtcattggccagggcttttgaacaggagtgttccacagaagtaccagatattatttatatgagaatgagtgtcttttttttaacaatatcctttcagaaatttctaactactttgtaactgcatgattaacttggtgataaaagcagttattaaaagtctaccttttccaaaagattgtttcttttctgtgttttcatattttatagtctcttagtaaatgataaaacagtaattgaggttcaaaaaattttcataacttcctatgtcacttcttttgtta

SEQ ID NO: 570 - DNA, 2766 bp, Cricetulus griseus
agtgcaattcaatgacagtaaaggcgggaaacagaagaagcggccggaggccctgaggatgattgccaaagcagagcctggcatccctcctcctcccagagctcccgcccctgcaccaccagggactgtcacacaggtggatgttagaagcagagtggcagcttggtctgcctgggcagctgaccagggtgactttgagaagccccggcagtatcaggagcaagaggagactcctgagatggtggcagcccggatcgacagggatgtgcaaatcttaaaccatattttggatgacattgaggttttttatcacaaaaactccaaaaaagcagctgaagcattttcggagcttttctaaaaaggaagaaaaagcaaagaaaagtaaaaagaaaggacctggagagggtgtgttaacgctgagggcaaaacccccacctcctgatgaatttgtcgactgtttccagaagtttaaacatggattcaaccttctggccaagctcaagtctcacattcagaacccaagtgcttcggatctggttcacttcttgtttactccactaaatatggtggtgcaggcaacaggcggtcctgaactggccagttcggtactgagcccactgttgacgaaagacacagttgattttttaaactattcggtcactgcggatgagcggcagctgtggatgtcactgggcgacacttggctgaaagtcagagcagagtggccgaaagaacagttcatcccaccatacgtcccgaggttccgcaatggctgggagcccccgatgctaaacttcatgggtgttcctacagaacaagacatgtaccagctggccgagtccgtggctaatgtagcagagcaccagcgcaaacaggacagcaagagactgccctcagagcattccagtgtgtccagctattctccatctgatggctatgcattcagtaacagcatgtacaacagaggaccgcatctggaccaagcagaggccatggctttcaagtcaatgcccaatcgccatgcagatagaagtcatgactcagtcaaaacacaaactaagaaatatgccaaatccaagtatgacttcatggcaaggaacagcagtgagctctcggtcctgaaggacgaagttttagagatacttgatgataggaagcaatggtggaaagttcggaatgccagtggagactctgggtttgtgccaaataacattatggatattgtgagacccccggaatccggagtggggcgtgccgacccccatacacacacaccatacagaagcaaaggatggagtatggtccgagctcagctgatactccttctgccccgtcaccgcctcccacaccagcgcctgttccggtcccccttccaccttctgcaccagcacctgttcctgtgcccaaggttccagcaaacgtcacccgtcaaaacagcagctccagcgacagtgggggcagcattgtgcgggacagccagaagtacaaacagctcccagtggaccgaaggaagtctcagatggaagaggtgcaggacgagctcttccagaggctcaccatcggccgcagcgccgcgcagaggaagttccacgtgccacggcagagcgtgccggtgatcaatatcacttacgactccacagcagaggaagtaaagacctggctgcagacgaaaggatttaaccccgtgactgtcaatagccttggggtgttgaatggcgcacaactcttttctctcaataaagatgagctgaggtctgtctgccctgaaggtgccagagtctttagccaaatcaccgttcagaaagctgctttggaggacagcaacgggagctctgagttacaggaaatcatgaggagacgtcaggagaagatcagtgcggcagccagcgactcgggagtggagtcttttgacgaggggagcggtcactgaacattgttggacatgctttgtttgcagaagccttgaagggaatgtcaaactcagctctctgtgactgaggtgcctgtcatccagggaagaagctcagtgagactaccctctgcttacttaagatctctcctctgacatacctaatggcagcatccttaggtttatttaaagttcttaatgccaacagttttaaagaaatcacatgagctgtacaatgtagccagaccttgaatgtgcaaataggagactatagtacgttctcaagacgttttgctcctcgaagccctatcagttgtaaagtcttgcatagattgtactttgatttagtttatattctgcttattatatatactgtgtaattaaatatgggaaagcacagtgggaagtaagtcacgaacactcacaatcaatgaaacaaagtagcccacgttggtgtttattacagtattttgcttaataaaagcctcagttataaatattgatataagtagtaaaaggatattgggtcgttttatgtgttttatctgtgtaacaagggacacttaatttacatgtactttaaccccatgaaagaatctagatagagagaagaaaaatagctaacattcaacaaatattatttttggaaacacgatttttgtcattaaatgtaatattatttcacatatataaagaagatgttatgtaagaatgttgtatattttaacaaatccatttagagagattatctagatgcattaatttttcatagtgcctttttcacttgagtcagctggaaagagtctgcaataagcagtattgctgtatattaataaatagcttctatctcatcaaca

SEQ ID NO: 571 - DNA, 2765 bp, Cricetulus griseus
ggctgcgctgctttggtactactctactagagtttgtaggaaaagatctacttattgtaagctttcttgatatagaaagagagtgtgggggattctccgatctgctaacagaacaggacctttcgtggagcaagaagaaaggtttggctccccgggtggaacagggattatcctcctcctcccccttaagagtcatgctcaagagagacactctggccaactttcctggcagagattcacttccctttgatttccaggggcattcaggacctccctttgcaaatgtagaggagcattctttcagctatggagctagagatggaccacacggtgactatcaaggaggggagggacctggacatgatttcagagggggagacttttcatcctcggatttccaaagcagagattcagcacagttggacttcaggaatagggacatgcattctggggattttcgggataacaagacactgattacagaaacattgaatactgtgatgtagatcacagattgccaggaagccagatttttggctatggtcaaaacaagtcttttccacaaggcaaaatgtcccgagatgcccaacaggaacttcaggatcaagattataggactggcccaagtgaggagaaacctaacaggcttattcgattgagtggggtgccaaaaaatgccacaaaagaagagattcttaacgcctttcggacttctgatggcatacctgtgaaggagttgcagttgaaggagtataacacaggttacgactatggctatgtctgcgtggagttttcactcttggaagatgccatcggatgcatggaggccaaccagggaactctaatgatccatgacaaagaggtcactcttgagtatgtaccaagcccagatttttggtactgcaaacgatgtaaggccagcacaggtgggcatcagtcttcttgttcattctgcaagggcccaaaagaagaagtcaagcaagaactggtatcctatcctcagcctcagaaaacatccataccagtaccctcagaaaaacaacccaaccaaccacggccagctgataaggaacatgaattcagaaagcgggaagaaggacaagaatcaagatcaggacatcaaaagagagactcagaaagatactttcctcactctcgaagagaagggcttactttccgaagagacagagaaaaggagtcatggtctggagagacacgccaggatggagagagcaaaacaatcatgctaaaacgtatctaccgttccactccgcctgaggtaatagttgaagtgctggagccctacgtccatcttactactgccaacgtccgtattatcaagaatagaactggccccatgggtcacacttacggctttatagaccttgactcccatgcagaagctcttcgagtagtgaagattttgcagaaccttgatccaccatttagtattgatgggaagatggtagctgtaaacctagctactgggaaacgaagaaatgattctggggaccattctgaccacatgcattactatcagggtaaaaaatatttccgagataggagaggaggaaacagaaattcagattggtcctcagatacaaatcgacaagggcaacagtcatcctctgactgctacatatatgattctgctactggctactactatgaccccttggcaggaacttactatgaccccaacacccagcaagaagtctatgtgccccaggaccctgagtcaccagaggaagaagagagcaaggaaaagaaatccaccagtcaaggaaagtcaagtagcaagaaagaaacatctaaaagagatagcaaagagaaaaaagacagaggagtaacaaagtttcaagaaagtacaagtgaggggaagtcccccccagaagatgtttttaagaagcccctgcctcctactgtgaagaaggaagagagtccccctccacctaaggtggtaaacccattaattggtctcttgggtgaatatggaggagacagtgactatgaggaagaagaggaagaggaacaggcccctccggtgcagcttcgcacagcacagcctcagcagcgggaggagctgactaaaaaagagaatgaagaagacaaactcactgactggaataaactggcttgtttactctgcagaaggcagtttcccaataaagaagttcttatcaaacaccaacagctgtcagacctgcacaagcaaaacctggaaatccaccggaagataaaacagtctgagcaagagctagcctatctggagaggagagaacgtgagggaaggtttaaagaaagaggaaacgatcgaagagaaaagctccaatcttttgattctccagaaaggaaacggattaaatactccagggaaactgacagtgatcgtaaccctgttgataaagaagacactgacactaatagcaaaggaggctgtgcccagcaagccgctggctggaggaaagggacaggcctgggatatagccatcctggattaggttcttcagaggagactgaaggccggatgaggggacctggtggtgccccaggaagaaccagcaagagacagtccaatgaaacttaccgagatgctgttcgaagagttatgtttgctcgatataaagaactcgattaagagtggagacaccccacaggacacaacctccttcttgttttgtttgtccatctcttctttcttttgttttgttactgttcttgctgctagtaacttttttaaataacttttttcaatgtaagaaaaa

SEQ ID NO: 572 - DNA, 2764 bp, Cricetulus griseus
gaaatgaagaagccagtaagcaactggagagttcaaggcagcttgcctcaagatttcatgaacagtttattgtacgagaagatctgatgggtctagctattggtactcatggtgctaatattcagcaagctagaaaagtacctggggtcactgctattgatttagatgaggatacctgcacatttcatatttatggagaggatcaagatgcagtgaaaaagagctccaacagaggaagagagggagagcttcctgcgcagaggagacggacggcggcgtggagggggaggaagaggacaaggaggaagaggaagaggaggaggcttcaaaggaaacgacgatcattcccgaacagataatcgtacacgtaatccaagggaggctaaaggaagaacagctgatggatcccttcagaatgcctccagtgaaggtaaccggctgcgcacgggtaaagatcgtaaccagaagaaggaaaagccagacagcatggatgggcagcaaccactcgtgaatggagtaccctaaactgcgtaattccgaagttatatttcctctaccatttccgtaattcttactccattttagaaaactttgttaggccaaagacaagtagtaggcaagatgggcacagagcatgaaatgaacacagattctgcaaagaattaatttgatattggccataaaatacaatcttccagattttgcacaaaaagatcttgaaattttgaagcatactttttaagtacacttaacacttcagggcaggattttacttttattttttaaaaatactaagcagtgatctttattaactaggaccattttcctgcattgggctataactcagcagtatgtttcagtctttctgagtaaatcacatttgtggtaatcatcctagatctctgtcttcagtctcatataaagtctccaggaagtgctgtgccatttcatgtcctgtgtcagtttatgttttggtccacttttccagtattttagtggaccctgaaatgtgtgtgatgtgacatttgtccattttctattaagcaaaaaaaagttagtaatgatctgttgcctttttaatatcttggcaggtaggaatattatatttggatgcagagttcagggaaaagataagttggaaacactaaatgttaaagatgtagcaaaccctgtcaaacattagtactttatagacgaatgcatgctttccatatttttttctttacataaacatcagcttaggcagtataaagaataggacttttttgtttttgttttgttgcactgaagtatgagaaatagtgttattggaagggatgtgtaatttttctgtatagacaggagaagaaataactatcttttcatttgggagaggctaaaataatgttttcagctacttgcaaatcttcctggtcgaaagttagtagggtatgcctactctttggcctgatgatgaatttcaacttagagacttcttcttttgtcctccccaaattttgtttttcattcatattttgtgttaaagcttattttgggggagatatgaaggtcattttcatgaacacataataaccctcagaagttgaggtactttgtctgagaaacattgaaagcaggttaaatttttgtatctttgaaatatgaagtctaatgtatacgcagaaattagaaaaacagacctaggattggttaacaaataataactttttttttttcctttttgtatgggttgagtctttatttttgtttcttctttttttttaatgaatgaaattactaaagaaaaatatgtgaaggaccttcactctgagatgttatatttttcctaaaaaataactccgagtaggggtaccactgaatctgtacagagccgtacaaaccgaagttctgcctctgatgtactttgtgaatttgtttctttgaattttcatttttcatttacttttccttgcatacaaataagcatataaaatggtaacgaactgcacatgatttcacaaatattaaaaggtcttttaaaaagtattgccaaacatcaatgttgatttctagttatttattctgggaatgtatagtatttgaaaacagaaattggtaccttgcacacatcatctgtaagctgttcggtttaaaatactgtagataattaaccaaggtagaatgaccttgtaatgtaactgctcttgggcaatattctctgtacatattagcgacaacagattggattttatgttgacatttgtttggttatagtgcaatatattttgtatgcaagcagtttcaataaagtttgatcttcctctgctaaattgatgctgatgcaatccttacaatgattgctcttaaatttttaagataggaaagaaatctataagaagtgttctgttacaaaatgtaactgttaccattggaaattcacacgtcataggaggttagccgttatttaccaactttcaagaacctaatcttttaaataaggtagaaaaaccaacaaatggtacacagtcacaatgtaccattaaaataatgcactaagtctcttttttacaaaggctgaattcagcaaggcgctaacttgcttaaatgtgaattactaacttctaaaactgtaatttgattcacatgttttcaaatggagttggagttgattcatattacaatatttgtgtgcaaaatgtgtatgtttttcagtttaaagtcatgtttttaaaatcttattaaagtttcaaaaatctgaagattgtttatcttatctagatgtaaa

SEQ ID NO: 573 - DNA, 2763 bp, Cricetulus griseus
  modified_base (2714)..(2714): a, c, t, g, unknown or other
gggagtctcgtgtccgcggtgccgttactcgcagtcgggcggcggctgaggctcagcgcagagcgcaggtagcgggttagcagcagcagcagcagccgcggaggcacctcggcggtcagagcccctgcgctagtgcagccaccttcgcctgctccgcgcttccttccttcgctcgcaccatggctgatcagctgactgaagaacagattgctgaattcaaggaagctttctccctattcgataaagatggtgatggcaccatcaccacaaaggaacttgggactgtcatgcggtcactgggtcagaacccaacagaagctgaattgcaggatatgatcaacgaagtggatgccgatgggaatggcaccattgacttcccagagttcttgaccatgatggctagaaaaatgaaagatacagatagcgaagaggaaatccgcgaggcattccgagtttttgacaaggatgggaatggttacatcagcgcagcagaactgcgccatgtcatgacaaacttaggagaaaaactaacagatgaagaagtagatgaaatgatcagagaagcagatattgatggagacggacaagtcaactatgaagaattcgtacagatgatgactgcaaaatgaagacccactttcaactacttttccctctagaagaatcaaattgaaatcttttacttacctcttaacaaaaaaaaaaaaaaaaaagaaaaagttcatttattcattctgtttctatctagcaaaactgaatgtcaaacgtaccttctgtccacacacaaaatctgcatgtattggttggtggtcctgtcccctaaagatcaagcccccacatcagttttacagtataaatactcgtactaccttctaaggaagcacctagtggactccttaaagttccatttgctaatgattaataatacactgtttgggctggccagtttctcatgcatgcagcttgacgattgagcacagtcaggcctttgtattaaaaccaaaacagaaaaaaacaaattcaaaacctcagatgggttctacaatttgttgggataaaattgtcagtagccagtttactgcaaacaaacatttaaaattggtttacctcgggatgatgtgcagaaaatgggtgaaggttacacttggagacacagccccagaagtaacttccagtgctccaatcccatggtgacaatgacagcctggtggcatgcctgagtatgatggtttagtgctgtgtgcattgcactagagggaaatgaacatcaaggctgtcaccaaatcacacaaatttttaataagaaatgtttaccaagggagcatctttggactctctgttttaaaaacctttcaaaccatgactcggagccagcagagtaggctgtggctgtggacttgagcacaaccatcgacattgctgttcaggaaattatcatttacgtccattccaagttgtaaatgctagttcttttatttttttttttccaataaaaagaccattaaacttaaaaggtgtgaagaagtgaatggcagtagctatgtcttgtaagggattgaattgcccagctgtggacccagcctcgggcttgtggtctgagctcttggtagtttcaaaggagttggaggtgactgattttaaaaacttacctcctattaccttttaccaagtctttgtagaagctgggtagactctactagagaagccccatagcctgtcccaaaaggctaccttcgaaccaggattcttgtgtggtcaggaatcctgcatgggaaccagaaaccctaaccccctgggaacgtgaagccgtcaagtttggagcggtgggaggcagagcacccctacctcctgagccttttcttctgacaccctggagcacaagcagcccagggtttggtgttagtctgagtttgtgaggggaaagagtaggctgtcaaggcagtacccctggagtcagatagcactttgctgtaaacgccctcacttaagtactctataaatatatacatatatttatatatatatatatatataaagtgactagttagctggcatcctgctttagcctgagacttgccctaagaaactgccgagtctttggcacacttcagagctgtgttctccgtctgttcgggggaactgttgagcaaggcaacaacttgatagttcagatgagctttaatgtgctgttgccagggaaggctttctgtattttttttttgtacaaatttttgcacattttaattggtgtctttgagcaacttaaacacattgaagatgagctgttgtacatagttttatattctctttataagtgcatgtccaacttgtaaccatattgtaatgaatggctgtccagtaggcctagcgttactatcacacaagagggatagcatctatcattcaaccctcagcatcctgggaacttcttcttgaacaaagaataaatttggacaagtcagctattagttcaattaatcttagccattagaattatttcttgtgtgtcctaaacactacttttttttggcagcaaccagatttatactgttgtgtcttaaccgacccactcagctggcagtcgccttactttttttttttaaatatcccttgaagttgtcctgtaggagacaaaattctttgctgtttatccctttgagtaagaaggtgggatgtgtgttcttcccctagacctactacaatgtcattaaacncctatagcaaggatggtggtggtccttctgttcctgaagtcacccttca

SEQ ID NO: 574 - DNA, 2762 bp, Cricetulus griseus
gacctgagatctgagtgcagctctgatttgggttaagattctgtaactagtccagacatggatgacataactcatggagccaccatctgacctctcctccctctcagtcagagtctctgcttgccatgtttgatccactgtcttcacatgatggggcctctgctgttgtaaggccgaaggttcactacgcccggccttcgcatccgcccccagatcctccaatcctcgaaggtgcagtgggaggaaatgaggccaggctgcctacctttggttctcacgtcttaactgcagctgaaatggaggcattcaggcagagacactcttaccccgagagactggttcgcagcaggagctctgacatagtatcttctgtgcggcggcccatgagcgatcctagctggaaccgccgtccggggaatgatgagctccctccagctgcagccactggtgctacttcaggccttggtggagaaagcgctttgtgtcagctatgcctaaagctcctataccatttagaaagaaagaaaaacaagaaaaagacaaagatgatctggggcctgacagattctcaacactcacagacgagcccagccctaggctcagtgcacagactcaggttgctgaagatattctggacaaatatcgcaatgccattaaacggaccagccccagtgaaggcgcaatggcaaatgatgagagtgcagaggtcattggtgatggtgaaagtgctcatgattctccccgtgatgaagcgctgcagaacatctcagctgacgatctcccagactccgccagccaagcagcccaccctcaagattctgcattctcttacagagatagttaaaaagaagctgaggcttgcgctttgctctgcggactctgtagccttcccagttcctaacccatccagcaaggaacggattgcccgaccacacagacccagaagacaatgaaattgtatgcttcttaaaagttcaaatagctgaagcaattaatttgcaagataagaacttaatggcacaacttcaagaaaccatgcgttgtgtgtgccgctttgacaataggacttgtaggaagctgctggcatccattgctgaagactacaggaaaagagccccgtatattgcttacctcacccgttgtcgacaaggactgcagaccacacaggctcacttggaaaggctcttgcaaagagttttgagagacaaagaggtagccaatcgatactttaccactgtctgtgtgcggttgctgcttgagagcaaagaaaagaagatcagggagttcattcaagactttcagaaacttactgctgctgatgataaaactgctcaagtggaggattttctccagttcctgtatggtgcaatggctcaggatgtcatatggcaaaatgccagtgaggagcagctgcaggatgcccagctggccatcgaacggagtgtgatgaatcggatcttcaagcttgctttttaccctaaccaggacggggacatactccgtgaccaggttctgcatgaacatatccagagattatctaaagtagtgactgcaaaccacagagctctgcagataccagaggtctatcttcgtgaggccccttggccatctgcacagtcagaaatcaggacaataagtgcttacaaaaccccccgggacaaagtgcagtgcatcctgagaatgtgctccaccatcatgaacctcctgagcctggccaacgaggactctgtccctggggcagacgacttcgtccctgtgttggtgtttgtcttgataaaggcaaacccaccctgcctgttgtccaccgtgcagtacatcagcagcttctatgccagctgtctgtctggagaggagtcctactggtggatgcagttcacagccgcggtagagtttattaaaaccatcgatgacagaaagtgaccatgaccaggctcaccaaggcatcagactgtagccaggaaacagatctctctgaagattgttttatctaatatgtacagcttccagacgtttccacatggctcttcctaagcagattaacaagctaacacgctggttctctttcccttcagctgttctgagttgcatattttatttcttgtctccatgtagagagtagtactgcaaaagggaccatgtttttccaggtgttttaaaatattaaaaaacagaacagaatcttctaggaaacacccagatctctgttcttggatttcccgtttgtccctttcattttagaaagaacagtgtcccatagacacactttcctgagttgaaaagctaaggaggacatgtaaatataatatatatttatatttgatgtgatatgggcatctccagactctaacaaacaggggcagttgctgagagtaggctgtgacattccctcttgtgaaatggtttccttgacaaaatttaagctgagcttaaaagcaaaaccataaatatttatttgtgtaattcagtttattactctccacgtgtggagtttgatggggaagtcatgtaggcacgccaccatggacatgtgttgagcctgcaccttgggacagactccaccatgtgtgatgatgattcacattgaatgcacagaccaggaattcagtgaatgtcattttttaaaactaatttgtattgtctgctgtactgatccaggttttactagtgttaaactattttgatcagccgcactattcttaggggggaaactattttggcaggtttctgtgcctttattgccctcttctggaaaaaaaaaaaaa

SEQ ID NO: 575 - DNA, 2761 bp, Cricetulus griseus
caaattgaaggaagcagaattgttagaacctttaatgcccgctatccgtgcttgtttagaacatcgtcacagctatgttaggagaaacgctgttctagcaatctacactatctacagaaattttgaacatcttattcctgatgctcctgagctgatacatgattttctggtaaatgagaaggatgcaagctgcaaaagaaatgcatttatgatgctaattcatgcagatcaggatcgagctttggattatttaagtacatgtattgatcaagttcaaacatttggagacattctacagttggttattgttgaactaatatataaggtctgtcatgctaatccttcagaaagggcccgtttcattcgctgtatctataacttactgcaatcatctagtccggctgtaaaatatgaagctgcaggaacattggtaactctgtcaagtgcaccaactgacaaataaaggctgctgctcagtgttacattgatttaatattaaggagagtgaataacaattcctgctcatgaacgggtccgtccaggatctggttatggacatcctaagagtactgagtacaccagacttagaagtgcgtagaaaactctgcagttagcactggatcttgtctcttctaggaatgttgaagagttggttattgtcttgaaaaaggaagtaattaaaacaaataatgtctctgagcatgaagacactgacaaataccgacaactccttgtgcgaactctgcattcctgctctgtccgatttccagatatggctgcaaatgttattcctgtgctaatggagtttctcagtgacagtaatgaagcagcagctgctgatgtcttggagtttgttcgtgaagccattcagcgctttgacaacctgagaatgctgattgttgagaagatgcttgaagtcttccatgctattaagtctgtcaagatttatcgaggagcattgtggatcctgggagaatactgtagtacaaaggaagacattcagagtgtgatgactgaggtccgcaggtcccttggggagatcccaattgtagagtcagaaataaagaaagaagctggtgagttaaaacctgaagaggaaataactgttggaccagttcagaaattggttacagagatgggtacctatgcaacccagagtgccctcagcagttctagacctaccaagaaagaagaagacagaccacccttaagagggttcctcctggatggagatttcttcgttgctgcttcccttgccacgactctgaccaagattgcattacgctatgtagcgttggttcaggagaagaaaaagcaaaactcctttgttgctgaggctatgttgctcatggcaactatccttcatttgggaaaatcctctcttcctaagaagccaattactgacgatgatgtagaccgaatttccctgtgcctcaaggtcttatctgaatgctcacctttaatgaatgacatttttaataaggaatgcaggcagtctctttctcaaatgttatctgccaaactcgaagaagagaaactatcccaaaagaaagaatctgaaaagaggaatgtaacagtacaacctgatgaccccatttccttcatgcaactaactgctaagaatgaaatgaactgcaaggaagatcagtttcagctgagtttgttggcagcaatgggtaatacccagaggaaagaggcagcagatcccctagcatccaaacttaacaaggtcacccagttgacaggtttctcagatcctgtgtatgcagaagcttatgttcatgtcaatcagtatgatattgtcctggatgttcttgttgtaaaccaaaccagtgatactttgcagaactgcacattagagttagctactctaggggatctgaaacttgtagaaaaaccatctcctttgactcttgctcctcatgattttgcaaatattaaagctaatgtcaaggtagcatcaacagaaaatggaataatctttggcaatatagtttatgatgtctctggagcagcaagtgacagaaactgtgtggtcctcagtgacatccacattgacatcatggactatatccagcctgcaacttgcactgatgctgagttccgtcagatgtgggccgaatttgaatgggaaaataaagtgacagttaacaccaatatgattgatttaaatgactatttacaacatatcttaaagtcaaccaacatgaagtgcctgactccagagaaggccctttctgggtactgtggctttatggcagccaacctgtatgctcgttctatatttggagaggatgcacttgcaaatgtcagcattgagaagccagttcaccagggaccagatgctgctgttactggccatataaggattcgtgcaaagagtcagggaatggccttgagccttggagataaaatcaacctgtctcaaaagaagactagtctataagaatgaataaaaagtccttggaggtttatggttaaaatttaggtgtgggcttattggactccaacatcttttgtactcttcatgctttatgttatatagaatctgagttcatgctgaatgcattccagccagtaatttatagcctttcccctaaatcaagaatgagttaaaaattagagtttgtcttttgtcttaatagttctgaatgctgttctcaaagtatataatgtttctcatatgtaccaagaccattttcacaataaacagatctattcataaatttttgttattttataaataaattacttaatttta

SEQ ID NO: 576 - DNA, 2760 bp, Cricetulus griseus
atctttgtcagtgcacaaaatggcgccttacagcctcctggtgacccggctgcagaaggccttgggtgtgcggcagtaccatgtggccttctgtcctgtgccaacgggccaaggtggccatgagccactttgagcccaatgagtacatccgctatgacctgctagagaagaacattaacattgtccgaaaacggttgaaccggcctctgactctctcagagaagattgtatatggacatctggatgacccagccaaccaggagattgagcggggaaagacatacctgcgtctacggcccgaccgggtggccatgcaggatgcaacagctcagatggctatgctacagttcattagcagtgggctgcccaaggtagcggtgccatcaactatccactgtgaccatctgattgaggcccagctagggggtgagaaagacctgcgcagggccaaggacataaaccaggaagtgtataatttcctggcaactgcaggtgccaagtatggtgtgggcttctggaggccgggatctggaatcattcaccagatcatcctagaaaattatgcataccctggagttcttctgattggcactgactcccacacccccaatggtggtggcctaggaggcatctgcattggagtagggggtgctgatgctgtggatgtcatggctgggatcccctgggagttgaagtgtcccaaggtgattggcgtgaagctgacaggctccctctctggttggacctcacccaaagatgtgatcctgaaagtggcaggaatcctgacagtaaaaggtggtacaggtgccattgtagaataccatgggcctggtgtcgactccatctcctgcacgggcatggcaacaatctgcaacatgggtgcagaaattggggccaccacatcagtgttcccatacaatcacaggatgaagaagtacctgagcaagactggccgagcagacattgccagtctagctgaagaattcaaggatcacctagtgcctgaccctggctgccagtatgaccaagtgattgaaattaacctcaatgagctaaagccacatatcaatggaccttttacccctgacttggctcacccagtagcagaagtgggcactgtggcagagaaggaaggttggcctctggacatcagagtgggtttgattggcagctgcaccaattcaagctatgaggatatgggacggtcagcagctgtggccaagcaggcactggcccatggactcaagtgcaagtcccagttcaccatcacaccaggctctgagcagatccgcgccaccattgagcgggatggctatgcacagatcctgagggatgtgggaggcattgttttggccaatgcctgtggcccttgcattggccagtgggacaggaaagacatcaagaagggggagaagaatacaatcgtcacttcctacaacaggaacttcacaggccgcaatgacgcaaaccctgagacccatgcttttgtcacatccccagagattgtcacagccctggccattgcaggaacccttaagttcaacccagaaaccgacttcttgacaggcaaggatggcaagaagttcaagctggaagctccagatgcagatgagcttccccgatcagactttgacccagggcaggacacctaccagcaaccccccaaggacagcagtgggcagcgggtagacgtgagccctaccagccagcgcctgcagctcttggagccttttgacaagtgggacggcaaagacctggaggacctgcaaatcctcatcaaggtcaaagggaagtgcaccaccgaccacatttctgctgctggcccctggctcaagttccgtggacatctggacaacatctctaataacctgctcattggtgccatcaacattgaaaacggcaaggccaactccgtgcgtaatgctgtcacccaggagtttggccctgtgcctgacactgctcgatactacaagaaacatggcatcaggtgggtggtgattggagacgagaactatggtgaaggctcaagccgggaacatgcagcactggagcctcgccaccttgggggccgggccatcatcaccaagagctttgccaggatccatgaaacgaatctaaagaaacagggcttgctgcccctcacctttgctgacccctctgactacaacaagatccatccagtggacaaactgactattcaaggcctgaaggactttgcccctggcaagcctctgaaatgcatcatcaagcaccctaatgggacccaggaaaccatcctcttgaaccacaccttcaatgagacccagatcgaatggttccgtgcaggcagtgccctaaacaggatgaaggagctgcagcaataaggaaggtcccggctggctggctgtcatgtcccactctggaccctgctggatgtcagaagtacaggtccatgtgcatcctcagagccagagctggtctatccagcatggcctcctgctctgagatgacgaccagacctgcttcctgctctctccatcctcagcccactgagtgaccaccgatggagggcacatgaagtcccagccccccctgcctttcagcttggttcttccttcaaaagtccatgcacctgtatttatttttaatgacagcactccctctaaaaaagttttcatcctgcctgatcatttcactggtggctgaaggattttagagaaacttttgttctcaaaagaaaaaaaaaaagaccaaatccattgaaaactaaaaaaaaaaaaa

SEQ ID NO: 577 - DNA, 2759 bp, Cricetulus griseus
gtagggtgcgcccactgagttgtcctgatcaagaatgctgtgtagaagtggtcagtaatacaacggtgcagctccatactcctgagggttatcgacttaacagaaatggagactataaggagactcagtattcatttaagcaggtatttggcactcacaccactcagagggaactttttgaagttgtggctagtccattggtagatgacctcattcatggcaagaatggtctgttgttcacatatggtgtgacaggaagtggaaaaactcacacaatgacaggttctccagggtccggaggtctgcttcctcgttgtttgaacatgatctttaacagcataggatcatttcaagcaaaacgttatgtttttaaaatctaatgataggaacagcatggaaatacagtgtgaagttgatgccttattagaacggcagaaaagagaagctgtatccattccaaagaccccctctagcaaggataagaaccacaatatgtatgttgcaggatgtacagaagtagaagtgaaatctacagaagaagcttttgaagtttttggagaggtcagaaaaagagacgtattgctaacacccatttgaatagagaatccagccgttcacatagcgtgttcagcattaaactcgtccaggctcccctggatgctgatggagacaatgtcttacaggaaaaagaacaaattaccataagccagttgtctctggtagatcttgctggaagtgaaagaaccaaccggactaaagcagaagggaacagattacgtgaggctggtaacattaatcagtcactgatgacgcttagaacatgcatggaagtccttcgagagaaccagacatatggaactaacaagatggttccgtatcgagattcaaagctaactcatctgttcaagaactactttgatggggaagggaaggtgcggatgatcgtgtgtgtgaatccaaaggctgaagattatgaagaaagcttgcaagttatgagatttgctgaagtaacccaagaagttgaagtagcgagaccagtagacaaggtgatatgtggcttgacaccagggagacgatatagaaacctgcctcggggcggcccagttggagatgaacctttggtgactgaagtgagtctacagagcttcccaccactgcctccatgcaaacttttggatatcaatgatgaggagacccttccaaagctgatcgaaactttggagaaacgacatcgcctacgccaagtaatgactgaggagcttaacagacaatgtatgactttcaaagccttattaaaagaatttgacagttctctttcaaataaagaaaactacattcaggaaaaactaaaatgaaaaagaaaaactagatctcaggacagaaatcagaaatagaacgactggaaaagaaaaacaaaactttggagtacaagagtgagattttggagaaaacaaccacgatctatgaagaagataaacgcaatctgcagcaggaacttgagagccagaatcagaagcttcagcggcagcttgctgacaagcacagatgagaacccaggttgcaaggcatggtgacagaaacatcgatgaaatggcagaaggaatgtgaacgtcgggtggcagccacccagctggagatgcagaataaactgtgggtcaaagatgaaaagctcaaacagttgagggccattgtgactgaaccaaaacctgagaagccagagagaccctcccgagaaagggaccaggaaaaaatcattcagagatcggtctctccttcgcctgtgcctctttctagtaacaatattgctcagatttccaacggccagcaactcatgagccaaccacagctacacaggcgctctaactcttgcagcagcatttctgtagcttcctgtatttcggaatgggagcagaaactatctccgttcagcacacctgtcaatgtcacctctcttgcaaggcataggcagcaggagccaggacaaagtaaaacatgtatcgtgtcagacagaaggcgagggatgtactggactgaaggcagggagatggtccctacattcagcagtgagataggcgtagaagaggaccattgccacaggaacacaccaattcctgtacgacacagaaggtcccgctctgcagggagcagatgggtagatcataagcctgcctctaatgtgcaaactgagacagtcatgcagccacatgtccctcatgccatcacagtatctgttgcaaatgaaaaggcgctagctaagtgtgagaagtacatgctgacccaccaggaactagcctccgatggggagattcagactaaagtaattaagggtgatgtttataagaccagaggtggtggacaatctgttcagtttactgatattgagactttaaaacaagaatcgccgactggtagtcgaaaacgaagatcatccacagtagcacctgcccaaccagatggtacagagtctgaatggaccgatgtagaaacaaggtgttcagttgctgttgagatgagagcaggatctcaactgggacccggatatgagcatcatgcacaacctaagcgaaagaagccttgacctgatagccctggtggccgaagaatgtttttgttgtgttggtgatttctccaaagctgtgccagacgcagtatctgaatcatcctacagaagaatgtatctggatcacattgtattttttattgtgacttttccaactgttctgaatattttctaaggttttataaaaaaaaaaaaaaaa

SEQ ID NO: 578 - DNA, 2759 bp, Cricetulus griseus
  modified_base (183)..(183): a, c, t, g, unknown or other
ctctcagacaaaagaaaacatgactttacaggccaagagctttggatcaacatgtcaattaagtgaaaaattcatcaaagctgcaattggctgtggtattgtcgaaagcatactaaactgggtgaagtttaaggcccaaatccagttaacaagaatgttcagctagtaaaacataacagaatnaacgggaactacccccaaacttgatgattgaaacaacagcgtgttcagttcggttgttatttccaccaaaagatgatcacacattaaagtttttatatgatgacaatcagcgtgttgaacctgaatggtacattcctattattcccatggtgctgataaatggcgctgagggaattggtaccgggtggtcctgacaaaactccccaactttgatatccgtgaagtacgtaaataatatcagacgactggttggatggagaagagcctctcgcccatgcctacccaagttacaaaaatttcaaaggtactattgaagagctggcttctaatcagtatgtgattaatggagaagtagctattctaaattccacaaccattgaaatctcagagcttcccatcagaacgtggactcagacttacaaagaacaggttctagaacccatgttgaatggtactgagaagacaccccctcttataacagactatagggaatatcacacagacaccactgtcaagtttgtcataaagatgactgaagaaaaattagcagaggcagagagagtgggactacacaaagtcttcaaactgcagactagtctcacttgcaactctatggtgctttttgaccatgtaggttgcttaaagaaatatgacactgtgttggatattctaaaagacttctttgagctcaggcttaaatattatggattaagaaaagaatggcttctgggaatgcttggtgcagaatctgctaaactgaataatcaagctcgttttatattagagaaaatagatggcaaaataatcattgaaaataaacctaaaaaagagctaattaaagttctaattcagagaggatatgattcagatcctgtaaaagcctggaaagaagctcagcaaaaggtcccagatgaagaagaaaatgaagaaagtgacaatgaaaacagtgactctgtagcagaatctggaccgactttcaattaccttcttgatatgcccctttggtatctaaccaaagaaaagaaagatgaactgtgcaaacaaagaaatgaaaaggaacaagagctcaacacattaaagaacaagagtccatcagatttgtggaaggaggatttggcagtttttattgaagaactggaggttgttgaagccaaggaaaagcaagatgaacaagtaggacttcctggaaaaggggggaaagcaaaagggaagaaagcacaaatgtctgaagtcttgccttctcctcacggaaaaagagttattccccaagtgaccatggagatgaaagcagaagcagagaagaaaattaggaagaaaattaagagtgaaaacgttgagggcactcctactgagaatggtctggaactaggaagcttaaaacaaagaatagagaagaagcagaagaaagagccaggtgccatgacaaagaagcagactacattggcttttaagccaatcaaaaaagggaaaaagagaaacccctggtctgattctgaatcagatatgagcagtaatgaaagtaatgttgatgtccctccacgagaaaaggacccacgaagagctgcaacaaaagccaaattcacgatggatttggattcagatgaagatttctcaggttctgatggaaaggatgaagatgaagattttttcccactagatactactccacctaagaccaaaattccccaaaaaaatactaagaaagcactgaagccacaaaagagtgccatgtctggtgaccctgaaagtgatgaaaaggacagtgtgccagcttctccaggccctcctgctgctgacttgccagctgacactgaacagttaaagccatcttccaaacagactgtggcagtgaagaagacagccaccaaaagccagtcttcaacatccactgctggtaccaaaaagagagctgtaccaaaaggaagcaaatcagattcagccttgaatgctcatggccctgaaaagcctgtgcctgccaaagccaagaacagccgcaaaaggaagcagtcctcttctgatgattctgactctgattttgagaaagtagtctccaaagttgctgcaagcaagaaatccaagggagagaatcaggatttccgagtggacttagatgaaactatggttcctcgagcaaaatctggacgagcaaagaagcctatcaaatacctggaggagtcagatgatgatgatcttttctgatggggagagtattgttttagcaatggttttactgagcccgttggagaaagtcatcttgactgtgtctccatgatctcagtacatgtagcaagaaaaagagagttagtctggttatgtggcatcctgactttccttatgatacctttcgaacatgagatcacagggaggagacagaagtgctcagacttacatctgcatgctcaattgtgaaatgtggtccattgcaagtgtacagagttccaacttgtgaacgccaaaagcattctgtgctattgtatgttacttaagtgctgttatcaatgtgttttgtaaatatttaatatgtctttctatgtagcttattccaacaattttgtacattaataaatatttaaaca

SEQ ID NO: 579 - DNA, 2758 bp, Cricetulus griseus
tggaggtgtgaggacctgaggctcggggtgggggcggaggcggctcctgcgaccgaagaggacttgcgactcgccgtccgcgcaccatgagggtcctgtgggtgttgggcctctgctgcgtcctgctgaccttcgggtttgttagagctgacgacgaagtcgatgtggatggtacagtagaagaggacctgggtaaaagcagagaaggctcaaggacagatgatgaagttgtgcagagagaggaagaagctattcagctggatgggttaaacgcgtcacagataagagagctcagagaaaagtctgaaaagtttgccttccaagcagaagttaacaggatgatgaaacttatcatcaattctttgtacaaaaataaagagattttcctgagagaactgatttcaaatgcttctgatgctttggacaagataaggctcatctcactaactgatgaaaatgcacttgctggaaatgaagagttaacagtcaagattaagtgtgataaagagaaaaacctgctgcatgtcacagacactggtgtaggaatgaccagagaggagttggttaaaaaccttggtaccatagccaaatctggaacgagcgagtttttaaacaaaatgacagaggcacaagaagatggtcagtcaacttctgaactgatcggccagtttggtgtcggtttttattctgccttccttgtagcagataaggtcattgtcacatcaaaacacaacaacgatacccagcacatctgggaatctgattccaacgaattctctgtaattgctgacccaagaggaaacacactaggaagggggacaacaatcactcttgtcttaaaagaagaagcctctgattaccttgaattggacacaattaagaatcttgtcagaaagtattctcagttcatcaactttcccatctacgtgtggagcagcaagaccgagaccgtggaggagcccctggaagaagatgaagcagccaaagaagagaaggaagaatctgatgatgaagctgcagtagaggaggaggaggaagaaaagaaaccaaaaactaagaaagttgaaaaaactgtttgggattgggaacttatgaatgatatcaaaccaatatggcagagaccatccaaggaggtagaagaagatgagtacaaagctttctacaaatcattttcaaaggaaagtgatgaccccatggcttatatccactttactgcagaaggggaagtcaccttcaaatcaatattatttgtgcccacatctgctcctcgtggtctgtttgatgagtatggatccaagaagagcgattatattaagctctatgtgcgccgagtattcatcaccgatgacttccatgatatgatgcccaagtaccttaattttgtcaaaggtgttgtggattcagatgatctcccccttaatgtttcccgtgagactcttcagcaacataaactgctcaaggtgataaggaagaagctcgtccgtaaaactctggacatgatcaagaagattgcagatgagaagtacaatgatactttctggaaagagtttggcaccaacatcaagcttggtgtgattgaggaccactcaaatcggacgcggcttgctaaacttcttaggttccagtcttctcatcactcaactgacattactagtttagaccagtatgtggaaagaatgaaggagaagcaggacaaaatctacttcatggctgggtcaagcaggaaagaggccgaatcttctccatttgttgagaggcttctgaagaagggctatgaggttatttacctcacagagcctgtggatgaatactgcattcaggctcttcccgagtttgatgggaagaggttccagaatgttgccaaagaaggagtgaagtttgatgagagcgagaaaacgaaggaaaaccgggaagcaacagagaaggagtttgagcccctgctcaactggatgaaagacaaggcccttaaggacaagattgaaaaggctgtggtatctcagcgtctcacggaatctccttgtgctcttgtggccagccagtatggatggtctggcaacatggagaggattatgaaggcacaagcataccaaacgggcaaggacatctctacaaattactatgcaagtcagaagaaaacatttgaaattaatcccagacatccgctgatcagagacatgcttaggagggttaaggaagatgaagatgacaagactgtcttggatcttgctgtagttttgtttgaaacagcaacacttcggtcaggatatcttctaccagacaccaaggcatatggagatagaatagagagaatgcttcgcctcagcttaaacattgaccctgaagcacaggtagaagaagaaccggaagaagagcctgaagacaccacagaagacacagaacaagacgaggaggaagaagtggatgcaggcacagaagaagaagaagaagaggaacaggaaacagcaaaggaatctacagcagaaaaagatgagttataaattatcctctcaccacagatcctgtgtggagagggaatgtgaaattttaaagtcgtttcttttcagagagacttgtttggatgctccccagcctccttctcccctgcactgtaaaatgttgggattgtgggttacaggaagaagtgggttttttagttgaatttttgtttaacattcctcatgaatgtaaatttgtactatttaactgactattggtgtaaaatcttgtcatgtgtataaaataaaaaaagatcccaaat

SEQ ID NO: 580 - DNA, 2757 bp, Cricetulus griseus
  modified_base (2238)..(2238): a, c, t, g, unknown or other
gggggggcctcaccgccagcgccaccaccaccaccgccgccgccgccgccgccgggtggggtgggaggggcgggagccaccgctaccgccgccgcctcccgggtgggcgcccttttccgtggacgccggcgacccaagacgagggttccatcaccataaatggttgtgaaccgatgaagctgcacccacttaaaaaagacaagataacccattgagtgagctgtagaatttgtggacgtgtttatatcgggttcatagtggcgcaatgcacgcaaactcctgcgagttcccctaagttcttagcggactgctttgccttttgaatcagagagttgcaagttcgataaagaaatggcccttgtggataagcacagagtcaagcgacagcgattggacagaatttgtgaaggtatccgccctcagatcatgaacggccccctgcatccccgccccctagtggcactgctcgacggcagagactgtaccgtggaaatgcccatcctgaaggatctggccactgtggccttctgtgatgcacagtctactcaggaaatccatgaaaaggtgttgaatgaggctgtgggtgccatgatgtaccacactatcaccctcaccagggaagacctggagaagttcaaggctcttcgtgtgatcgtgagaattggcagtggctatgacaacgtggacatcaaggctgctggtgagctcgggattgctgtttgcaacatcccatctgctgcagtggaggagacagccgattccactgtctgccacatcctcaatctgtatcggcggaacacatggctgtaccaggccctacgagaaggcacacgggttcagagcgtggaacagatccgtgaggttgcatcgggagctgcccggatccgaggggaaacactgggcctcatcggttttggtcgcacggggcaggcagttgcagttcgagccaaggcctttggattcagcgtcatattttatgacccctacttacaggatgggatagagcggtctctgggcgtgcaaagggtctacaccctgcaagacctgctgtatcagagtgactgtgtctccctgcactgcaatctgaatgagcataaccaccacctcatcaatgacttcactatcaagcagatgaggcaaggagcattccttgtgaacgcagccagaggtggtctggtagatgagaaagccctagctcaagccctcaaagagggaaggatacgaggagcagctcttgatgtgcacgagtctgagcccttcagctttgctcagggcccattgaaagatgcaccaaatctcatctgcacgccgcacacagcctggtacagtgaacaagcatcactagagatgagggaagcagctgccactgagatccgccgagcaatcacaggtcgcatcccagaaagcttgcgaaactgtgtcaacaaagaattcttcgttacttcagctccgtggtcagtcatcgaccagcaagcaattcatcccgagctcaatggtgccacatacaggtatcccccaggcattgttggggtggctccaggagggcttcctgcagctatggaagggatcatcccaggaggcatcccggtgactcacaacctccccacagtggcacatccttcccaagctccctcccccaaccagcccacaaaacacggggacaatcgagagcaccccaacgagcaatagcagagaaggtaatcattcagaaaaacttgggaccaagagacagtagcaaacagatgaactaagaaggaatttggcagtctttaaaactgatcctggacatcactgatgttgcagtgttaaagctacaaaagattgaatactgaagatggtgtctgcttctggaagtgtggaaaaactaggacgtgatttattaacgaccaacttctgttattgtgtgttaagtttttcatctgtgcatcaaatcacaaagaataaatagagctttcctttatcagtcccttgggcacggcaggtcctgagcaacttgctctagagtgttgcatcaagagctctgactattaataaaaaaagagaggaaacccccatcaagactagtccctttggtctccaggggctggttgcctcctttaccggtaggaagattaattaagacaagatgggggaggacatgtttgcctgtgtagacatctacatgtataggattgaagaagtaaaaagttcctgtatagaagtttctcaactctgagcaggcaaagttggttaacaaanaaacaaaaaaaaaaaagcaaatatattttctcagtttcagatcctcagctattttattgagtggaaagtcttggacaagaagggttcaagaagaataatgttgcatttccttatgtctcaggaaacactttttatggtaacttgtcagattgtctatgaacaaacccacttttttagacattgataaattcttttcttcacgtgatattttatacaagaacacttcagatgtgctattagatgtgactgattttaacaaatcctattagatttgtatcagctagttacatgttctattcatagtcttttgtgaatcattgcctttttgtttctaaagatggcctattttgagcctttgtataggtacattcctgtttttgtgacacaaaagaaaaactttaaactgtacccaaacagaaaaaataatggactatcagaagtatgttttgttttagtgtgagttaccgttactgtatttgttattgtaaaggtggacatttagcgttcagtgcagttttc

SEQ ID NO: 581 - DNA, 2754 bp, Cricetulus griseus
ctggccttggactttgcctggtccaacttcagatttcatcggttcttggatgtcaacagtacacaaagtagaaaaaacaatagaaggatttatgaaaagttcaccattcattctgatctcagcaaagctgctagttggaagagattaactacagagtttctaaatgcatcacttcccagcgtagagaaaataaagaacagatgcgcattattccatactgtcactccttctgtgtctgtctgattctccttcaaacagcagctatgtggaaacaccaagaaacaaagaagtggaaaagaaagatgattttgactggggaaaatacttgatggaaggtgaagaaattggccttggtccaaatgccgattcaccgaactggtctgaagacagtgatgatgaagatacacaacagcccttaagccgagaagactctgggatacaggtagacaggaccccactagacgaacaagaccacagcagaaaaggggggtctcaagtctgctgggaagatgagccagatagccagagctggctggagcagcatgtagtccatcagtactggacaaccaggcgctcccggatcccacacagtgtgcatttgcactccaatttagctgctgtctgggaccaacacctgtacagtagtgatccattgtatgttccagatgacagagtggtggttactgagacacaggttattcgggaaaccttgtggttactttcaggggtaaaaaagttgtttatatttcagttgatagatggaaaggtgactgtgagaaacaatattattgtaactcatttgacacatagctgtttacgatctgtgcttgaacaaatagcagcatatggccaggttgtgtttcggctccaggagttcattgatgaagtcatgggacacagctctgaaatcctgccacctggaaatggttccatacctaagaagccgcctgaagctccctttagaacctaccaggctttcatgtgggccctctacaagtattttattaacttcaaagaggaacttacagaaattgaaaagtgcatcatcagtagtggacaatgccagtgccagttctggcagtgaccagggtccgtccagtagacagcacaccatggtgtccttcctcaagcctgtcctaaagcagatcataatggctggcaagtcaatgcagctgctgaagaacctgaactgtgccgagggctctgcgtgtcaggcagcagccagagatgcagaaagaaaaagcttatataccctctttctggaatctatacagttgcgtcttcagcatggagaagattctactccacacattctcactgaacagcaggcaaccaaagagaacctaataaagatgcagtctattgctgaaaggcatcttgagctagatgatattcatgacccactgctggccatcaattttgcaaggttgtatttggagcagagcgactttcatgagaagtttgctggtggtgacatatgcgtggatagatcatcagaatctgtgacatgccaaacttttgaattaaccctgagatcttgcctctaccctcacattgataaacaatatctacattgctgtggaaatctcatgcaaaccttaaaaagagatttcaggttggtggagtacttgcaggccatgaggaattttttcttgatggaaggtggagacaccatgtatgatttctatacttcaatttttgataaaataagagaaaaagaaacctggcagaatgtgtcttttcttaatgtgcaactccaagaagcagtaggacagcgctatcctgaagacagtttacgtttatctatatctttgaaaatgttgatacaactaagaagaaactacccgttcataccttagatggtcttaccctgagctacaaggtcccgtggcctgtggacattgttataagtgtagaatgtcaaaaaaatttataatcaggtgttccttctcctattgcaaataaaatgggccaagtacagcttggatgttctactgtttggtgagctggctaatgctgctgaaagatcccaaggaaaagaagacaatctgtgtgaagaagacacactctcccagtttggaccacccaaagaatcattaagacagcagattcatcgaatgtttctcttacgagtgaagctcatgcactttgtgaatagtttacacaactacatcatgaccaggattcttcacagtacagggctggagtttcagcatcaagttgaagaagccaaggatttagatcagttgattaaaattcactacagatatttgtcaaccatccatgatcgatgtctgctgagagaaaaggtcagctttgtgaaagaagccatcatgaaagtgttgaacttggcgctcatgtttgcagaaggttggcaggcaggcctaggagcttggcagatggaatctatagagaaaatggaatctgattttaaaaactgccacatgtttctcgtaaccattttaaataaagctgtctgtagaggatcttttccccatttggaatctctggcactgtcactcatggccggcatggagcaaagttaaatatctctaatgtaacaagtaccttagacttcatcatcatccatgtacatttctaccgtttgcagctgagaaataaaaatctttatatttttattttttttattttaaacctatctagacaaatggattgttggtattttctctggaaattgttacaagtatgtagaattatgttaaataaggttttgtatctaattacaatatatat

SEQ ID NO: 582 - DNA, 2754 bp, Cricetulus griseus
tgcacgctgaaagagctggtggaattgggtgaccatggggatgtgggcatcggtggacgctatgggggacttccctgcggagaagcgaatcttcggggcggtgttgctcttttcctggaccgtgtatctgtgggagaccttcctagcacagcggcagagaaggaatataaaaaacaacaactcgggtaccagcagaattagaacagatcatggattcggacacatttgagaaatctcgactgtatcaactggataaaagtacattcagcttctggtcaggactctattcagtggtggaaagcactcttattcttctctttggaggaatcccttacctctggagactttctggacgggtctgtgattctgctggctttgggccagaatatgagatcattcattctttggtgttccttctgttggccacactctacagtgctctgactggcttgccatggagtatgtataatacttttgtgatagaagaaaaacacggcttcaatcaccagactttggagttttttatgaaagacacactcaaaaaatttgttgtgactcaatgtattttattacctgtgtcttcccttctgctttacattattaaaattggaggtgattacttttttatttatgcctggctgttcacattagttgtttctctggttctggtcacaatttatgctgattacattgcccctttgtttgacaaattcacacctctccctgagggaaagcttaaacaagaaattgaagtgatggcaaagagtattgactttcctctgactaaggtgtatgttgttgaaggatctaagcgctcttcccacagcaatgcttacttttatggcttcttcaagaacaagagaatagttttgtttgacactctactagaagaatactctgtactaaacaaagacaaccaggaggagcctggcctggaaccccgcaatgatggcgaaggggacaatgaagaaataagaactaaagtgaaaaataagaaacaaggatgtaaaaatgaggaggtgctggctgtacttggccatgaactgggacactggaagttgggacacacaataaaaaatatcattattagtcagataaattctttcctgtgtttcttcttgtttgctgtgttaattggtcaagaggtgctttttgccgcctttggtttctatgacagccaacccactctgattggactcttgatcatctttcagtttgttttctcaccttacaatgaggttttgtctttctgcctgacagtcctgagccgcagatttgagtttcaggccgatgcttttgccaagaaacttgggatggctaaagacttatactctgctttgatcaagctaaacaaggataacctgggattcccagtttctgactggttgttttcaacgtggcactattcacaccctccactactagagaggcttcaggctttgaaagacacaaagcaagactgagccgcttggtgtctggacacacttccggttatatctgtcctggcagcatgttccagctcttgatgtttttaatttttaagaaaaatgattaagtacataaaagtccagatttaaatacatttactatctcatttcaaaaatgatcgtaataatccatttcttaaaatactggatagaaatttgaggcttaatatttttaaaacatagtcttatctaacattggtttaccatcagtttgtaaaattacttaaggcaatgcacagctcgttttatttccttactgtggagtctgcgtatagggtattcaggctgtgtgtttagggaggaaacatcacctccaggtagtttcttcaagacagaatcagaaaggatggcccccaatcattgtgcttgtacctacatggagtttgtttttaccttcatgatgttatgatttaacttggccaatcagtgttttaaataagaaagaaaagtacaaattagtgaggctaatgctactgaaatggacgttgttagtctacactgtactgttgtagtcacaaagctttctgttcctttcttgctacacaccaatcaggaatcctctcccttcttcttccctcccttttaagaaagtcttaattttaagccaggtttggtagcacttacctttaatcccagtgcttgaggcaaaggcagatggatctgtgagctgaggtttaccttaccttccacctggccttgttagaggtaaagtagccttttgtcagtcttgtttcccccagcaactgacagtacatcctttcacttagcagaagttgccatgttgtacacattcccgatgttaaatatggcagaataggagaaaaagaagagatgacatctgaaaagatgtaaaggtgggatattcgtgattctcttattacaggaaaaagtacacgttatcttttttcaaggacagagtctctgctttcatttttgtgatgtttttattcataagatataattagaccagattatattttttaaattataagccttggtaggcaggcagatatttcctttcaaaaatagcctcatgaaagatttccagtggtaagaggtgtgtgcttgaccacttcaaatgcctgtccatgtccttcagcactgcattgtttatgtcctacagctaagcagagcagcccacggtttctctccagcatccttccctatgacttcatgctcagataattgcctttccttccttctgtgcctttaaatatacatttcagttctgcacaagtgagacattaaaaattgccaatgcagattt

SEQ ID NO: 583 - DNA, 2752 bp, Cricetulus griseus
gagaagaaaatagaagttaagacatttagaagcttggacaagaacaatgatgggaaaatcgagccgtcagaaattgtccagtctctccagatgctgggtttgaatctttctgaaaagcaagccaagttgattcttcagagcatcgactctgatggtacaatgacagtggactgggatgaatggagggattactttttatttaaccctgtttcagacatcgaggaaattatccgtttctggaagcactctactggcattgacataggggatagcttaactattccggatgaattcacagaagatgagaaaaaatcaggacagtggtggcggcagctgctggcaggaggcgtggctggggcagtctctagaacaagcacagcacctttggatcgcctcaaggtcatgatgcaggttcatggttccaaatcaatgaatatatttggaggctttcggcagatggtaaaggaaggaggaatccgttctctttggagaggaaatggcacaaatgtcattaaaatcgctcctgagacagctgttaagttctgggcttatgaacagtacaagaagttgctcacagaagaaggacaaagtttaggaacctttgagaggtttgtttctggttccatggctggagtaaccgcacagactttcatctatcccatggaggttctgaaaacccggctagctgtagccaaaactggacaatattctggaatatatggttgtgccaagaagattttgaagcatgaaggctttggggctttttacaaaggctatgttcccaacttactaggcatcattccttatgcgggcatcgatctcgccgtgtacgagcttttgaagtcttattggctggataactttgcaaaggactctgtcaaccctggcatggcggtgctgctgggctgtggggctctgtccagcacctgtgggcagctggccagttaccccttggctttggtgaggacacgcatgcaggcacaagccatggcggaaggggccccgcagctgagcatggttggcctttttcagcgaatagtctccaaagaaggagtgtcaggcctttacagaggaatcgccccaaacttcatgaaggtgctccctgctgttggcatcagctatgtggtgtatgaaaatatgaagcagacgctaggagtatctcagaagtgacacgttcgagccttcttttcctggacaaccaaagctgtcagcgctctccagtgactcccaggattgcagcaagtctattgcaaaagaagctgttctctcccagccacagggaagagagagactagtaatcacttcaaggatttgggcttagatttacatcttcagtaatgttccaaatcatagtttcaataagtgtgataaagatctgtgccttgcaccctaaatctgaaaatgtacttgtttaagctgaaatcattttgtgtggtagaattataaatctctaatctttgttctttttggttcagatttatgtcaatttgtttatacccaaattaaaaaaagcaaccaaaatgatcagaaaaccttggaacttaaattgttctatatattttggatgtctttatagatgtaaaattcccacacaggaacattagtagaaaaaaaatcagtcatatttaaaatcagtcttccacagtttatatcctcatctgtgagcagagtaagaatggattactctttgaatcaaattctcttaatcaggaaggctccctgggaccttcttagagatctgagactgctcttttcatgacttgagtgttaatttcaggtaaatgacatcctcacttcactctcacggttgaagcccttttgaagctgtgcttctcaaatgggtggcacaaagctaaggcaccagcaccgttcaccagtagtacacgttaaccttctgtatgtgaatgaaaggctcagtctgtgaacatatgcatccgcccacattttcacttgcctcaagatttaggaagatggcaggaaatttgtaatattgacagcccttaatatttttactaaagctgattttgtagtaaattatcttttattagaacttagaaaaatcttatttcttctataagaagatattcgatagtcttagcagggcagtggtggcacatgcctttagtcccagcacttgggaggaagaggcaggtggatctctgaattcaatttggtcctggtctacagagtgacttccaggacagccagggctacacagcgagaccctgtctcgaaaattttaagatttagcttatacactcatttggtttctggtaatttctgttataattactttctgaaaaatctagtgaaatggggatcgttgactacctcttttattttttgaaccaaagagaaaagatgaacttgtgtttataaaacttattctaaaatatagtttggtttgtattcaatgcctgctcttgtctcagtaattttatactatgtaagcaaaggaagggactgtcctttgtcttcagggttattgtactttgagcaatacatagaatgacaatattaaggtacaggattcattccttttttactcataataattatggaaataaataattctgttaatgtttttataattttaagctgatgaaaactatgaaaatattcatagttcattttgaaattaaagtgccctccccagactgaacatgtgtaaagtaggactgatttttctgtgcaccttgcatcttttgggaaaaaagcctcttgttaaaggcagcttatttctgacattgct

SEQ ID NO: 584 - DNA, 2751 bp, Cricetulus griseus
cccgggtggtgaacgcggctccggcaccatgtctggtttgtctggcccactatgttggcctggccctcgcccgtgtgcgttgctctttctgttcctgctcggccccagctcggtgctcgccatctccttccatctgcccgtgaactctcgcaagtgcctccgcgaggagatccacaaggacctgctggtgacgggcgcgtacgagatcaccgaccagtccgggggcgcaggcggcctgcgcacccatctcaagatcacagattctgcgggccatattctgtatgccaaggaagatgcaactaaggggaaatttgctttcaccacggaagactatgacatgtttgaagtgtgttttgagagcaagggaacagggcggatacctgaccaactcgtgattctagacatgaagcatggagtagaggcgaaaaattatgaagagattgcaaaagttgagaaactcaaaccattggaggtggagttacgacgcctagaggacctttcagaatcaatcgttaatgactttgcctacatgaagaagcgggaagaggagatgcgcgacaccaatgagtccacgaacacccgagtcctgtacttcagcatcttttctatgttctgcctcattggactagccacctggcaggtcttctacctgcgtcgcttcttcaaggccaagaagttgatagagtaatgaggctcagtcttctgtcccctggaatctcagccagcagaacatcgctgggacgtgcctggcctagctcaaggccatcctactaacagtatcatcaaggcacagtggagctttcttgccagaactgatttcttttggtgtgggagaacatgggcaccacctacacccaacaagtcaatgaggacttctttttaatgcggtaggatttggactggtttttgacaagattattaaagtcaccgatggaaaaacaagacaaaaaagacaaaaaacaggggttacctagataatgccaaagccagcattcgtcttgggttgttttgtttttttctcccacttgctcatcactttggtctttcactctagttcttctcccgatatttctatggccatggtcctcttgtttcatggcagttgtcctcttcggtttccttgtgaaaataacctgaactttctcttggcccttagatgaaatgtttacatagtttctggtgatatccttcataattttgtctcctaaggggtcattgatgggacacataaaaaaaaagtgagctttgaattgtagataatctcttaaaagaaaatctcattttagacaattaaaatgtttgtgttcaactgcttgaactccttgtgtgtgtgtgtttagtcctgtctcagtttgtcacatgtagatcccagtgatcatttcaaggtggagtagttccatcatgtggtcttcattaactagtaaggttcttatgtgaatgtaagttttcatcactttgggatgcatgcctaagagatcagttgctatgctgtgtgggaagtagttcttaaagaaacttccctgctcttgtctagagtggctacagcatgttacatttccacattctcattagtacttcttatcattgttgttttaacttagctccttgaataggtgcctgtaatatctcattatggttttaatttgcattttcctaatgatgaatggtgttgaccattctttcgtgtgctagtcatttgccatctgtatgtccttggcagtgaaatgtctatccatggcttttgcccattttctacttgggtcatttgttcatgtcactgttgagttttgtggaggtcctttatcagacgtgtggttgcttgcatttttcacataacttctaccagggagaaataagtatattttaccagcccttcatgcatggtcagtcactgagttacagtctcaggctattctgtaaggtcccagttactgtaaactcagaagccttctttgtcttatgactccagtaaattgctcttgcgtggcatgaaatgttctctggtataacactgccatctgcagttgagaagtgataggtctcacttctaagaatctagcagttgagtcctcaccacagcaattgcagatgttcaggaagctgtagcatttatatatcaagtgatagaggaacgattcaggtagaaaaagagtaagttttgggtcaaaatccatctgtagacttttaaatgcaaaaccatagtctgtgccattagcctaacaagagactcctatttctgacttgtgccttccccccttgtaaggaacaatgaaatctactctgttagttagggttttctgttctgaaaaatgtcagagaaggtaggagaaaataaaataagtattttgtacatatttttctttccaagtacagctctaaccttaagctttgtagaactgaaattctttcaagtccttttctctgttttgattcatgccaaaaacaaccaacttggacattgtgtgttcagttacaaagttaattgaagagcatttgccttggacagcaggctagcacaaaagcatatcagctttataaacaggtatgttatctgcttccctccattttcagcatattcaagataatctgagactaatagtttcaacaaaccttgttatataccattgtcatgagcccccgacagagccattctgctgtttgttaatggaaagaggcatgtgggatttatacagactcacctgttggagatttttgtgtaaactttcacaaataaaggctagcagaaaacca

SEQ ID NO: 585 - DNA, 2749 bp, Cricetulus griseus
tcgacaacaagctgcggcgctatacgaccttcagcaagaggaagacgggcatcatgaagaaggcctatgagctgtccacgctgacagggacacaggtgctgttgctggtggccagtgagacaggccatgtgtatacctttgctactcgaaaactgcagcccatgatcaccagtgagaccggcaaggcatccaaacagcacccacgcacctctaccaccatgcaagtcagcagcggcccctccttccctatcaccaattacctggcaccagtgtctgctagcgtgagccccagtgctgtcagcagtgccaacgggactgtgctcaagagtacaggcagtggccctgtctcctctgggggcctcatgcagctgcctaccagcttcaccctcatgcctggtggggcagtggcccagcaggtccctgtgcaggccattcaggtgcaccaggccccacagcaagcgtctccctctcgtgacagcagcacggacctcacgcagacctcctccagtgggacagtgacgttacccgctaccatcatgacgtcgtctatacccacaactgtgggtggccacatgatgtaccctagtccccatgcagtgatgtatgcccccacctcgggcctggctgatggcagcctcaccgtgctcaatgccttctcccaggcaccatccaccatgcaggtgtcccacagccaggtccaggagcaaggtggtgtccctcaggtgttcctgacagcaccctctgggactgtgcagatccctgtgtctgcagttcagcttcaccagatggctgtgatagggcagcaagctgggagcagcagcaacctcaccgagctacaggtggtaaacttggacgccacccacagcaccaagagtgaatgatccgcccgccaccctggacagatggcccaagggacggcaccacttatttattgttgccttttcacgttttctttacacacacattgactggccgaaggagggaggcagggagaaggagtgggcagccacaggactatgccctctcactccagccaaagaaatgggcctgcctgccctccctcactctccctcaccctcccctccttcctgctccaccatcatggtgcagctgtcctctccctcagaccccttgccagctcggctcaatgtttgctatgagtattagcttacccagtgggactgtgcccaccttcccactcacaggccttctgtgggaatgggcgcaatgtccccctctgaggaagcatttggggccctctctccagcctctttggtgacctctggttagttctgtgtctgccacagtctgggtcaaaagagccctgcccctgcccctcagggagccagctgggagagatgggggtttcctcccttatgctgccaccctctgcccctttcagcccctgaatagctgggcctgtgcactgggtaggttactggggctacctgccctgccttgccgctctgttcccatggacctccaggggctcttgggttggagggaacctctagcgttctctcttccccttgtcttccccccttctcccagctgctttacttaaaagttgattttgaactttttatttgaggagatgaagtgaaaacaaatctaataaatatatattttaaaaatattgagactggtttcatttgtgccacagcatggtcattgcagccttgtgctcccccaggcttgcagccacctggggcccaagtcgcagtgagcagggtgaggtctgggaggtggggagacacaggaatgggtcatataggagcagctcttggactgagcacagcaatggagagccagcaatgggcagctctcccagggagtgagcagctactgtaactttttaaattaagacaaaaagccttgaagaaaatgactttattttctaagtgtaacctcagtatttatgtaatttgtacagggccatgcccccccccttagaacccgcttggggaccttgagggtgggctagcataggggagggtgttttaccctgtgtcagagccagcctaaaccacctgcatccagtaaaggagttttctcagaatggcagttggggtggagtgtctcattaagcccttgctactgccctcagtaggcacagcctgcttctgcggttaggttgaggggtggggagggattttgtactgcctaggtattttggggacgatctgctgatgggtttgagaccccccatgccaccattctgggctttctcctagaaataactggggccttgggtagctttcaagactggggcttggtaaatcaggggccagagtgggggagcctgggactcaggtctgtaactgcccagcccattgctctgctcttgcttcactccactgccactcactaccactcccccaacacatgggagagatgttaattcctccccacaaaagatagatccagtgagtgaatcaggcaaagtgcttataatgtgtgctgtgtgactgtggccttgggagaccctgcttgtcaggattgaggtgacatttctatgtgcagcgacccttggtgtttccttcctaagtggctctggggtgtgtgtatgcttgtatttgagtgagtgtctatgtgtgaatgtggggtgtatgtgggtatatcagtggtttctacttctcctgggatgttgacccaggaatagtggacatggtcacatcctatgtacagagctttcttttgtaattaaaaaaaaataactctttcaataaatgtatcatttttgtgcaca

SEQ ID NO: 586 - DNA, 2749 bp, Cricetulus griseus
cctttactccaaactgcatctatgtacatgtttgtccacccccgttttgggcctatcaagtgcatccgcaccctgcaagctgtggaggctgaggaagagctgaccgttgcttatggctatgaccacagccccccagggaagagtggtcctgaagcccctgagtggtaccaggtggagctgaaggccttccaggccacccagcaaaagtgaaagacctggccctggggtccacagacctggaatagaaacttggatctatgcactacatttatctgacaatgggacaaccagggactgttctgtgacatcacatcctctcaccctgcgttagcaacgactgttcagagataccaaatgattaggctgaaaaagggaaatgggattcttcagtcatttttcatcgaaggtttttttaatgatgtttttctatggctattgcaaatggtgttcgatcacccttgcatgttgccacctgcagggttggaaggattattacatctttatataaatgtagggtcatttgccttttaacctttgatctgtatcttgcaatagaatggctttgtttttgttgttactcttctagtgaatcaaagcccaggcttttgagtcttttctttagcctcactccctatcttagctatcctttacaagagaaaagcttccaaaatggattttgcattcatagcagtgtacaggtctctctggttcttctctatcatttcattcttatgtcctgatataaagaactggctcatagggccagactgttgttatagtacttattttgtcaagacctctttgaacctgactggaactagagttcagattcattaccctttgagatttatcacacttgaaaaactttttccttatcacaacatacacacacacgcacacacacacaagcatgcaaactgacaaggccatatacagcatttaattgtgacaattaaaattgcattgagctgtatagatatagctcagtggtccaacatttgcctagcaactagaggccctggattacatccctaatactgcaggggagatcaattatgaatacctaattaaaagtttgtcttagtgagacagtatgtggcacttttattaaccttcacttaatagatttaaaaaatataaatttctcattacaaaaatgcacttaaaatcttccaagaaagtaaaaaattctggatttattgttctccaacagccacctcaagttctgtcttcagagtagtgatttagaatccagacatcttttgttttagacaaacaagcaaaactatgttgcaagatggatagttgtgatgtttatttgctgctagatcaaaggttcacaaaatatattcaattttcaggtacttgaggtaccttgattgattcccttgttttcaaaaatactaaattttaaaagttttatttgccaaacgtgtgcatacatattcaaagcaatgaaactatttcaagccatacagccacaggggtggaaacccttttcacaaattttaatgtgtttgtatgtaaatagatgtttgtatgaaatattttcatggtagaatgaatatatttaaatgaagttgaattattccagtgctatttaaacacatgacaaaatttttggtgagaattatctgagtctattgagatataatgcagatcaattttcatttttagaaatcaaaagcctacaaagtcctctgattggcgaccacctcctggtggggtggtgtctgatgtgaggtaggcttccccagtgcctcagccgctttctggtggtaagttcggtgctaatggaggtgtgtttaccttttagtgattccctacaggcctcccaggggcctgagagcgaatcgaggcattagagacaacggtgcagttatcggagcacaacaatttctttgcagggcaacagaatcagaaaccagacatggccgtgtggacctcagaactgggtttcccggccaccttctctcgccacccctaactgcctagtcacaatgtcagggaggctaccctcagtggagttggggtccagaccccggggtgggacttcacagatttaccaatgctttttgccttctgccctccctctcccagagagggcgggcagccgctggtgggggggccattctcagcacagtccgtatcctgtctcagctctggaacccaacttcaccagagagggagacttccgcggataatggaaacccttgattcctgtctgtgactttatgcgcagttgttaagtgtcattttaatatgaagaccattcattcatgtacctaagacatgcctcccaactcttctgatgctactggaaaacaaaacaaacaaacaaaaaatcctttaacagtgatatgccactcgagtgcgttccccaacccgcctttggccctggatataatgaaacaataatctgacaaattttcactgtgtacactagcaatatgaacactgagccaatgcatcctactcctctacttggtttccataattacccttgatactacagggactatgtatgtcatgcctggtggttgcataagaaagttaccaagttatatccatgatttgtagctcccttctccaaatgttttcttgttttttcctcctgggttttctatgttctctttccatcctttattgggttgtgaggtatgtttacagaatggaagccaggggttatgctttccggccttgtattgtaaccaaaagtcaaccatatcacagttcaaaaaaaaaaaaa

SEQ ID NO: 587 - DNA, 2747 bp, Cricetulus griseus
ggttcttatgggaaggactttctttggggtgagccccttctctatttccggctggcccttctgattcactccaccatttaaaacctggagacattggaccacacaaaaccttgctgatttcaggaaagactagttgtcgaagatgtccagcaagacggcaagcaccaacaacatagcccaggctaggagaacggtgcagcagttgagattggaagcctccatcgaaagaataaaggtctcaaaagcatctgcagatctgatgtcatactgtgaggagcatgcccggagtgaccctctactgatgggcataccaacctcagaaaaccccttcaaggataagaagacctgcatcatcttatagtagaccgggaagcaaccccttgccttttaacgcaaaccacagcagcaacctgaagagacgccttcagcttacccggtaaccatggctagtaactaaaacactcttctcttggaataacagaccctgaagtctctcttccgagttgtcctttcttcaccctttactgatttaatacagaataacaatcttactttctatttggtaactatggtatcatattaggttactgtataaggaaagtggcaggggagttggggaagcttgtctttacaatatacagttgattaagatatgtcaagagctaaaatgtcaaagtactagtaaattaaaatgtcaagaatcacttcagtccgaaacctttatattcagagacattcaatatttctccaagtcacccatctggccagcacttggaactgagcatgagaaagccatagcactgcccacaacctgttctcacctattgcttagtgtttccagctgaattaaaggcaactgttcaggagagagagagagaaagttgttaccttgcaaaaggtaaaaatggaaatgtataccaaaaagacaatttttacatttaatggaacattcttttttactaagtatattttcttactgatggtttctagaacctaattttaaacatgtttctttaaatattttattaaggctagtttattacaggatatttttatgcaatcatgtgcacattattggtagcaaacatagtatattctttaatacttaaacatatctttgttaatatgcttttagtggtaagaaataaacttaagatcccgggagattttgttgccttttcattggttagagacagtaaatgtcttgcaacttcctaaccagatctgagctgtgctcacaataaaagtgaaatcagatcctttgatgctggacccaagaaggaaaacattaagccaaatactgattatattacttataactaaatgtctatgtgagaaagtataatatatgtatacatatatatgacatgtagaagtcacttttatttatctgtctttgttcacttatgaagccagataactgtctgcagcaatgtgttgatgatggtcataatgaatggaagtcctgtgtgggatttttttcctacactgaccacttggcttcatttgtctatgtccagtctgcctcatctgtagtaccactcctgtgagcaatgtagtgtttatcctctgatccccacagttcatcttaattttgtccgttcatcagctgtggcttgtagctaaataattttgcttttctgaaatcatgtttttcaaatttttgccatatgaaagtaaaagtgtcatacttaattttcaaagaaagatttttgtcttctttttctgtgtttggattatttttgtactttgctaatctttaaactatccatggggaaaattttataccagtgggttaataattttgactcattgtttacacaatgtaagatgtgtcaaactggggccagcaagatggctcagtgggtaaaggtgcttgctgccaagcccagcaacctgtgtttgatccctaggatgtacaaggtgggagaaaagaactgatttccataggttgttgtctgacctacacacacaaacaataaaatactatttttaaaacatgtgccaaattatctgtccaggtgccacctctgtaccagcttaccactaaggtagaactgtcagactcatcaccctgaatctttattaaaagtgtgtccatgaacaggcccaagagccatttccaatggaataaatgtaatgctgaagtatgctatgaagtttgttgttttctttcattgtaagcctgttagtgggaaaaatacgtcaaatcaaatagaatggagcacttagcagtggttggtgttctggtcagtactgtgccggatggctttggaccaggcacctcggctctcctttccccctttgccataagggagtataaggagatgctgtctgagatcctccgtattcccaggtgccttggttgaatgacctgcctctctgctggtcctgccagtgtgttggtgctatgagctgcttcaaatactggtttgtctgtttgtctcacctaattgcttatgttatatagtgcctgttcctaggcttatggacttagtttctgtaatgtctcattgttagccatgttaactacaaacacatattctgttatgtctcagtaaagtttgatttgataaattgtttttgagattttgttatttgatgataattctttgggttatacttccagcatcttacgcattttaacactgtgattgctacttggaactctgttctgtggaaagaataaaagcgtctttttcacttgctaacatgctcacaaatgtgagagaagagtcattaaaagc

SEQ ID NO: 588 - DNA, 2747 bp, Cricetulus griseus
ggcttgtgggactgcagaaacatggctggcgttgcagcggtttcgcggcttcttcgcgggcgccgcttggcgctagctggggtgcggccagcaacattccaaacacagacctgtggctttcatttcactgttggtgaaagcaagaaggcatctgccaaagtttcagatgggatttctactcagtacccagttgtggatcatgaatttgatgctgtggtggtaggcgctggaggggcaggcttgagagctgcatttggactttctgaggcagggtttaatactgcatgccttacaaagctctttccgacccgatcacatactgttgcagcacagggaggcatcaatgctgctctgggaaacatggaagaggacaactggagatggcatttctacgacaccgtgaaaggatctgactggcttggggatcaggatgccatccattacatgacagagcaagcccctgcctccgtggtcgagctagaaaattatggcatgccatttagcagaactgaagatgggaagatttatcagcgtgcatttggtggacagagcctcaagtttgggaaaggcgggcaggctcatcggtgttgctgtgtggctgatcgaacaggccactcactcttgcacaccttgtatggaaggtctctgagatttgacaccagctattttgtggagtattttgccttggatcttttgatggaaaatggggaatgccgtggtgtcattgcactgtgcatcgaagatgggtctatacaccgaataagagcaaagaacactgttattgctactgggggctatgggcggacctacttcagctgcacatctgcccataccagcacaggggatggcacagctatggtcaccagggctggcttaccttgccaggacttagagtttgttcagttccaccccacaggtatatatggtgctggctgtctcatcacagaagggtgccgtggagagggaggtattctcatcaacagtcaaggtgaaaggttcatggagagatatgcccctgttgccaaggacctggcatccagagatgttgtatctcgatccatgactcttgagatccgtgaaggaagaggctgtggccccgagaaagatcacgtctacctgcagttgcaccatctgccccctgagcagctggccacacgtctgcctgggatttcagagacagccatgatcttcgctggcgtggatgtcactaaggagcctatccctgtcctccccactgtgcattacaacatgggtgggattcccactaactacaaagggcaggtgctgaagcatgtgaatggacaggatcaggttgtgcctggcctgtatgcctgtggggaggctgcctgtgcttcagtgcatggtgccaaccggcttggagcaaattccctattggacctcgtagtctttggccgagcctgtgccctgagcattgcagaatcttgcaggcctggagataaagttcctccaattaaagcaaatgctggagaagagtcagttatgaatcttgacaagttaagattcgctgatggaagcataagaacatcagaactacgcctcagcatgcagaagtcaatgcagaatcatgctgcagtgttccgtgtgggaagtgtattacaagaaggctgtgaaaaaattagccagctatatggagaactgaagcatctaaagacatttgacagaggaatggtctggaacacagacctggtggagaccctggagctgcaaaacctgatgctgtgcgcactgcagaccatatatggtgcagaggcacgaaaggagtcacggggagctcacgccagggaagattataaagtgcgggttgatgagtatgattactccaagccaatccaggggcagcagaagaggccatttgaggaacactggaggaaacacaccctctcatatgtggacaacaacactgggaaggttactttggagtacagacctgtcatcgacaagaccttgaatgaaactgactgtgccacagtaccccctgctatccgttcctactgataaaacctagcagctacaggaccagcttatgtggttatttatcatagcatacataggtttacctgtcatatttgtcttgttaaaactctactctcatgaacaatgagtcacttcatagattattgaccaacagcttgctagtatttgatgtgagggacagctgcaccagactttgttttttttttgtgcagtgataaaactggcataattcttaaataaaatacaaacaagcaacctttgtttccaaattaaaatcatgtgaagtagggtgggcccttaataattgggaagaaagttttgaacatggtaggtatagagccagtgccttgtttaggttactggtgggaagagatatatgcatatgttcatgtatatgtgagggggttatatgctggttagctttgtcaacttgacgaaatctagcatcacctaggaggagagtctcaataaaggattgcttcaatttgattgtcttgtaggcatgtttttgaggggttgtcttgattatgctaattgaattgggaagacagcccactataggcaacaccattccctaggcagtggatcctggactgcgtaactgcaagctgagcactcaagttgcatgcattcattcattgctctaattttcactgtgactgtaactggttgcttcaagttcctgccctgacttccttcaaatgaaggactttaaccaaaaattgtaagctaaataaaccctttctcaaagt

SEQ ID NO: 589 - DNA, 2746 bp, Cricetulus griseus
caagtattgtctctctcaaaattatcattagtgatatatagccactgaacttgggaaaaaattagaagaggtcacaattcccctctcatcagagagggtagctcctgccagcaagccatttgaaagtcataggcgtgtgctgtgtttcgatagcactgtttcttctgtgacggatacacaggggccacagtataaaatgacctcccaaaacaaagaaaagaaggaaacgtcctttcctcatctcgactccgccattgtgccctccaccttaaaactgcctcctaataatgccattaaaagagagagagagaaaactgtgcccaagattttatctaaatcagaaactgcctttagccgacacaccactgtgaaagaaattcagtctgagaagaaagttttccccacagaagtggcccttgactctttccataaaacaacagctaacaaggagaatgagttgtgcagcgatggagagaggcagaagagtccagactcttctaaactgcctgttgggcaacagaatgggagcttacggaatgaaaaaactatagcttccctacaggagttgaccaaaaacaaaccacatcctcaaacaataaaagtgctacttctataggtggagctatgaaagacctgaaaagaggagcaaagtaaatcttctaattctttaattggtgcagaaatattgcaggatgttccattgcacagcccagcaaataggattgctgatactgatttgccagtaccccggactcctggctcaggagctggggaaaagcataaagaagaacctgctgccgacaatatgaaggctccctctagtagacgctttggtgaagatggcagcatgcccagaataatggtacctcctgtcactgcagacttgccggcctgtagcccagccagtgagacaggcagtgaaaatagtgtgagcatggctgcccacacccttatgattctctctagagcagcaattgctagaactacagctactcctctgaaagataacacacagcaatttagaacatcttcaaggagcactacaaaaaagcggaaaattgaggaactagaggagcgggagcgaaactcccgtacttctagtaaaaatcttgcaaattcatcagtaccaatgaaaaagaagaaaatcaagaaaaagaagctacctagttcatttccagcaggaatggatgtggacaaatttttgctatcgttgcattatgatgagtgaacaccctgacaaagagaacagtagctgtttaaaactagtgtccttcaaactgtgcgtgtaggaaatgggatagtgacagactctgcaaacatgacctgcactttcatcgtactgagatttcactttatatctaagtcatgctgtttctgaagcagcttcctagtttgtaaatagactttcttggtatatttttattttagaaaaaaaaatagtgcaaaaatgtaagtaaagccaatctacaaaactgtacagctttgacactgtatattgtacatgtgtatatcgtgtagaaatagagcttaaatcagcctaatattcccatactgtcttgacttctatgatgcccaaggcttctggagtagtttctcatctcctttggaggaagatgatggttgttcctgtaaattacctacagcgaatattaataagacacttaaatatacagtaaaaaataataatgataaccacctcaactggttagtaaaatatctaatcagaaagcaacagtttgatgatattaacccccaaagtcaatatttctatcgcctttctcataaattgcagtaaaaaatatatttctgaaattctgtactttcttctgatgatctgttctctttgttttaaagagatttttataaaccatttattaaatgttctgatacttcagttataacttcttgaaatcttttacagaacattaagtggttggactattgagccataaaaagttgagttatgtagtagttgagatttcttgattgtatataaactttccctaagcactggggatacaaagaattgcactaattcatagttttcacatactagtgaccaatgcatatttaatttaaatcttgtatgtaaaagcttatgtggaggattgtcttctggtgtctttgaaagtcatgtccatcataagatgtaaaaatacaaatcatagttattttgtaatttagtttaccctaaagtgggatatgtaaataactgtctgtacttacctatagaacattgtgttccttaaagtgttgtaaatagttgctctcaaggtcctcaaggggagtgagaggtgccttctctgtgttgggcagatttatataaatagttaagttgaaaagctggcttaaactttaaagtaatgacagaagttatcattaatacttgaccaattgtgcctagatattgaagtgttttcgtaagtcctttctgtttaaatatcaatatattaggattttttcttcctacaagtgtatattttattaaaaagtcactttcttcaaccattttttgtactgggcctttaacaaataaatccatcctactgtaacaacaacaaaagttttcaatataaaaattatgtctttttaattgctagaattcactgtacaaatttatattgtgagaaattttttatatgactgatctattcctaaggaactaaataatcatacaattaatgtttacataactcagcttgggtctatcctacagttaggtttgaataaatatatttcaattaac

SEQ ID NO: 590 - DNA, 2746 bp, Cricetulus griseus
  modified_base (1870)..(1870): a, c, t, g, unknown or other
cctccgccggccgcagcccggccgacccgcggtgatcatgaatcaggcagataaaaatcaagaaatcccatcttaccttagtgatgaaccaccggaagggtcaatgaaagatcatccacagcagcagccaggcatgttgtctcgtgtgactggaggtatcttcagtgttacaaagggagctgttggcgccaccattggtggtgtggcttggattggtgggaagagtctggaggtgaccaaaacagctgttacaactgtgccttccatgggaatagggctggtgaaaggaggagtgtctgctgtggctgggggagtgacagctgttggttctgctgttgtaaacaaagtgcccttatcaggaaagaagaaagacaagtctgactaagagacgaagcacacttgctctccacggcatacgattccagtggcattgaactgctcaattacagactacagccaagtcaaccgctaaactgctgtgttgaaagtattgatggctggcttcatctaaaacaagaagagaccaatactatcccagtgtatggaggcttctcatacttaagttcagctttttatctggtaaaatgttacacttactcagttgtaactgaagaaatggtctgtttaaatatttgctctaagtctttcagtttgactaaaaatgtgaaagttcaactaagtagatgactttacagttccatgtgtacagtgtgccaggtgactcatgacccttacaaagggactcctgaactacataaactgtacctttgatgtgcctaatagtttcaggtgtcttagttttttataactgtagtggtttaggccaagaggcattcttatttaagctggcagaaaagtagcaggaattcaaaagtttattgtttttgttagataaaatttctgtttgtttaatcattgatgccttacaaaagaaaacatcttttctaataccttaaatttgtgcagttcttatgattatcagtgaattcttttaaaggttgtaaaactagttttccctcttaagaatctcaggagtattgaggtaaaggtgtttcctggtgtcagtgggtaagatagtgcttgttagttgttgacagtagttctcatcaaacatatgctttagttgggttcatggccccatcattaatacaccccacagtgcctatggaacatttcttagttgatcaaaagctgtgtgggaatagttttagattaaggaggaattttgttttgtttttgttttgtttttttgagacagcatttttctttgtagccctggctgtcctggaactagctctgtagatcaggttggccttgaaataaccgagatccacctgcctctgcctcccgagtgccgggagcaaaggtgtgcaccttagggttttttttttttttttttttttgttgttgttgtttactttatgaatggtaaatgtgttgtcctaatgtgtcgtcatagcgcattcattctcatagaatataactcaaaagtccatttctttttgtttcagtgttcagtttcttggaaatttaataattgaaatatatatttggcatttattttataatctaagcctgggggggatcttaattttctttatgcctaaaactagaaatgtgtctccactctgccccttctgactccctggagagagggtgggagtgggccgtgatacagatatgtcagagtgttgtgtccctgagaaggtgacacagtcaccctgacatgtagattagatgtttgtaactcttaagagtattctatcagtagtgtggatcaacaactgcataaaaatatacatttccaaagcattcacaaataacagcaggacttccaaacaaatctgtaaatgtttctggacctttatangcttgcttacactaaacttaaaatcattgagtcaaattcagaaggaattaaaaggccatttagttcatgtgacataatttaagagacatttgttggtatatctggtgaaatgtcttaacaaatggttattttttttaattccaaaattaaatagacccattcgtagtgatctgaataatggtattggagaacttgattcctgctatttagaagaaatgattgattcattgctagtttgtatttctaacttacaggctgtgctttgtacttgaattcgtctcagtgtagacttagcttatatgtgctcgcatatttattttcaactttgcttgtctttaaaatcacttgaggaaatgactataattaatttctgctacagaaaagccacctggtaaattttctcaattgtcttaaacactaaagtacaattttgttcagaggggctttttcaacaatatcagagaactgtacagatatacagttagctgtagttctaactgaagcgaacttgccatttgatgatgtatacagctatatacttgagtctcttccaatttatttttgtagtctagcagtttgacctgttaaacaggactagttcactttgttgtatacacctggaagcatctgttattcagctcctcttttgagtgggttttggcaccatgaagataaatttgcgtgatccacttgaataactgatttaataatgttgacatatgaatactgtatttagtgaaatgtcagatgaaaatagacaattgaataatgtgggttttttgtattaaagggatgggaaagaacacacaaatctgataataaaggactgtgatctgcaaagatggaatgtttcataaagatctacagaaataaagg

SEQ ID NO: 591 - DNA, 2745 bp, Cricetulus griseus
atggcggttcagacagcaggtcagagggcatgaggtcaaaggccagttccccatcagatatcatttctaataaagacggtgtcgtgaaaggccattcttcaacttcagcacaatcatctcagctgaaagagtcccattctccctattaccatggctacgagccttattattctccaagttacatgcaccctggacaggttggtgcccccacagctgggaatggtgggagcacacagggcatgaagatcaagaaggagtcagaggaagatgcagagaagaaagacaaggcagagcagttagattctaagaaagtggaccacaattctacatctctacagcctcagcaccagtcggttatcacacaaagacaccctgccctggctcagtcactttattatggccagtatgcctatgggctctatatggaccagaaatcactgatggccaccagccctgcctacagacagcagtatgagaagtactatgaggaccagaggctggcagagcagaaaatggtccagagtgggagaggagagtgtgaaagaaaggccgaactccccttgaaagaactgggcaaggaagacagtaaacagaaaaacatgccatcggccacaatctcaaaagctccctctactccggagcctaacaaaaaccattctaagctagggccatcagtgcctaataaaactgaggacacaggtaaatcacagcttctctccagtcaccagccgcagcttcaggccgacagcttcaaaactaagcagatggaaaaccaccagcttattaaggaggctgtagaaatgaagtctgtcatggactctatgaagcagacaggtgtagacccaacctcgagatttaaacaagatccagagtcaaggacatggcatcattacgtataccagcccaagtatctagatcagcaaaagccagaagaacttgacagagaaaagaaattaaaagaggacagtccgaggaagacgcctaacaaagagagtggtgtgcctagccttcccgtgtcattaacaaacattaaagaggagcccaaagaggccaagcgcccagattctcagtcagtggaggaaagcaagctgaagaatgatgatggaaagactcccgtgaactggaaggactctcgggggacaagagtggctgtgtcctcacctatgagtcagcatcagtcgtacatacagtacttgcatgcttatccttacccacagatgtatgaccccagccaccctgcataccgggctgtttctcctgtcttaatgcacagttaccctggggcctatctctctccaggatttcattatcctgtttatgggaagatgtctgggagagaggaggcagaaaaagtcaataccagccccagcatcaacacaaaaacagccagtgaagccaaagccctggacctgctccaacatcacgccaaccaataccgaagcaagtcccctgctcctgtggagaaagcttccacagagcgggaacgggagacggagcgggaccgggatcgccattcccccttcggccagcggcacctgcacactcatcaccacacccatgttggcatgggctaccctctcatccctggtcaatacgacccttttcaaggcttgacctctgctgccctcgttgcctctcagcaggtggctgcccaggcatctgcatcaggaatgtttcctgcacagagaagagaataacaggatcggaagtgtccggtgtcatgtgactggatcacatggggaagcgctttatatagacatcagttccatggtgttaatttgaaatgccttaatggcaggcaaaaaccagtcatttcattttgtaaattacagattttatcacagagtaacaaatgttgctgtaattaaacttctgttttatatatatatatatatatacgtatacatatctgtatatatacatatatatatatatacatatatatatatatatggctcgcacacacagggtcgtgctgcccaacgttagtcaaaccaacctcagtaaaggaaattaaaaaataaaaaaaagtaaataaataatgttctgtatcagtgtgcctgaaccttgcatatccttcatctctctccccatgaagcccctcagaaaggcgaactgtgatgatgacacttggtacaatttagatgtcgaattggtggctcctggttaaagactcatcagtgtaaaatgttcccgtagtcactgtttgtacttgtttattgtggaaataaatacttttggaaggcatggggttgccagaaccaacaaaaactgtgttgtatatataatgtaaaattagatggggaaataatgagcatctgtgaataatgaggagtcgtttgttgttgataatcttgaatggcagataacccaatagcctgcataccagagacatctgtgaccggctctattacttgaatagccctacagttcttcttttttttttttctttttacttttcttttaattgtttacaatatccagttttagaggagaaggactttaacgccattgcctggttacttgttttattgctgtaatctagtttattttattgtaaaatgtatattgaatgctttccttttttattacctgccttaaataaatttggcaatcagaattaaaaaggtttttttttgttttttttttaaaaaaaaaaaaaaaaaaaaaaaaaaaaaaaaaaaaaaaaaaaaaaaaaaaaaaaaaaaaaaaaaaaaaaaaaaaaaaaaaaaaaaaaaaaaaaaa

SEQ ID NO: 592 - DNA, 2745 bp, Cricetulus griseus
  modified_base (7)..(7): a, c, t, g, unknown or other
aggctgngttttcagcacaatacccccgttggatgccattgctcagttccgaaaacacattgacttgtgcaagaagaaagttgggagtgcagagctgtcatttgagcatgctgcatggatgtctaaacaattccaggcctttggagatttatttgatgaagccattaagttggggttgacagccattcaaacacagaaccctggcttctactatcagcaggcagcttattatgcccaggagcggaaacagcacgccagagccctctgtaatcatgatgcttctgtgatgtatcccagtcctgatcccttagaaacacaaacaggtgttcttgacttctatggacagaggccctggagacaaggagtcctaagctttgatctctctgaccctgagaaagagaaagcaggggttcttgccatccagctgctggaaaggagtgtcgtccactctgagatcataatcagtcttctgagcaatgctgtcgcacagttcaagaagtacaagtcgtccccggatgaaagccatctcaatattgacaacagctttgaagtgttcctacctcatggcccagttgaaggattacattacttattctctagaactccttggaagagcttcaactttgaaagatgaccagaaatactcggatagaaagaacctcatgaacgttttaatgaatgaaagccctgaccctgagcctgattgtgatgtcttagctgtgaagactgctcagaagctgtgggctgaccgggtctctctggctggaagcaatgttttcacaataggcgttcaggacttcgtgccatttgtgcaatgcaaagccaagtttcatgctccgagctttcatgtggatgttcccgttcagtttgatgtttatctgaaggctgactgcccacaccccatcagattttctaagctctgtgtcagctttaacaatcaggcttacaaccagttctgtgtattctgggtagtgagtcaggcaggtgtgtggttttgagctggcagggaggaggaggagatgcagcatcctcccaggaagccctgcaggctgcgaggtctttcaaaaggcggccaaaacttcccaacaatgaggttcactgggacagcatcataatccaggcaagcacaatgatcatttcaagagtcccaaatatttctgtacatctgcgacatgagcctcctgccctgatgaatgagatgtattgtttggttgtaactgtccaatcccacgaaaagtcccaaattagggacgtaaagctcactgctggcttaaagccagggcaggatgccaacctaactcagaaaactcatgtgactcttcatggagccgagctgtgtgatgagtcctacccagccttactcaccgacattcctgtgggagacttgcatccaggagagcagctagaaaaaacagtgtatgttcgatgtggaacagtgggctccagaatgttccttgtgtatgtttcttacctgatcaatacaactgttgaaggaaaagagattgtttgcaagtgtcacaaggatgaaactgtaaccatagaaactgtctttccgtttgatgtcgccgtcagatttgtttccacaaagtttgagcacctggaaagagtctatgcagacatcccctttttgttgatgacagatgttttaagtgcctcaccttgggccctcacaattgtgtccagtgaactacagcttgctccatctatgactacaatggaccatctggagtcccaagtggacaaagttgtcttacagacaggagagagcgctagtgaatgcttctgtcttcgctgcccatctgctgggaatgttgaaggtggagtggcaacaggacattacattatctcctggaagaggacctcgagcatggagaacatccctgtcatcagtactgtcatcacgctgcctcatgtgattgttgaaaacatcccactccacgtgaatgcagacttgccgtcgtttggacgtgtcagagagtcattacctgtcaggtaccacttacagaataagacagacttggttcaagatgtggaaatttctgtggagcccagtgatgccttcatgttctcaggtctcaaacagattcgattacgcattctgcctggcaccaaacaggaaatgctgtataatttttatcctctgatggcggggtatcagcagctaccatcgctcaacatcaacttgcttcgatttcccagcttcaccaaccagctactcaggcgctttttaccaaccagcatctttgtgaagccacagggtcgactcctggatgatgcatctattgctgctgcatgatgtccaggaccagcccttggtgttcttacaaaggagtcgagagagtacctaggagacccactgggacttgtagctttgatcatggtgaaaagttaatcttgcctattttttaatggatatgataccagctattcagagaaactcatgcttaaaatattaagaaaatcatcttctcgtatagtttggctaataaaaatttgaaatctgtcactgtaacgtgaaagggcattaagagttctcagtcactttatataatttcataagtgctatttaaaacacctttaaattcatgtaaatgaaaaatatcatacagtgaatgttttctttgtaaaatatcttaatttaaaactacttaatttcttggaaaattttattatgtagaccgaggacatattgtaaaaaggaaatagtgctgtaaataaacatgttctctttcaaaaaaaaaaaaa

SEQ ID NO: 593 - DNA, 2745 bp, Cricetulus griseus
attcagaaaatgaagcagtccagggacagatgcgttccagaagcccgtccccttggagcaacacccggactacgcagagtacattttccaccccatggacctttgtacattggaaaagaatgcaaaaaagaagatgtacggctgcacggaagccttcctggctgacgccaagtggatcctgcacaactgcattatttacaatgggggaaatcacaagttgactcaaatagcaaaagtcgtcatcaaaatctgtgaacatgagatgaatgaaattgaagtatgtccagaatgttaccttgctgcttgaccaaaaacgagacaactggttctgtgagccctgtagcaatccactacccttattccccattcaggacgccctacacgcccaatagccagtaccaaatgctgctagatcctagcaaccccagcgccggcactgccaagacagacaaacaggagaaagtgaagctcaattttgacatgacagcatcccccaagatcctcctgagcaagccccttctgagcggcggcgcaggccgcagaatctccctgtccgacatgccacgctcccccaccagtacgaactcttctgtgcacacgggctccgatgtggagcaggaccccgagaagaaggccccatccagccacttcagcgccagcgaggagtccttggacttccttgataagagcacaggcaaaatgatggatgccattaaaagggacgatgacggaaatctacaatgacctctccaaaaacaccacggggagcacaatagctgagattcgaaggctgaggattgagattgagaagctgcagtggctacaccagcaggagcttgctgagatgaaacacaacttggagctcaccatggcggagatgaggctagagcttggagcaggagcgtgaccggctcatcgccgaggtgaagaagcagctggagctggagaagcagcaagcagtagacgagaccaagaagaagcagtggtgtgccaactgcaagaaggaggccatcttctactgctgctggaacactagctattgcgattacccctgtcagcaggcccactggcctgagcacatgaagtcctgtacccagtcagctactgcccctcagcaggaagcagatgctgaggcaagcacggacacaggaaataagtcatcccagggcagctcctccaacgcacagtcagcaccttcagaaacggccagtgcctccaaagagaaggagacaccagcagagaagagcaaggacagctcgaccctggacctttctggctcccgagagacaccctcctccattctcctaggttccaaccaaggctctgttagcaagaggtgtgacaagcaagctgcctatgccccaaccactacagaccaccagccgcaccccaactacccatcccagaagtaccattccaggagcagcaagacaggtttgtggagcagcagtgaggagaagcgaggatcagcccgctccgagcacagcgcagggaccagcacgaagaacctcatgcccaaagagtctcgggaatctcgactagacaccttctgggactagggtgcatgcattgtgagccagaacacccccctgtagggggaaacaacccaaacaacaggaagcaacagaaactggagaacagccacctttccaatacccaacactcaggctctgcccgtgggcttggctacagggcagcgacttgactccatcccagcatgggccttgctgggactgctggaccttgtgagtccaacactttaggtataagtaggtacactttgtgacgtcactgacctagcctaccttcctttttcatatctatactgaccttaacttataaaaaaaacatatatataaaaaattctacaacaaaaagaatgttttgataatctagagagctggctagctagccctctggcctcactgtggtgtcagggctgggcccagggattgctgttctcacagaggtcctccttcttggatactcaggggagggaggcgccactgtcaccctgcagcacaccacatcggggctctcaggctgtgctgtcctggacccgccacaccaagccatccgcccctcacagaccctacaagacgatgttatgaaacacaagctcactgggctccaaggtacacagagagaagccagtacgttcggtgtgatttccgctatggttcccaaaggggcagaacagcctgctgtttgcagaaggtccaagccctcggatggagcatgtatgtattatttatatgctggagttctacgtttttatgtaagcatgaaacacaggcagtgtgagagaaagccaggaccggtcatgctgtcccgttaacgctacgtctgctgtagttccattttgtatgttgtgtaaaacaagcatcgatcgaagcaaaaagtgatgtgtatatgagaacaattaattgtatatcattccagtacattccgttgtacattttagtcttcgtttactttctcttcattgttggtaagagaatgcaagctgtgcattgtccagctagtttaccccctcctagaaaagcaagaggaagacatgctagaagaaaacaggagagaaagaacatttgtgaattgcagttgtcaaaaaaaacaaaacaaaaaaacaaaacaatctagcctagctggccttatttgggaagcgtaactgcttttagcatatgggagtattttttcacattttctttgtataaaatttgtattaaacttaaatatcttttttga

SEQ ID NO: 594 - DNA, 2744 bp, Cricetulus griseus
tgcggctcgtcacgtcccgtgcgcggtcactcagcgaagatgcctgaggaaacgcagacccaagaccagccaatggaggaggaagaggtggagacctttgcctttcaggcagagatcgcccagctgatgtccttgatcatcaacaccttctactccaacaaagagatctttctgagggagctcatttcaaactcgtcagatgctctggataagatcagatacgagagtctgacagaccctagtaagctagactctgggaaggagctgcacattaatcttattcccaacaaacaagaccgaacccttactatcgtggatactggaattggaatgaccaaggccgacttgatcaataaccttggtaccattgccaagtctggcaccaaagccttcatggaggctttgcaggctggtgcagacatctctatgattggccagtttggtgttggtttttactctgcgtatttggttgccgagaaagtgactgtgatcaccaaacataacgatgatgagcagtacgcctgggagtcctcagccgggggctccttcacagtgaggactgacacaggtgaaccaatgggtcgtggaacaaaggttatcttacacctgaaagaagaccaaacggagtatttggaggaaaggagaataaaggagattgtgaagaaacattctcaatttatcggctatcccattactctcttcgtggagaaggaacgcgataaggaagtcagtgatgatgaagctgaagaaaaagaagataaagaggaagagaaggaaaaggaagaaaaggaatccgacgacaaaccagaaatagaagatgtgggttctgatgaagaggaggaggaaaagaaggatggcgacaagaagaaaaagaagaagataaaggagaagtacattgaccaagaagagctcaacaagacaaagcctatttggaccaggaatcctgatgacattactaatgaagagtatggagagttctacaagagcttaaccaacgattgggaagaacatttggcagtgaagcatttttctgttgaaggacaattggaattccgggcccttctctttgtcccaagacgtgctccatttgatctgtttgaaaacagaaagaaaaagaacaacattaagttgtatgtgcgcagagttttcatcatggataactgtgaggagttaattcctgagtatctaaatttcattagaggagtggtggattctgaggatcttcctctaaatatttcccgtgaaatgttgcagcaaagcaaaattttgaaagttatcagaaagaatttggtcaagaaatgcttagaactatttactgaactggcagaagacaaagagaactacaaaaagttttatgagcagttctcaaaaaatatcaagcttggaattcatgaagactctcaaaatcggaagaagctttcagagctgttgcgatactatacatctgcttctggagatgagatggtttctctcaaggactattgtaccagaatgaaggaaaaccagaagcacatctacttcatcacaggtgagaccaaggaccaagttgctaactcagccttcgtggagcgtctgcgaaagcatggcttagaagtaatctatatgattgagcccattgatgagtactgtgtgcaacagctgaaggagtttgagggcaagaccttggtgtctgttaccaaagaaggactggaacttccagaagatgaagaggagaaaaagaaacaggaagagaaaaagaccaaatttgaaaacctctgcaagattatgaaagatattttggagaaaaaagttgagaaggtggtcgtatcaaaccgattggtgacgtccccttgctgtattgtcacaagcacatacgggtggacagcaaacatggagagaatcatgaaagctcaagctctcagagacaactcaacgatgggttacatggcagcaaagaaacacctggagataaaccctgatcactccattattgaaaccctacgacaaaaggcagaggctgacaagaatgacaagtctgtgaaggatctggtgatcttgctgtatgaaactgcactcctgtcttctggtttcagtctggaagatccccagacacatgctaacaggatctacaggatgatcaagcttggtctaggtattgatgaagatgatcctactgtggatgataccagtgctgctgtaactgaagaaatgccacccctggaaggagatgacgacacatcacgcatggaagaagtcgactaagcttcaccagagctatatgtttgatgcttactttcattccttctgataatatattttcaaggatttttgtttatttttgttaacatttaaaacatctgtgtggcatgaaaactaaggggaagaaaaatttctttctacttgtgatactgtgatactctaggcttgactcaacgggttggtagaacatttgttgtaagacaaaatgtaacctattaactttgtggtctgcagtgtttagctgttgagctggattccttagtagaccaaattaagatggcctaagtttcatcttaaaattttcatcccctgtagttaattctgcatgtactagtcttagaagtaaatacacaagctaaaacaactgaggaattccccatgtggcttgttttcaaagtactgagaacaaaactaagcttccctaggtcttgtaactcagcaaggcttgtgaatggaaatatagtgcccaatcacattctgctttaaaaggtaaatacagatgagat

SEQ ID NO: 595 - DNA, 2744 bp, Cricetulus griseus
  modified_base (1846)..(1846): a, c, t, g, unknown or other
gaggaagaatggcaggccctagtcagctctgcattcgccgttggactaccaagcatgtcgcagtatggctgaaggatgaaggtttctttgaatatgtggacattttatgcaacaagcaccgacttgatggaatcacattactcacactgactgaatatgatcttcgatctcctcctctggaaatcaaagtcctaggagacattaaaaggttaatgctctcagtcagaaaattgcagaaaatccatattgatgttttggaggagatgggctacaacagtgacagtcctatgagtcccatgactccattcatcaatgctcttcagagtgcagactggctctgtaatggagagcccacacacgactgtgatggacccatcactgacttgaattctgatcagtaccagtacatgaatggcaaaaacaaacattctgttcgaagattggacccagagtactggaagaccatactgagttgcgtatatgtttttatagtattcgggtttacatctttcattatggtcattgttcacgagcgagtgcctgacatgcagacctacccaccactcccggatatattcttagacagtgttcccaggatcccgtgggccttctccatgactgaagtgtgtggcatgattctgtgctacatttggatcctggttcttcttcttcacaagcacaggtcgatccttctgcgaaggctctgtagtctgatgggcactgtattcttgcttcgctgctttaccatgtttgtgacctccctctccgtgccaggacagcacctgcagtgtactggaaagatatatggaagtgtatgggagaaactacaccgggcttttgccatttggagtggctttggtatgaccctgactggtgtccacacttgcggagattacatgttcagtggccacacagttgttctaaccatgctgaatttctttgtcacagagtatacaccaagaagctggaatttcttgcacactctctcctgggttctcaacctctttggaatcttcttcatcttggctgcccatgaacattattccattgatgtgtttattgccttttatatcacaacaagactctttttgtactaccatactctggccaataccagagcgtatcatcagagtaggagagcgagaatttggtttcctatgttttctttctttgaatgcaatgttaatggcacagtacctaatgaatactgttggccattttctaaaccagcaataatgaaaagactaattggatgaagactatctctgtaatgagtttgttgttaaatatacagtagttacagaatgaaaatgaataactttgctagattataatatattagctattatgagacagtgtttacatgagctaatcatcttcaagtctcaaaactgatacaaaattattttcaggttttgacttcacacctttcctcttgttgaaatcttaactgtagtgaagatagaatttatgtttatattttggcatgatgtagctggggggagaggctccatgcttttgaaccttctatttgattctgcagttgtacaaggctttcatccttcccagcttagtgaagaagggaaagaaagggcttgagttttttttttttttttttttggttcagttggtttggtgttatttaaacttgtcttggagccaggcgattggtggcgcacacctttaatcccagcactcgggaggcagaggcaggcagatctctgagttcaagaccagcctggtctacagagcgaattccaggacagccaaggctacacagagaaaccctgtctcaaaaaaccaaaaaaaaaaaaaaaagagctgaatgagcatgccactaatgganaaagggggatattttcacagaaccagtactccccacagaccatctccatctgatgtcaatcaaaacagaacattggccatttagtttaaaaaaaaaaaaaaaaaaaaagacgcaaatattgtcttgtgcacatacaccagttactttatgtacgtttgtttcttcttctttgtgaatagctttacatgaataaattattgtagaagtaggtgtcggtttgcctgtcaagtcagtggcactaatttcacaaaactaatgtgataaattattgtatcaagttcagtacaaatgtctatgaactctaagctatttctccagctacattaagttgtttttgagacacattctactgtatgttaattaaaggactctttattctgtgtattttttgtcttggcataaggaagctttatgctttgaaaggagaaggaatgttatggagttgtgtttggtttttgtttttcattgttatttcacatctcttaatctgaactactggattttctgaagaactaaacagccagctattaacatctttaaaatgtttaattttaattttcatttgaagaatccatggatcattaggacagtgaaatgtttctgatatgaacaaagcaaatgagtctagtactcagtggagaccagaagcagtttgctgggctaaaccaggcctgtttagtttggggaattgtacctaaaggtctccctgtccacagagaaactagtgttacttgaagatatgaaagttcctgtggtagccataccttgaagcacagtgttgtatataagtaaatacctgattctaaattaaatccagatttaactaatatatattattttatatctttgttgtattaaaatgttttaaaacaactaaaaataaaacatttgaaagttg

SEQ ID NO: 596 - DNA, 2742 bp, Cricetulus griseus
cagatccaggagatcatggagaagggcactgagttcttcctcaaagttagctctccaagttgcgactcccagggcctgcacccagaggaggccccatcttcagagcctcagagtcctgtagcgcagacactaggctggccagcctgtagcacgccactgccccttgtgtcacgggtcaagacagaacaggagttggactccgtgcaagtgcacacccatggccaagaggctgtgggatagcagccagaaggaggctggaggcagtggtagcaatggcagccgcaagatggccaaattctccacaccagacctggccattaaccggatgccccagccagtctcaatggccacagctacagcagcagtggctgtggttgcagtggggggatgtatgagtggaaccagcatgtcagagcggacagcccaggtacctccagtgcttacaccagttgccattgcagctgacatgtgcaccaatgcccgccgagtggtacgtaaaagctggctgcccaagaccaagccactgcacctggtagagggtgatagctacagcagcttcatcagcgacgttagcaagatagagccggacatgatgagcatggagcacagcttcgagacagccagccacgtcacgagctactgtctgtcccctcccctcggaacctgtcacggggtggagccctggttccccttcctcttaggcatttcccagcaccaggcccggctagggggatgggcagagctcaagaagagcctgcccctcactgtggctgcttgggactccatgggcccaggggttctcaggacccctcccaccacccccagtgcttccatgtctccaaaagcgccttcctgtccctctcgtctgtacctgcaccttggggctggggtaggtgaggccaagagggactgtccactttattgctaaggaaacaagcccaaaaggcttagagaaattctagaactgaccctctgtggcagcctccatcatacccctctaaatcccaccctgctctgcctctatgggtccctcagcccaagaggttggttctaagagagcagtgctcctcctgtgggcaggcgagagtctcaggacaggtttccagtctggcagaatttgtgggtgtgcgtgtgtgcgtgcgtgtgtgcgtgcgtgcgtgcgtagagtgtttgcttttaaaaacatgaagatcaagaggcagcaagaccagggtcggaaccagggagcaggctgggaggctgctgcccttctcccatccgaccctgggcagggctcccagcccccaccccctgtacataactttttgaaacatttttttagcgaatgaaatattgaagtataagatttccttttatttttcaaatcaatgggaatgtgtctgaggtaccctggatccctgggctgtggaaggcagaatgcagggaaactgtgtgtgtgtgtgtgtgtaatgtgggtgcatgtttccacaggggctcagtcccagtgccccagggctcctgtggatccaaccagcttcctctctcccaggactacagtttaagggtgttcacaggtcccagttggctgagcccactcttgggggatgagacagggcagggtccacatccattgttggtggtttgtggagctttctctggctgtttctttccactcttaactctccaggagcaagctcttgggtttctgaatttaatatgtgagcacagggtttctgttactcccctgcattaacgtcatttcaccatctcactggttctgttctagccctgacctccctccctctccccaactctgcattctagctgcctcttcagaggcacggggttgcaggattggagaggtgggatggagccttttgagtcagatctggagacttgcctccaggccagcagcaccctctaatctgccagggtccctcttaacatctgatggtgagggtggggtgttgggtctgacttgaccccagtaccttagccatgggtggccaagtggaggggagttgacatccctagctaaagcacaagcaccttagtcataccccctccctccacccttgcccgggcctgttgtcccatctcccccagcaaagatcccaaagcacaatgtcctggtaacttggcaagcagctgagcctggccatggtgaggacaggctgtgctccctgcccagacttagtaagggggcagctccacgggactgaaaggtcttgtggtagagtgggcagcagagcccattggttccaagcacctcaggaggtggccctgactcccgggacttggggtgggggaggtataaagccaggggtacaggggagaaaactactcactaggagagccaaagacagggttgtgccttacctcaggagccacccctgcacccctcctctggaggtcagctgcttgccctgccctcctgagagctgcatgctccccacccaagcatccaggagagtgaaaaagtaacccacctggcaggaaagacaactaggggcaaacccagtggcaaacccacccatccatgcctctcatggggacaggccatcacccactggcccatgtgaagtgccaatgccctccccacccagagccaagtccccacccctcccaggcccacaagtgagattgcacattaactactgtacggagaggagtggtgttgggaaatgtgaaccctgagagtcagtgatgctgataagaataaacaagacgcctttgtaacaaaaaaaaaaaaaaaaaaaaaaa

SEQ ID NO: 597 - DNA, 2742 bp, Cricetulus griseus
gcggcggcggcttaaggcgcaggcgtggttcgttgggtgtgaatccgctgagccccacgagccgcttctcagccctctctcctgcccgtcggaccccgggagcaggaacccgcttagccggcgtcatcatgaccaaggccggtagcaagggcgggaacctccgcgacaagctggacggcaatgagctggacctgagtctcagcgacctgaatgaggtccctgtcaaggagctggctgcactcccaaaggccaccgtattggatctgtcctgcaataaactcagtactcttccgtcggatttctgtggtctcacacacctggtgaagctggacctgagcaagaacaagctgcagcagctgcccgcagactttggccgcctggtcaaccttcagcatttggatctcctcaacaacaagctggtcaccctgcctgtcagctttgctcagctcaagaatctgaagtggctggatctgaaagacaatcccctggatcctgtcctggctaaggtggcaggagattgcctggatgagaagcaatgtaagcagtgtgcaaacaaggtgttacagcacatgaaggccgtgcaggcggatcaggaacgagagcggcagcgccggctggaagtggaacgagaggcggaaaagaagcgagaggccaagcagcaagctaaggaagcaaaggaacgggagctgcggaagcgggagaaggcagaggagaaggagcgccggcgaaaggagtacgatgcccagaaagcttcgaagcgagagcaggagaagaagcccaagaaggaaacaaatcaggccccaaaatctaagtctggctctcgtcctcgcaagccaccaccccgaaaacataatcgatcctgggttgtgctgaaggtgttgctgctgctgctgctgctatgtgtggcaggagggctggttgcatgccggatgacagggctgcagcagcagcccctctgcaacagtgtgaacaccatctacgacaatgccgtccagggcctgcgtcatcacgagatcctccagtgggtcctccagaccgactcccagcagtgagcttgtcctcagcaccgctgcctcccagccttggagcttggattcctatggaattgggttctgctggacacaacctctttttagcgtcagacctacctgccatcatcaaatggcttctgattggtacttgagatctcccctttgtaggacttctttgttccttagtcagggttccctggtggaatgaggagaaatggagaggggggaggaagagttacctgcatgcctaaggaataggcttaggggcggggagagagaagacataggcttttctagttacacaaagctatgtaaggcaaggttcctttctactaaatggtcagctgtcactacatttatacttttgtatgtcataaaccctttctttcattcctccctgggtaaccgggacagattagagggcagtatgttattggggataagcaatacttgggtaaatctagcctaagctgggagggtggagtaatacatttccttaaagatctcagacatttgagcattttcctggctgtgaaggtcacttcactgccattggtccagtgtaacactgaggcagagcaggagaggccgtctatgacttgtcaacagtgttctagtccaaagcagaacccaactctcactccagttttcttcctttccttgatgccatttggcctccttgataatacccaagagaatgaactcacaccagaattgtctcggccaaagtgagtctttcataatagacaagtcttgccacccacaaatagatctcatatcatcagggccctgggaaatgcctgtggaattctgcttcaacttaaatggcttccacaaaggggcagcaggccagtctccttgcctcagtttagagcattaagtccctgatggcctgggagcacagaggcagagctctacaaagctgccccgggacaggtccactagtacttggtgtgatgaaatacctcagaggcagcctagaaacttgatttcaaagcaggtttagagttgattctgggcctgtaacagaagggaaggaagaagtacaagagtgggagccaaagggaagcagtcaggtggtgtggtggtgcatagacatgactagacattagcacaaacagcagcgccacccaccttcctgctgcacaggaagcatgcctgtccccctttcccttgtctcttcacagcagctggatgatgggatcagaaataactgtgtcttggtgcttatctgctaaaaattccccaattgcaagctccggaccaagtacctgtcatagttcagagagtgtagccctagtggcccatctggataggtctgccactcaaaactgtcctgacactggaagaaaggcctttgttttctcctcccccagacagctctgctgtgtagctccacaccctactcagaatcacctactcagaatcactacacattcctttagtcttcctccaagctccagagccattggtacaaatgctttattgagacaaaatacatactacatatggtgacatcatgaaaacagaagtcaggctagtcatagtaacctggctggttgaggcagctcagtggctgagcctagtcaagccaacctgcaggcaagaattcactctgacttcgagatttgatgcttattctttggatttctacaattattaaatccatgtccgagtggtcaaaaaaaaaaaaaaaaaaaaaaaaaaaaaa

SEQ ID NO: 598 - DNA, 2741 bp, Cricetulus griseus
  modified_base (458)..(458): a, c, t, g, unknown or other
aaataccaaatgggagatcaaaatgtctatcctggacccattgacaactctggacttctcaaagatggcgatgcccagtcacttaaggagcaccttatcgatgagttggattacatactgctgccgactgagggctggaataaacttgtcagctggtacacgctgatggaaggccaagagccaatagcgagaaaggtggtagaacagggtatgtttgtaaagcactgcaaagtagaagtatatctcacagaattgaagctctgtgaaaatggaaacatgaacaatgttgtaactcggagatttagcaaaagctgacacaatagatacaattgaaaaagaaataagaaaaatcttcagtattccagatgaaaaggagactagattgtggaacaagtatatgagtaatacatttgagccgctgaataaaccagatagcaccattcaggatgctggcttanatcaaggacaggtgttagtgatacctcaatgacaagtaccaagaagagctgaattttgacaatcccttaggaatgagaggtgaaatagctaagtcatatgctgaattgatcaagcagatgtggtctggaaagttcagctatgtcactcctagagcatttaagacacaggtaggacgctttgcaccccagttctctggatatcaacagcaagactgccaagaactcttagctttcctattggatggattacatgaggatttgaatagaattagaaaaaaaccatatatacagttaaaagatgctgatggcaggccagataaagtggttgctgaagaagcctgggaaaaccatttgaaaagaaatgattctatcatagtagacatatttcatggccttttcaagtctactttagtgtgtcctgaatgtgctaagatctcagtaacctttgaccctttttgttacttgacacttccattgcccatgaaaaaagaacgtagcttggaagtttatttagttagaatggatccacttattaaacctatgcaatacaaagttattgttcccaaaattggaaatatactagatctttgtgcagcattgtctgctttgtcaggagtacctgcagataagatgatagtcactgacatatacaatcatagatttcacaggatatttgccatggatgaaaacctcagtagtattatggagcgggatgacatatatgtgtttgaaattaacatcaacaggacagaagacacggaacatgtggttattcctgtttgcctaagagaaaaattcagacactcaagttatacccaccatactggctcttcactgtttggtcagccttttcttatggctgtaccaagaaataatactgaagataaactctataatctcctactcttgagaatgtgccggtatgtcaagatgtctactgaaactgaggaaactgatgggcccctgcgttgctgtgaggaccagaacatcaatgggaacggccccaatggcatccatgaagaaggctcaccaagtgaaatggaaacagatgaaccagatgatgaatccagccaggatcaagaactcccttcagagaatgagaacagccagtctgaggattccgttggaggagataatgattctgaaaatggattgtgtactgaagagacttgtaaaggtcaactcacaggacacagaaagagactctttacattccagttcatcaatttaggcaacactgatatcaactacatcaaagatgacaccaggcatataagattcgatgataggcagcttcggctagatgaaaggtcttttctcgctttggactgggaccctgatttgaaaaagagatactttgatgaaaatgctgccgaggattttgaaaaacatgaaagcgtggaatataaacctccaaaaaaaccctttgtgaagttgaaagactgcattgagctttttacaacaaaagaaaaacttggtgctgaagacccctggtactgtccaaattgtaaagagcatcagcaagccacaaagaaattagatttgtggtccctgcctccagtccttgtggtgcacctcaagcgattttcttacagtagatacatgagagacaagctagataccttagttgattttcccatcaatgacttggatatgtcggagttcctcattaacccaaacgcaggcccttgcctctataatttgattgcagtttccaaccactatggagggatgggaggtggacattatactgcttttgcaaaaaataaagatgatggcaaatggtactattttgatgacagtagtgtctccactgcatctgaagaccaaattgtgtccaaagcagcatacgtactcttctaccagagacaggacactttcagtgggactggcttcttccctcttgaccgagacactaaaggtgcttcagctgccacaggcgtccccctggaaagtgatgaagacagcaatgacaatgacaatgatatagaaaatgaaaactgtatgcacactaattaatgaaagtccaagaagccataaagagagactttcctgctggtggtgtctatggaaatgaagtagcccaccacattaaaacacaagtctgagatgaggagtttcagataaccgaatgtaaatcctttatcagattttaacttgtgcagtacttgaagtgaaacacaatgaaaactttaacagaaattgtctcttaatacatttacagtcttgtatttacaagctaaatatatataggaaatcacaaataaatcccttttaagtttg

SEQ ID NO: 599 - DNA, 2741 bp, Cricetulus griseus
agggcttttgcactttttctttctggcggctttttcttggatgtgcctagaaggtgtacagctctacttgatgttagttgaagtttttgagagtgaatattcaaggaagaagtattattatgtcgctgggtacttgttccctgccacagtcgttggtgtttcggctgctattgactataagagctacgggacacaaaaggcttgctggcttcacgttgataactatttcatatggagtttcattgggcctgttaccttcattattctgctaaatattattgcccttctgtgtctcctgggcctaacctggtcctttgggttgctctttgttaatgaggagactgttgtgatggcctatctcttcaccacctttaatactttccagggagttttcattttcatcttccactgcgctcttcaaaagaaagtacgaaaagaatatggcaagtgcttcagacactggtactgctgtggcggcctcccgactgagagccccccacagctctgtgaaggcgtcaaccacccgaaccagtgctcgctactcctctggcacacagagtcgtatcagaaggatgtggaatgacaccgtgaggaaacagtctgaatcttcttttatctcaggtgacatcaatagcacttctacccttaaccaaggcatgaggacattcactaaaacaatgccagggacgcgagtgccatggatactctaccgctaaatggtaacttcaacaacagctactcgctgcgcaagggggactaccacgacggggtgcaggtcgtggactgcggactaagtctgaatgacaccgcgtttgagaaaatgatcatttcagagttagtgcataacaacctccggggtggcaccaaagcccacaacctggagctcaagctcccggttaaacccgtgatcggcggcagcagcagtgaagatgacgcgattgtggctgacgcctcatctttgatgcatggagacaacccagcgctggagttccgccacaaagaactggaggcgccgctcatccctcagcggactcactcgcttctgtaccaaccccagaaaaaagggaagccggaggcaaccgacagctacgtctcccagctgacggccgaggccgacaaccacctccagtcccccaacagagactctctgtacacgagcatgcccaacctaagagactctccctacccggagagcagccccgacatggcagaggacctgtctccctccaggaggagtgagaacgaggacatttactacaaaagcatgcccaatcttggagctggccgccagctccagatgtgctaccagatcagcagaggcaatagtgatggttacatcatccccattaacaaagaagggtgcatccctgagggggacgtcagggaaggacagatgcagctggtgacgagcctttaatagtccagttactcctagggccacacgcaagtattaatcggtccagagcgctgccagcggcccctgcagctccctccaactctgcctcaagagtcggctctcatgacccgtggttctccactgtaggaaagcaaaccagactgaacctcgtagttctgtgaatttttataaagcatacgaaaactttgtacatacacagagtatactaaattgaattatttgttacaaagaaaaagagatgccaaccaggtattttacgtttctgctgctgtgtagagagattgtgaaacaaacgagagacccttcccggccatgtcacttgcggcagcggttggtgaactaagtctgtaaatagggccgcaccgttttttgggttttgtttttgtttgtttgtttgttttgtaggcctgcattgtattatatacaagacgtaggctttaagatcctgtgggacaaactgactgtatctttcttttcctgacaagacttggaaaagcaggagagagattctgcacccgtttgcacttccctgcaaaccttttacattaaggcaacaatggaaaacatgtttaaccagtagcaatcaagccacaggccttatttcatgtttcctcaactgtacaatgaactattctcatgaaaaaaaaaatggctaaagaaattatattttgttctattgctagggtacaataaatacatttgtgtccaactaagatataattgtcattaaaataattttaaaaagagtttggagaaaatcttgttgacgagctcttggttgcacacgataggaaatgtgttttctgactcccgccatggtaagttcgccccggttttgcttcttttcagccgtagacagcgttctgctttgaccagttagtccttttcttacatttaaatttcttactgccaaaagagcgtgtgttatggggagaaacctctttaagtcagtcctgccatgccttgcacaaacgtggggaaatctgcaggtcttgggtcatccctctgtttattctggaacggagggcaaagggggcactgggcacttctcacaacctttctagtgaacaaaaggtgcctattctttttaaaaaataaaaataaaataaaacagaagtattactcttccatactccttctgcctatatttagtaattaatttattttatggtaaagttctaatgacatgtacaatgtttcagccgagctctgctcttctttccagccctttgtgtaaacctgttaataatgagcccatcactaatatccagtgtaaagtttaacacggtttgacagtaaataaatgtgtaattttttcaaagta

SEQ ID NO: 600 - DNA, 2740 bp, Cricetulus griseus
tgttcatgtacttcctccgcggcagcctgccctggcaaggactcaaggctgatacattaaaagagagatatcaaaaattggtgataccaaaaggaatactcccatcgaagctctctgtgagaacttcccagaggagatggcaacctaccttcgatatgttaggcgattagacttctttgaaaaacctgattatgagtatttacggaccctcttcacagatctgtttgaacggaaaggctacacctttgactatgcctatgattgggttggaaggcctattcctactccagtaggagcagttcatgtagattctggtgcatctgcaataactcgagaaagccacacacacagggatcggccatcacaacaacagcctcttcgaaatcagactgcatcatcagagcgccgaggagagtgggaaatccagcccagccggcagaccaatacctcattcctgacgtctcacttggccgcagatcgccatgggggttcagtacaggtggtcagctcaaccaacggagagctgaacgttgatgacccaactggagctcactcaaatgcaccaatcacggctcatgctgaggtggaggtagtggaggaagctaagtgctgctgtttctttaagaaaaaaaggaagaagactgctcagcgacacaagtgaccagtcgcctcccaggagtcctcaagtcctggggactctggttccaattgcacctgcagctcctgccatttctcattggaaggggactcctctgtgggggagggtggcgatccaaaaccaaaaagaagaaaacagatgcccccagaaggagccagtgcaggcagccagggcccagtgggccagtggcaatcccctctgtctgagctctgagcaggtccagagctgctgcttctccactgcttgcccttgggccatctggttgactctcttcccattgtttacagtgaaggtgtcattcacaaaaactcaaggactactactctcttccctcctcttcctttactcctggttcttacaccacccgcaaccctctccaagcataaaaactactaagctaaaggctctagtacaagaagctggtggtgtggccaagaaatgttaaagtggtggctaaggatcatagccttaatttaaaaaaataatgtaaaagataatccattccccctccatgttgagcaagcatggctgcatttctcaagaatatctttctcagaagcctaggaagcatttcctcaaaggaatttggtctttatcttccaaatgtccctcctaaacccacatgactcctgtgtccccgccacctcttccatgttcatactgaaaccagttttccattcctggttttgttgccctggtaatgctttgtccagtgtcagtcatgccagggcttgagtttttcagactaggactttgcatggtcatacaaccaacattgcctttgccaagccactgccaccatcccctccattgccccaaataggcaggttgattccagagaccctcagggagccaggataattagtacccaaatggattggccatgtgggtaacaagcacttatctctgggtttcttgattttgcagacatcaaggaagtcccatgtagatgttgatggcaaataactccagccttccccatgatgggttggtagcaatcaaataagaattcctttgtttgttgggggactttgttttaagggggttaatttgtgagtatgaaaaggagaggccactatggtccttctgtgagtttgtagagttttgagcagtgttttcatcaccagtcttgggagtctctgatccaataaccagtcttaaggtgtttgtcctactccttttgcaggttaactaagtacagaagaatagaattcttattgtatcaaaatagttagtagatccctggatataggcagtagtagttaacatattttctcaaaaaaccaaccaggaaacccactccagtatttacacatcaacttatcaaggaaaaaaagtgaaaaatgcactccatatatctctagttcaattaccacacttgatgttataaagaaacctcggttgtgtggacagcattgcagtcatcccagtaatgcacagacaactgccatccaaactaacccaaatccacttttcagggtgggtgaatcattttggtacccctctttgggagctccagaccaaatcccaggctaacccatgcaccaaaaaccttttagaaggcttacaatctgttcggaatgtctcaggaaacatgagccatttcttgggggatacatgtatttaccgatgaatatgtgcactcatctgtgcgtggtttgttctcataggcagcacaggctcctgggaatgtggaaatcagtttgatttcatgtgtggatgtgtctagttattgttaaatgacttttttctactttttaaaaaaaaacgacagctgtgaaaaatgagaaacttgtagtattttttaaatgaatgtcaattttgagtgtatttgaaatgtttcctccaatagagagatttggacaccattgtggaaaactcctctgcagaggaagtagcctttggagaaaatgggatgtgggtctggatatgttatctcagagtagcccatttcatagggcaccatggacaatacaaatgtgatctttaagtatacctcttccccagtttggggaggaaaggactcagtttgctacccttttgtatgtaaaataaaatgtcctacctttcttggctacattt

SEQ ID NO: 601 - DNA, 2740 bp, Cricetulus griseus
gaaacttacaaattgaaaggctatgaatccagagcttatgaatcacaaagctatgagacaaagagccatgggtccgaagcccatcttggtcactgtgggagaatgactgccggagaactttccagagtggacggggagtccctgtgtgatgactgtaaggggaagaagcaccttgagacacacacagtcacccactcgcaactgctccagctgcacagggtggcaggggccatggggcgcctctgcacctacacaggtgacctcttggttcaagcactacacaggaccagagctgctgggtggtctgtgaccaaggccatgtggtcggtgctctggctggctgtcactgctccagggaaggcagcctctggaaccttctggtggctagggagtggatggtacctaatttgttactttgtatttcttggctgaatgtgtttcttcttaccaggtgcctttcgaaatatttgcaaagtttttgtcttgctcctcccactcctacttttactaggtgctggcctctctctgtggggccagagcaacttcctctcactcctgccagtgctgaactggacgaccatgcagccagcacagagggtggacgatcctgagggtgtgcacagacccggccctgttcctcccagcccacctctgaaggttgactatgaggcttcccagtggcctcgggagagtgatgtgggacagaaggtagcctctttgagtgcgcagtgccacaaccatgatgagagacttgcagagctgacgttcctgcttcaaaaactccagatgcgggtagaccaagtggatgatggcagggaagggctgtcactgtgggtcaaggatgtggttggacagcatctgcaggagatgggcaccacagaaccactcagtgctaagactgacttaatgactttccaccatgagcatcaagtgcgtctctcgaacttggaagatattcttagaaaactgacagaaaaatctgaggctatccagaaggagctggaagaaagcaagctgagagcaggcagggctgaagagcagcccctcctagaccgtgtgcaacacctagaactggagctgaatctgctgaagtctcagctgtcagactggcatcatctgaggaccagctgtgagcaggctgatgcccgtatccaggagactgtgagactcatgttctctgaggatcagcacaatggctccctcgagtggctattgcagaaactttcttctcggttcgtgagcaaggatgagctgcaggtgcttttgcatgaccttgagctgaaagtgctgcagaatatcacacaccatgtcacagtgacaggacaggcccccaacatctgaggccattgtgtctgccatgagcgaggcaggaatttcaggaattacggaagcgcaagcacacatcattgtgaacaatgctttgaaactgtattcccaagacaagacagggatggtggactttgctctggagtctggaggtggcagcatcctgagtactcggtgctccgagacctatgagaccaagacggcactgctgagcctgtttgggatcccactgtggtacttctcacagtcacctcgtgtggtgatccagcctgacatctacccagggaattgctgggcattcaaaggctcccaggggtacctggtagtgcggttgtccatgaagatctacccaaccacattcaccatggagcacattccaaagacgctgtcacccactggtaacatctccagtgcccccagagacttcgcagtctatggactggaaacggagtatcaggaagaggggcagcctctgggacggttcacctataaccaggaaggggactcactccagatgttccacacactggaaagacctgaccaagccttccagatagtagagcttcgggtcctgtccaactggggtcaccctgagtacacctgcctctaccgcttccgagtccatggagaacctgcccagtagaagactccagccttgtacatgtctgtatataccaagatgccataacactggagccctttggggaagagaccacgtaagcataggaacctgccacccttcaataaatgtgcgatggccatgaggacacgttgagtcctctgagtctgattcatttgaatgtatggttcttagacacttcctttggttttggggatttgcttcaatacataaaagtcaaaaagaaaaactggcaggttccaggctcctgaatatttaatatttagactattttgtgagcagactttataactgatacatcatctggacacttgaaatgttcagatgttttacataaagaattgttaagtttcattggttagatagtcttggcagaacacaagctcacccgctggggcttggagttgggatttagtgcatgttgcaggcagtctttgagacagtggcccgtagcagcacatcccactccgtagggttagagccactgcctacgtggccaggttgggtgatgtgcacacatttttacatactgcaagttacacgaaaaagcagaatttcctatattaaactaaatttgggacttgggggtggagatattttgaatatttattttaaagatgcaagataggactttgtgcaatgtatttttgtaaatgcttttcagaacatttgtctttggtagtacttctactgccaccaaattaagatgctattgagatgtttaaataaaagagttaatttttaaaatttaaaaaaaaaaaaaaaaaaaaaaaa

SEQ ID NO: 602 - DNA, 2739 bp, Cricetulus griseus
tgcagctccagctggggtctccatccccttccattgacccagagaagaaggtgggaagccaggggctgaggttccggctggcaggctttcctagaaagccctatgagggccgtgtggaaatacaacgtgccggtgagtggggcaccatctgtgacgacgacttcacgctacaggctgcccatgtcctctgccgggagctgggcttcacagaagccacaggttggacccatagtgccaaatatggcccaggaacaggccggatctggttggacaatctgagctgcagtgggactgaggggagtgtgacagaatgtgcctcccggggctggggaaacagtgactgtacccatgacgagtggaagaggtgcgactccgacccgctgtggagtggggccggcggcccctgcctgtgactgagggcctggttgaagtcaggcttccagatggttggtcgcaagtgtgtgacaaaggctggagtgcccacaacagccatgtggtctgcggtatgctgggcttccctggagaaaagagagtcaacatggccttctacaggatgctggcccagaagaagcagcactccttcggtctgcatggggtagcgtgtgtgggcacagaagcccacctctccctttgttctctggagttctatcgggccaatgacaccagcaggtgctctggggaagccctgcagtggtgagctgtgtgcccggccctctttactccacctcaactgggcagaagaagcaccaacagccaaagcctcagggggaggctcgtgtgcgtctaaaagggtggtgcccacctggagagggccgagtggaagtcctgaaggctggcaccctgcaggcagccagcgtggtgtgtcgagagctgggctttggcactgctcgagaggccctgagtggtgctcgcatgggacagggcatgggtgctatccacttgagtgaagttcggtgctctggccaggaaccctccctctggaagtgtccctccaagaacatcacagctgaggactgttcccataaccaggatgccggtgtacgatgcaacctcccctatactggagtggagactaagatccgactgagtgggggccgaagccgttatgagggtcgagtcgaggtgcaaataggggtaccggggcatcttcgctggggcctcatctgtggggatgactggggaacactggaggccatggtggcctgtaggcaacttggtctgggctacgccaaccatggcctgcaggagacctggtactgggactcagggaatgtaactgaggtggtgatgagtggcgtgcgttgcacagggtctgagctgtccctgaaccaatgtgcccatcatagcacccccatcacctgcaagaggacaggaacccgcttcaccgcaggagtcatctgttctgagactgcttcagacctgctgctgcactcggcgttggtacaggagactgcttatattgaggaccgacccctgcacatgttgtactgtgctgctgaagagaactgcctggctagttccgcccgctcggccaactggccctatggccaccggcgtctgctccgattctcttcccagatccacaacctaggaagagccgactttaggcccaaggctgggcgccattcttgggtgtggcatgagtgccatgggcattaccacagtatggacatcttcactcactatgacatcctgacccccaacggcaccaaggtggccgagggccacaaagccagtttctgtctagaagatactgagtgtcaggaggatgtctcaaagaggtacgagtgtgccaactttggagagcagggcatcaccgtgggatgctgggatctctacagacacgacattgactgtcagtggattgacatcacagatgtgaaaccaggaaactacattcttcaggtggttatcaacccaaattttgaggtagcagagagtgactttaccaacaatgcaatgaagtgcaattgcaaatacgatggtcatcgcatctgggtacacaactgccacattggtgatgccttcagtgaagaagccaacaggaggtttgagcgctaccctggccagaccagcaaccagattgtctgaaataccaccaccctttcagcaaaccaccactggccccccaatggcaggggtctgaggctgccattacctcaggagcttaccacaagaacccctgatgtcagcaggcccactacactcatccacctgtgcactacggatgacaaacagttgagcagaagttggtgcctcccctactgggtcagctgtcagtacctttggccaagcatggagaatcagccaacagttgctaggtataattttattttatataaaatgtgttcttcagagcccagggttggtgctggtggttagagggacctgccctctacaggtccattgactcctcctccacccagtgcgactcagaacctaggctaggaaggcgaggaggaaatcagagcagagggttcacactcttgctagtccagtcattcggtgacctcaggggtcacatataaggtcagtgtttctgatccccgccggatccgcactgccagctgggattgggttcgaacagcctcataaacatcttcagcattttgtaccattttctctccaatggccaaaatcacatcaccaggccgaagaccagccctgtggaggatgaacatggcaaggaaggagtacacagctgcgttcaaggatacatgcaccccattccaccccacc

SEQ ID NO: 603 - DNA, 2738 bp, Cricetulus griseus
  modified_base (178)..(178): a, c, t, g, unknown or other
  modified_base (183)..(183): a, c, t, g, unknown or other
tggagaatctgagacccctccatccacacctacgactcaggaacccagttcaagtggtggatttgagttcttcaggaatcggagcatcagtttatcccagtcagctgaaaatgttcctcctggtaaattcagcttacagaaaacactaagtatgccatctggtccttctagaaaaagntggancaaagacagtgactgtgctgagaatatgtacattgacatgatgctgagatgtgcgttaaggaccttggcttgctttgcagcccagctaggctttgactaatcagctggctttgcaaagagcgtacccgtagctgcccgtgtagacaactttgtagttagccctgaagagacttcacaaggatttcctgtggccacttcccattatcccggcctcttctatcagttcccctttcaaaaatgggaagtgccgaacagtgggagagcagctgttaaagtctcagtcggctgaccctttcctaacctctgagatggatgctggcatctctaacatccaacggagtcagagctggcttagcaacattggtcccacccatcgtgacacagacacagtctcatcccctggcccacaaatgcaagatgctttcctgtcgccattatctaataaaggtgatgaatgcagcattcagtctgagctggagcacatctccatggagctggcgagtaaaggccctcataagtctcaagtccagcttcgttatttgctgcacattttcatggaagcaggatgtctggattggtgtgttgtcatcagcctgattctcagagaatcctcagtagtcagtcagattctgagtattgcccagtcttcagagatggatggagaaatgttacagaacataaaaacagggctgcatgccgtagaccgatgggcctctacagactgccctggatataagccatttttaaacatcattaagccacaactgcagaagctcagtgaaataacagaagagcaggtccagcctgacaccttccagccaataacagtgggtaagactcctgaacagaccagccccagagcagaggagagcaggggctcttctagtcgtgcaagcatctctcagagtgagaccgggagtaacagtgtggtcagccggaatgaagaggacacaacacaagcagatgaggaggagccattccaggatggggcttatgactgttctgtgtcctgacaacagcaagaaacatcacaacaggcagtattaatcacagcagtgtgcaactgagtacatggtgacctgaccaagtgatttaacaggtaacagaacaagggtcagaaactctttgataaagtattatatatgataataaacaactcctcctctaaatctctttgactccataaaaatgtggtatcaaagcattttcataagaaaacttaagctccactagaaagtaatgagcataacatagatgctttttcactacttatagcttatatattttcaggttcagtgtgtgtctaggctggttttgtttttgtgcggtcggttgtttttttaactttcttttaaataaatgctaaggtgcttgctgtagctcatcaggtacctgagctacttgtttgcttccttgtatagagtcagctggactctagttggtcctctgaatagttaatgtgcgtgtttgagcaagctgaattcttactatatcagtgtggacagagggtgagggggttcttgtcaattatgctgacaccactaaatttttgtatcaaagaactgtatctttttgtgaatactcttatgtaaatatatgcaaaggcactgtccatatttttaaggcatgtattatactctgtgaggttttatgctggattctgcatgactctactcactcttggaataaagacaagacttgctcttctttccaaaatgagaggtcttcatagagacaggttattggctcagctgtaaagtagtagtagtagtcccactgatcatgaagtggaagaggttttgtgcaaattaatgtagtttcttatttattgcttttgtaaatcgaataaaaatgggatttttatgtaaatagactgtgggatcctgtattatcagctactaaaaattagtttgtaaattcttcattgtaaagtttaaaaatattttatgtatttctagatatgacttaaattttagttttcatacattatgaaagcagaactaactacatattcagttgcttcagactaaacacatactcaccatatgtaattctaattattcataacagtattaatttagatagcttatttgtactgtgcaatttgaacaaggaatgcaatgttattttttatgaaatcttgtttatttttataacacaatgtatttgatgtggaccaaattcgtaccactatgtaaaacagcctctcttatagtgcagatatagcttagaaataaaattcagccctctattctcctttttaaaagagagatttagtcctttaggcaatattgtttagagggaacctcaaaattattttgaaattacttcagatttcaccaactatttaaaattattaaatttggtaatttactgttatttactttctacattagaagtgcaataattttacataataaaactcctgaatgggtgaaatatgtgactgttgttacctggtccttctggtgctactttatttaagtcgtctcaaccaccaccttgttctgaattttaaaatacagaataaagtttcctatgaagtatatgcagtg

SEQ ID NO: 604 - DNA, 2738 bp, Cricetulus griseus
ctttcatttgaactgcataagaaatgggcccggtctccagcatctcatgcagatggccagagtggttggaggtgccctgcttgtcagaatgtttctgcacatgttcctaatgcctatacttgtttctgtggaaaagtaaagaatcctgaatggagcagaaatgaaatcccacatagttgtggtgaggtttgtagaaagaaacagcctggccaggactgtccacattcctgtaaccttctctgccatcctggaccctgcccaccctgtcctgcttttacaagtaaaacgaaccaggcacactgtttcggtgttggtcaggctgtctcagtccactgttctaacccatgtgagaatattttgaactgtggtcagcaccgctgtgctgagctgtgccatgggggtcaatgtcagcctttgcgggatcatttttgaaccaggtgtgctactgtggcagcacctcccgagatgtgttgtgtggaacagatgttggaaagtcggatggatttggggacttcagctgtttaaagatatgtggcaaggacttgaaatgtggtagccatacctgttcccaggtatgccaccctcagccttgtcagccttgcccacggctccccatttggtgagatgttgcccttgtggccagacacctctcagccagctgctggaacttggaagcagtggtcggaaaacatgcatggatcctgtcccttacctgtggaaaagtgtgtggcaaacccttgtcctgtggatcttcagatttcatccatacctgtgaaaagctctgccacgaaggagactgtggaccctgctctcgaacatccgttatttcctgcagatgctctttcagaacaaaggagcttccatgtaccagtcttaaaagtgaagatgctacatttatgtgtgacaagcggtgtaacaagaaacgattgtgtggacggcataaatgtaacgagatatgctgtgtggacaaggagcataagtgtcctttgatttgtgggaggaaactccgttgtggccttcatcgctgtgaagaaccttgtcatcgagggaactgtcagacctgctggcaagccagttttgatgaattaacctgccactgtggcgcctctgtgatctacccaccagttccctgtgggactaggcctcctgagtgtacccaaacctgtgctagaacccatgagtgtgaccatccagtgtatcattcttgtcatagtgaggagaagtgtcccccttgtacgttcctaactcagaagtggtgcatgggcaagcatgagttacgaagcaacatcccctgtcacctggttgacatctcttgcggattaccctgcaatgccatgctaccctgtgggatgcacaaatgtcaaagactctgtcacaaaggagaatgccttgtggatgaggcctgcaaacagccctgtaccacacctagagttgactgtggccacccatgtatggcaccctgccaccccagtttaccctgccctgtgacagcttgtaaagccaaggtagagttacagtgtgaatgtgggagaagaaaagaaatggtgatctgctctgaagcatctggcacctatcaaagaatagctgctatttctatggcgtctaaaataatggacatgaagcttggagattcagtggagatcagcaagttcattaccaagaaggaagttcaacaagccaggttgcagtgtgatgaggagtgttctgccttggaaaggagaaagaggttggcagaggcctttgacatcagtgatgattctgaccctttcaatgtgcgttcttcagcatcaaaattcagtgacagtttgaaagatgatgccaggaaagacttaaaatttgtcagtgacgttgagaaggaaatggagatgcttgtagaggccgtgaataaggggaagaataataagaaaagttactgcttccccccatgaacagagaccaccgccggatcatccatgacctggcccaagtctatggcctagagagcgtgagctatgacagtgaaccaaagcgcaatgttgtggtcactgccatcagagggaagtccatgtgtcctcctaccacgctgactagtgtgcttgaaagggagacgcagacacggccaccaccaccaattcctcatcaccgacaccagacagacaagaatcccggaagcagtaatttacagaagatagctaaggagccagtgattgactactttgatgtccaggactgagaagatagatgcatttagataaaagaatgattctgtgtggtggagactcatttgccagcagataaatcatgttcattcctgctgagtggcagaaccccagcacacacgctgtcttgtgctgacacatccaaagcatgagtctcagaaccccttgtctctctggctgtgtggctcctggagttttagtcatatgattgaagaggcgcctcaccccatcactgtgattactaagggtttggggagtatcatattttatttggataaatcagaatttttatcccaaactggctttgtgcacctagctgtagtcttggttgtcccagttgttcacctggtggacttcacattcttcatagggaaggactttggttttggtttgtttttttaagtacagggtttctctgtgtagccctggagcctatcctacaactcgctctggagaccaggccagcctcaaactcacagagatccacctgcctctacctcccgagtgatgggattaaaggcatgagccaccactgcctgg

SEQ ID NO: 605 - DNA, 2736 bp, Cricetulus griseus
taattcttcacactctgacaatgggaccaagagagcaacaagcacggactctggaagcactaccatttcgccaaatgtaacatggcttcaggatagccagttcacagatgccagaacagaaccatgggagggaaattccagcacggcagcaaccactccagaaaccttccctcctgcagatgagacgccaattattgcagtgatggtggccctgtcctctctgctagtaatcgtgtttattatcatagttctgtacatgttaaggtttaagaaattacaagcaagctgggagccattccaattctttccgcctgtcaaatggccgcacagaggatgtggagccccaaagtgtaccacttctggccaggtccccaagcaccaacaggaagtacccaccactgcctgtggacaagctggaagaggagattaaccgaagaatggctgatgacaataagctcttcagagaggaattcaacgctctccctgcttgtcctatccaggccacctgtgaggctgcctccaaggaggaaaacaaggaaaaaatcgaataacgtaaacatcctgccagtgcaaggactgaactaaaacatgaccactccagagtgcacctgacacctgttgaaggggttccagattctgactacatcaatgcttcattcattaatggctaccaagaaaagaacaaattcattgctgcacaaggaccaaaagaagaaacagtgaatgatttctggagaatgatctgggaacaaaacacagctaccattgttatggtaaccaacctgaaggagagaaaagagtgtaaatgtgcccaatactggccagaccaaggctgctggacctatggaaatgtccgtgtgtctgtcgaggacgtgactgtgctggtggactacacagtacgaaaattctgcattcagcaggtgggcgacgtgaccaacagaaaaccacagcgcctcatcactcagttccattttaccagctggccagactttggggtgcctttcaccccaattggcatgctcaagttcctcaagaaggtgaaagcctgtaaccctcagtatgcaggggctatcgtggtccactgcagtgcaggtgttgggcgcactggtacatttgttgtcatcgatgccatgctggacatgatgcattcagaacggaaagtggatgtctatggttttgtgagccggatccgggcccagcgctgccagatggtacagacagatatgcagtacgtcttcatataccaggcccttctggaacattatctgtacggggatacagaactggaagtgacttctctggaaacccacctgcaaaaaatttataacaagatcccagggactagcaacaatggattagaagaggagtttaagaagttaacttcaatcaaaatccagaatgataagatgcgtactggaaaccttccagccaacatgaaaaagaaccgggttttacagatcattccatatgaatttaacagagtaatcattccagtcaaacggggtgaagagaacacagactatgtgaatgcatccttcattgatggctaccggcagaaagactcctacattgccagccagggccctcttctccacacaattgaggacttctggcgaatgatctgggaatggaagtcctgctccatcgtaatgctaacagaactggaagagagaggccaggagaaatgtgcccagtactggccatctgatggcctggtatcctacggagacatcacagtggagctgaagaaggaggaggaatgtgagagctacactgtccgagacctcctcgtcaccaacaccagggagaacaagagtcggcagatccggcagttccacttccatggctggcctgaggtgggcatccccagtgacgggaagggcatgatcaacatcatcgcagcagtgcagaagcagcagcagcagtcggggaaccaccccatcactgtgcactgcagcgccggggcaggacggacagggaccttctgtgccttgagcacagtcctggagcgcgtgaaagcagaaggaattttggatgtcttccaaactgtcaagagcctgcggctacagagaccacacatggtccagacactggaacagtatgaattctgctacaaggtggtgcaggagtacatcgatgccttctcagactatgccaacttcaagtaacaggtgacaaggcccacagacaggagaattgcctttaatattttgtaatattctgttttgttaatatacccaaaattgtatatatcttataactgttttagaaatggcacataggcttctattacctactaggtggagattttgtatgtaaatgtgttagcactgatagtcttttttccagtgttttattggggaattaaatagtgtgatatttggattgatatcatgaaatcctcagcctggaaattgggctcaattattctttgctttaaatcttttcctaaagaagataaacgtaaaactcattccaggtagctcggtgccaactaaaacaaagcacaaagttctcagagctcttgaggaaatggttgcctcactatccccatgcaggcctctttccctccctgtactgtaaatatccctcccctttccagttcacccttgtctccccctcctacatcccactatcagctacccccagcatggggaataatgagaccagagcggcatctctggcaccacactagggatcatcaggtaataaaaacttttgattccctgaaggaaa

SEQ ID NO: 606 - DNA, 2736 bp, Cricetulus griseus
aggagtagttgaccggtttgtggagttctgaaaaggagtgagaattgtacattacagtttgaagctgcttgggctctgacaaacattgcctccggaacttctcagcagaccaaaattgtcattgaagcaggagctgtccccatttttatagagctgcttaactcagactttgaagatgtacaagaacaggcagtctgggctctgggaaacatagctggagacagttcggtttgcagagattacgtcctgaattgctcgatccttaatcctttgttaacactcctcactaagtccacacgactcacaatgacaaggaatgcagtctgggccctgtcaaacctctgccgaggaaagaacccgcctccagaatttgcaaaggtctctccttgtttgcctgtgttgtctcgcctgctcttcagtagtgactcagacttgctggcagatgcttgctgggccctctcttacctgtctgatggccccaatgagaagatccaggcagtcatagactctggagtctgccggagattggtagaacttctgatgcacaacgattacaaagtggcatctcctgccttgagagctgtgggtaacattgtcactggggatgacatccagacccaggtcattcttaactgttcagccctcccttgtctcctccacctactgagcagctctaaggaatcaatccggaaagaagcttgctggaccatttcaaacatcactgctggcaatagggctcaaatacaggctgtcatagatgcgagcagatcaggtacctggtgtcactgggctgcatcaaacccctgtgtgacttgctgactgtaatggattcaaagattgtgcaagtggccctcaatggactagagaacatcctgcggcttggagagcaagagggcaagcgtagtggctcaggggtcaatccctactgtggcctcattgaggaagcctatggcttggataaaattgagtttcttcagagtcacgagaaccaggaaatctaccagaaggcctttgacctcattgagcactactttggtgtagaagatgacgacagcagcctggctcctcaggtggatgaaacacaacagcagttcatcttccaacagcctgaggcccccatggagggcttccagctataatgtctgcctccggggaggggagggcatgggaagcaccaccagccagcagaagagcagcccactggtgggcagggaaacagccaccccaccagcagccaccacacacctgctgccctgagactgtgctcttgacctgctcatccccttccctggagggagccaccctctggacagacagaaccatctgaggctcacatgggttttgtgacaagaaggggacggtgtgggtttttcttccttacactttattttggctgcacacatgtctttaacccaggagcccaggggtagacaaaggaggactgaggtaatcaatttgctacctttaaaatttttttctctttattttctttagtggtgacttccttcccattattcttgcttcatccatcccagtcctctgccctgatgtgtgtaactcttatcttgggtacttgagcagatggaatattccagaggtgggagggtggggggggagggggagaagtccaaaacaaacaaagcttctccaggtccctgtagaccccagaggggacaggatgatgatgacaagcttccctagcaggctggggaagggtgcaaggctcattgcactgaaccgtaggagattctgagcaatagcagcagtttaaggtggcacttccctgcatatccataagagacagacttctggcgcattctagaccaacctcatccagtatttttttctgttttaccttttgtattcttttgttaaggcaatgaactgagaatttgcccctctagcgatccatgtattggacactagctgctctgtggccaaaggccttcctaactggttccattgccacgtccgtctattccctagtcccaccccagaatcagacatgcatggcagtggaagaatttgaggtcaactccaactgaatctgaatgaaaatttattttctttttgagagagcatcttgtttgaagcctgaactgcacacaggaccaaagctggctgtgaggaaagcagccataacttgggaaacctgaacaccagaggggaatagcttgtgtgatgtgtctccaagggcttgggcttacctacctgttcctaggccagcctgatttctgatgctcacactctgagactgcctgcaaactatgtcaaagattcacaccatgaaccctcagaagctggaggtgggtattggcttttttagccagcttttttgggaaatgccttttttgacctattaaataaatgatgtgggtatgaggtctcagctacccagcagacagaacatcgcccaaagatagcttgggtttccaggtaagaaccctagaaagctgaatttaatcctcacaggttttgctttccaaattcatttgcttttatttttctaagaactgtaagctctattttttcatgttctcagggcccctgggtagacaaacaaagcttgatttcagagcagaaataggccaagaaaccatggcattgagtgtgctgagtccagacaaatgatatttatatacacatccaaatttgaagagaaaatgtatttctttaggtttcaaacactgtaatagatacaaagcaaaaataaaaacctgttgcaaagttactaaa

SEQ ID NO: 607 - DNA, 2735 bp, Cricetulus griseus
  modified_base (1797)..(1797): a, c, t, g, unknown or other
attgctggcaactgggagcgcaagaggccagtgtgggtgatgctcatggtgaactcactcacggagacagatgtgcgctccaggggtgtgcctgtgttggacctctacctggcccagcaggctgagaagatgaagaagagcactggggctgtggagcgggtagaggaacagtgccatcctctcaacgggctcaacttctcccaggtgctgtttgccctgaaccagactttgctgcagcatgaaagtgtgcgggctgggagcctgcaggcaccctacaccacagaggacctcatcaaacactacaactgcggggacctcaatgcagtcatcttcaaccatgacacatcccagctacccaatttcatcaacaccaccctcccacctcatgagcaggtgacagcccaggagattgacagctacttccgccaggaggctcagtctacaagaggaatgagcgcatggggaagagagtcatggcgctgctgcagggagaaccaggacaagatctgcttctttgcctttggagcaggtcactttctggggaacaacactgtcatcgatgtcctaagacaggcagggctggaggtggaccacacacccgctggccaagacatccacagtcctgctgctactgggagcccagctccttctcccgagggcacctcttctgccagtccagccccagccaccccagctgctgcagtcccagaagcaacctcagcaacccccaccacccctcctgaggaggaggatccagtcctgtccccacacctcctgctcccggacagccttagccagctggaggagttcggacggcaaaagtggcgcaagagactaaacaaacaccaaaggccaaggcagttcaacgacctctgggtccgcatcgaggacagcaccactgtctcgccaccccgctgcccctccagcctacccccggctccgggaccaccaagccctttgtcaagtcctcacaccagctccagcagcaggaccttgcggggcctaccagcaactcggcacctacacctggcctcccccctgcaatcgctgccaccattgttgcccccttcatcctacacacccttgggccttcctgacccttgaccacccttgcagagaagccagaggaaccacaggagtgaccatgcccaccatctgacaccacctcaaaggtgctgacacctcaaggcagttcacacaggacagggactttaaaacactagagctttattgtacccaaattacatcttcttttttgtagaaggtcttaatttcccatagtgctatggggctcatttgtaaaatatgtgtccatattaaaagagaattatttaaggagtcctgggtcctgagagcagggaagacccctcacctgtcaatagcaataagagtaacacaaaggtccagaaagaggagagacttctccaaggtgccatagctggggcaggcatgttgactccagtcctgttctctcacctcactgcacatgggttttgctggcaggctcgatggcgcctggttggctgaggcactgccatgctctggttggcagacatctcccttttgagatggcaggattctgggcaactcattggatagtcaggggtcccacaggcatcctggcaggcggcagaattctttccagctctgccccagtgggcaggtttaagcctgagacctggcaggattctggaactctgcttcacagggtcccgccagccccatgggcaccacattgtaaactgaacttgacctcaaccaggactggagtcagtttactaagtagcaaaaaaaaanaaaaaaaaaaaaagtagtatgccaaggcccaaggcccactggctaaagccgtggtcgccagctggaagtcttggcaaaggactggtgtaaatgacatggcagtgccccctggctctgtaaggctcaggttctttaaacattgttatttttccaaaaattcatctaagcagccaaaaatatcaccctggctggctgtctaagccggtagatgcaggactcagtcaagcctcccttcaccctccccattcttccacagcccagacagacttgccatgaactggcagaaatgcctgcagcccttgggcatgggatctcttggggaggagaggactggattgaacccctgcccatggctccatcccacagcccttctgtctgagcccaacacagaggatggaaaggcagggcttataaggacccaggggccccttcctggccctttccagggaatgttagctcctcacagcatgtctccaaaggcagacccacaggctgccatgacgggagcatgtgacagacaagaaagcattacttaaaggctccctccatcctaagacctgccctggggaatgtggttttgaatgggatccaagtctacagggcctggtgtgagagaccagggactcttaggcagcagtctctctggttgccaagctgggtgggtggagctcttggctctccatggggaggctggccttaacctttgcccagctctaagtctcagatttgttggctatcccactgtgcctcaatgtaccaagctggcttcagctctcgccatacttgtggtgttctttatcacctcttccctcacccctgtgaattgtcatgaagagttctttaagagtataatagaagacaaagaaagatgctattaatgttattttgccaaaatatttttgtagcataatatattaataaaagatattatgaaactt

SEQ ID NO: 608 - DNA, 2735 bp, Cricetulus griseus
tcccgggtagacatccacagaaaggagaactctggggctgcagagaagcctgtcaccatccatgccaccccagaagggacatctgaggcatgccgcatgattctcgaaatcatgcagaaagaagctgaagacactaaactggctgaggaggttcctctgaaaaatcttagcccacaatggcttggttggaagactgattggcaaagaaggcagaaatctgaagaaaattgagcatgagacagggaccaagataaccatctcatccttgcaggatttgagcatatataaccctgagagaaccatcacggtgaagggtaccattgatgcttgtgccaacgctgagatggagatcatgaagccagggttgaacctcagtgcacttggcatcttttcaacaggactgtccgtgcttcctccaccagcagggccccgtggagttccccccagtgtcccctaccaccccttcgctagccactccggatactttcccaacatgtaccctcatcaccatttcggcccattcccacatcatcactcctacccagagcaggagactgtgaatctcttcatcccaacccaggctgtgggtgctattattgggaaaaagggggcacacatcaaacagctggctcgatttgctggtgcctccatcaagatagctccagcagaaggtccggatgtcagtgaacggatggtcatcatcaccgggccacctgaagcccagttcaaggctcagggacggatctttgggaagctgaaagaagaaaacttctttaatcccaaagaagaggtaaagctggaagcccacatccgggttccctcatcgacagctggccgggtgatcggcaaagggggaaaaaccgtaaacgagctgcagaacttgacaagcgcagaagttatcgtgcctcgagaccaaacgccagatgaaaatgcggaagtgatcgtcagaattatcgggcatttttttgctagccagaccgcacagcgcaagatcagggaaattgtacaacaggtgaagcagcaggagcagaaataccctcagggagtcgtctcacagcgcagcaagtgaggcccccacaggcgccagcaaacaacagatgaatgtagccttcccaacacgtgacagatgagaccaaacagccagcagatcgggagcaaaccaaagaccatcctgaggagtgagaagtctgcagagcagccagggtctgcagacccctgtacctcctggggtccaggagggcatagggagggcctggttccccagaaacaccacttggcctgcacccagcttcccctggcttctgcaggctcacagccatctactgcccatccactcagctccctcctcagctcccatggcgctatccctttgagttgaactaacaggtgaacatgctgaaagcaaactccatagccttttctttgttgtggaaagttgtctctgtacatgtatgtacatattagaaggggaaagatgttaagatatgtggcctgtgggttacacagggtgcctgcagcgttaatatattttagaagtaatatatcaaataactcaactaactccaatttttactcaattattaattttgttttcttttcgaagagaaagcaggcttttctagacttcaaagaataaagtcttgggtgaggtccattggtatagaaaggaactttgagccacccacacaaaattcacttggagggaaatcttgtcaaggacacttcgaggcagttgtgggtcacctgtgtctatcaacagaagggataccgtccctgaggaggggccccaggcccttgtcacctgtttgtcccatatacccatttctttgcttcacaggttttaaactgttttttgcatactgctatatatttctgtctctctctgtttatctccgcccccctcccctccccccctcctctttgcccagcattcttttgaattccttcatccctttttctgtccccccatatctatgcaccccccccaggcaaagcagttctctgaatatcacatcacacaaggaacaaactcgaaacacacacgaaccagcctcagctgacacttggttactcaagcgaacaagagtcggaaagtgggaacccaccaaaccaaccagccaaccaaacaggaaaattccataaaggaagaatgtactttgtctttttacattttggtatataagccatcagcatttagtgaaattatttctttctttaaaaatttaaagttcaggaaaatagcaatttatacaaggttgttggcccagggcgttaaatttacagatttttttaaaatgagaaaaacacacaaataaaactacctcaggtgttttttacctcagcaccttgctcttgtgtttcccttagagattttgtaaaactgatagttggagcattttttattttttaataaaaatgagttagaaaaaaaaaaaagatctcaactgccagcctggagcaggcggcagccccagtgtgcagcaactgtgctgacccgtcttccgctagccaagagcctacgtggccttcttatggacaaattaaaatgtttatttttaaaaaaatgacaaagaaaacacagagagattattggagccgtcctgaatttcaatagggtacgtgccatgagagcttttgagctgaaggatgaccacgttctggttatgtaagaagccactgtgacaaaaaaaaaaaaaaaaaaaaaaaaaaaaaaaaaaaaaggtaaaaaataaatc

SEQ ID NO: 609 - DNA, 2735 bp, Cricetulus griseus
ccatgattgggcacacgaatgttgttgtgccccgagccaaacccttgatgctgatcgcgcccaagcctcaagagaaaaagggcatgggactcccaccaagaatcagttcccttacttctggaaatgtccggtctttgccgtcacagcagatggtgaatcgactgtcaataccaaagcctaacttaaactcagcaggagtcaacatgatgtccaatgttcacctgcagcaaaacaactatggagtcaaatctgtaggccagagttacggtgttggccagtcagtgaggctgggtctaggtggcaatgctccagtttccatccctcagcagtctcagtctgtgaaacagttacttccaagtggaaatgggaggtcctatggactaggtgctgagcagaggcccccggcagcagccaggtactccttgcagactgccaacacctctctacccccaggccaggtgaagtctccctctgtgtcccagtcacaggcttctagagtattaggtcagtctggttctaaacctccaccagcagccacgggccctcctccaagccaaccattgtgccactcagaagtggaaaatttgaagagaagcctagaagtaaccgttgtttagctttagaccccaagggtcatgaagatgattcttatgaagctaggaaaagctttctcacaaagtactttcaacaaacagccctatcccaccagaagagaaattgagaagttagccgccagtctatggctatggaagagtgacattgcttcccatttcagtaacaagaggaagaagtgtgtccgtgactgtgagaagtacaagcctggtgtgctgctaggctttaacatgaaagaactaaataaagtcaagcatgagatggattttgatgctgagtggctatttgaaaatcatgacgagaaggactcaagagtcaatgctagtaagactgttgacaaaaagcttaaccttgggaaggaagatgacagcttctcagatagttttgaacatttagaagaagaatccaatggaagtggcagcccttttgaccctgtctttgaagttgagcctaaaattcctagtgataatccagaggagcatgtaccgaaggtaattcctgaggatgctttggattctgagaaactagaccaaaaagaggaggaggagaggaggaggatggttcaaagtatgaaactgtccatttgactgaggaaccaaccaaattaatgcatgatgcctccgacagtgaggtagaccaagatgatgttgttgagtggaaagatggtgcttcaccatctgtaagtggacctggttcccaacagatctcggactttgaggataacacttgtgaaatgaagacgggaacctggtctgatgagtcttcccagagcgaagatgcaaggagcagtaagccagcttccaaaaaaaaggctacggtgcaagaagacacagagcagttgaaatggaagaatagttcctatggaaaggttgaagggttttggtcaaaggaccaatcacagtgggaaaatgcatctgagaatgcagagcgcttaccaaacccacagattgaatggcagaatagcacaattgacagtgaggatggggagcagtttgacagcatgactgatggagttgctgatcccatgcatggcagcttaactggagtaaaactgagcagccagcaagcctgagggcctggcgcaccacggcacatgggccatgttgcatcctggacctctgttcttctgactgcaaagctgccttctaactggcaatgccttgcaaggactggtcagtcaacaggctgttggggacatgtgaccactatagacccagtggttatttctaagtctatgacatgtgattggttgatcttgcttcagacccttctctggtagactcagtaatggagtgtgaaaaaccagtaagctggtggctcatgaatgcacacagggaaaagcagttcattacttgcctttccagcatctctttccctcggtaagatgtttggttggatgtcctgggaaagccttaccctgatttacatagtagtacagggcgggcatacatgctaccagtcaggtgtgtctagtagacttgggaacatggacctttttttcatgtattcattctgaatagttgaaatgtatatttgtacagtcttttagacctcaagtgatgcttatgacactgttactgtgtgcccgtcatagattggtttttagtgttgcccttgctgtgtgataaatgctatatctagtttacctagcagaagcttgaccctgcgatagtatggacctttggacagacttagtttttgcacataaccttgtacaatcttgcaacagaggccagcgacataagatatatatctggactctcctgtattatagaatttttttcttgttctgagtatccttgacattacaattgtcaaaattgatatttcagatctctttctgagaccttttaagctaaagtaacatgcaagaattgattttacagctactaattttgacaccttttagatctgtaagagtgttgtgtcagagcagcaagcgcagttgagtgctgcatttgggatatttagtttcctctttagttgagcaccgccgggtgtattcatttataccatctaatatatgacacactgttgtagtatgtatgattttgtggtctttatttccctttgtattcattttaagcatctaaataaattgctgtattgtgcttaatgtaaat

SEQ ID NO: 610 - DNA, 2734 bp, Cricetulus griseus
cacaaatgcagtaaatgcagtaattcctatggcactgagtgggacctgaaacgacatgaggaggattgcggcaagaccttccagtgtacgtgtggctgtccatacgccagcagaaccgcactgcagtctcacatctaccgaactggccatgagatccctgcagaacacagagacccacctggtaaaaaaagaaaaatggaaagctacctgcaaagccagaagttgtccagcaaaaccattgaaccattgagtgaccaaccagctcctcaccaagacgttcatgaactggaagcatcagaagtaaagctagcagcatcatttgaagactctttccgcactcatgccaaaaagcagaacatcacagcacctcccaggtgcccccagaagttgcttttaccaaagcccaaggtggctctggttaaacttccagtcatgcagttttcccctgtgcctgtctttgtgcctacagccgacccctcagcccagcctgtggtgttaggtgtggatcgaggttctgcagcaggtgctgtgcacttagtccccttgtcagtaggaaccctggtcctcagcctggattcccaggcctgctctatgaaggagagcctacctctttcgaagattatcagtcctattgttgagccagtcagtacaggtgttcaagagaacttggggaaaaggtccttgtggtcctttacaagaactaggaaatacatgtcagaagaatagcatctcctcaatcaacgtgcagactgatctgtcctacacctcccccaacttgataccttctgctcagtggctcagccctgattcttctgtgtcatcgtgttctcagactgacctgtcgtttgattctcaagtgtcccttcccgttagtgtccacacccagacgttggtgcccagctcaaaggtcacttcatccatagctgctcagacggatgcatttatagatgccttgtttccagccaggtgggatctcccagagaaacccaaaccagcaggattcgagaccccacagatgaccctgtgcaggtgggccacgctggcctgtgtggggacatttttgaaggtgtccattcatcatatagcgttcccacggacaacatcatgagtagtagtttagtttcagagacagtaactcatggtctgttacctcagaatgaccataagatattaagccaagtcattgaaaagcctgcacccttgttacacttcagtgcccagaacagcatgcttccttcacagaacatgacagataatcagacccaaaccatagatctactgagtgacttagaaaacatcttgtcaagcaatctgcctggtcaagcactagacaaccggagtcttctgtccgacgcaaaccctgggcctgatgcccagctcccatcaggctcaggccagaattctgggatcgatttcgatattgaagaattcctttcagcctcaaatatccagactcagactgaagagagtgaactcagcggcatgagcactgagccagccttggagtccctggacattgagacccagactgacttcttcctcacagacccctccgcacagtcctacgggttcagaggaagttcaagctttttaggcctggagatgtttgacacgcagacacagacagacttaaacttcttcttagacagtagtcctcacctgcctctgggaagcatcctgaaacactccagcttctccatgagcactgactcttctgacacagagacccaaactgaaggcgcctccccatctcgacacacaccggctctggagagcaaggtccagctgaacagcacagaaacacagaccatgagctctggctttgagcccctggggaacttgttcttcaccagcaacgaaactcagacagcaatgggtgacttccttctagctgatttggcctggaacacaatggagtcccagttcagctctgtggaaacccagacgtgctcggagctgcacgctgtctccagcttctgaagctgcagcctggctcccctttccttgtatgtttagaaaatggggacaaggacagccacaccgactggggatgtagttggtgggcagctgtttaggttctctgcagttcttgacgttttgtacttgtgaacacaagattggtgtacaaatgtgagtgtattataaagtgtaaggtgtttaagcagatcatggattcatagctattgcccaactctcagacaaagccgaatgagcacagcctggggaaccatccagtctaccctgggaagccctgttctttctgtggtatatgcttgtgctgccaaacgtgaactcttaaaataaaacctaaaggactgatgattcatcaggtaaactggtggtattgctgctgttgtgtcccattcatctggtgcaaaggactcggaaatgggctaataacacacccagcagatgagttcaccccagtagctaaacagtggttttggtcacagttgcctgtgaatgtgagtttcagagcagacataaagccttaacttagattttctcttgctatgttttggaatcgtcactgccttaatgttcaagcatctatttaagttctccagctgaaggagaaatgcatgtctgctcatggtctttttgtaaatataagtgcagcgatctatggtctttaagttttgtttcttgtggcaatgtctcttaatggtgacatgtttgttaacacaaagttggtgattaaagagaaactagaagtactaaaaaaaaaaaaaaa

SEQ ID NO: 611 - DNA, 2733 bp, Cricetulus griseus
atggggagcaggctgaagctgccatcaacgccttccaccagagccgccttcgagagcgggagctgtcagttcagttgcagcctaccgatgctctattgtgcgtggccaacctgccacccagcctgacacaggcacaggtttgaggagctggtgcggccctttggcagcctggagcgctgcttcctagtgtacagcgagcgaacaggccactctaagggctatggctttgcagagtacatggaagaaagactcggctgccagggccaagtccgatttgtgggcaagccactgggcccacgcacattgtatgtgcactggacagatgcagggcagctgactcctgccttgttgcactcccggtgcctctgtgtggaccacctgccaccaggcttcagtgatgtggatgctctgcgccaggcggccgcagcatgctggcagcactcattgctgcccaggccacggctctcaatcgaggcaagggactcctgcctgagccaaacatcctgcagctattgaacaacctgggcccatctgcctccctccagctgctcctcaaccctctgctgcatggaggcaccagtggcaagcagggcctcttgggtgcaccccctgccatgccactgcttagtgggcctgccctgtctactgcactactgcagctagccctgcaaagccagagccagaatcacctctgggtaccctccaggccgggacccaacctgccaactccctccttggggagctgtctgcaggggggggcctggccccggaactgccgccccgccgagggaagccacaacccttactaccaccactgctgggcccttctgggggtgaccgggagcccatgggtctgggtcccccagcatcccagctcactccacccccagcccctgtggggctccgaggctccagtcttagaggtctcccgaaggacagtgggcccctgccaacaccccctggggtctcactgttgggggagcccccaaaggactaccgcatccccttgaacccctacctgaatctgcacagcctgcttccatccagcaacctggcaggcaaggagacccggggctggggaggctctgggagaggccgccgcccagctgagccaccgttgcccagccctgcagttcctggtggaggcagtggtagcaacaatggtagcaaagccttccagatgaagtcccgcctgcttagccccattgccagcaaccgcctgccccctgagccagggctgcctgacagctatggctttgattacccctcggatgtgggacctcgacggctcttctcccaccctcgggagccagccctagggcctcatggacccagccgacacaagatgtcccccccacctagcagcttcaatgagcctcggagtggtggaggaagtgggggacccctctctcatttttattccggttcacccaactcttacttcaccagtggcctacaggctggcctcaagcagagccacctcaacaaggctgttggttcctccccaatgggctccagtgaagggctcctgggccttggccctgggcccaatggtcacagccacctgctaaagaccccactgggcggccagaagcgcagtttttcccacctgctcccctcgcctgagcccagcccagagggcagctacgtgggccagcactcccagggcctcggcggccactacgcggactcctacctgaagcggaagaggattttctaaagacgtcggcgccagagatgctccaagggcctgcaccgaattgcttttgggttttctggtgtttgtgtttttgtgggattttatttttattattttttttaatatcctttctttgggtaatagagaaatctctgaaaaagactttgctgaccaaccagccggagctcaaggaatgtgggggtgtctaggggccacacctgtgggcttgctcctggagccaaaaccctgcagccttaagagagaggggcccggcctgctctctttccctccccaactcctagcctcctcgcctgcctcgtcactcctgtgttctggcctttcgagtgcctttggaggtgtccctgacctgtgaggatcagggacagtccccttttttaaacttagacaattgactttgatttccttttctaattttttattttttaaaaccaggatgatgaccacatccatccccacccccccccagaaaagccccaactttgattccttcagggtctggcctacctgggcctccattccacacttccggtttccaacagcttagccctattttcccaatcatctgctgcaggtatagctttctcatgcccccttcctgcctgcctactctggccagtacccgatcccagatctccagccccctgccatagtcttcttgccttctgatgccttaaagttgggccacaggtcctaccaggtcagagctgctcagatgccgagctctggaagcttgactcaggaccaaagagctctgacctagagatcatcctttctccagggtgtctgccctgtggacagaaggccaaagccttggtcttggcaaaccaccccttagcccaaagcctgggtacagaaagcagtgttttctctggcttcttcagtagtccctgctgctgttcatgaaagctgaccattgtacccaggtcactgggcctctaaccatgtccctctgatcccagatcaccaccgccagccctaggccagaccactgaagctggccttctctctgccca

SEQ ID NO: 612 - DNA, 2731 bp, Cricetulus griseus
  modified_base (262)..(262): a, c, t, g, unknown or other
  modified_base (1735)..(1735): a, c, t, g, unknown or other
  modified_base (2105)..(2105): a, c, t, g, unknown or other
ctgtcccctctccccacttgaggcagatgacctggagagtcccttatcggaagaattcttacaagaaatgggaaacattcaggagatttctcagtcccttgaggaggagagttctggaagctttagtttcacggactaccagtacttaggaagctgtccaggctccgagggctctgtcatcacagacaccctctctccagcgtccagcccctcatcagtcagctgtcctgtgattcccgtcagcacggatgagtcccccggnagtgcactgaacattgagtgtcgaatatgtggggacaagggcctcaggctaccactacggagtacatgcatgtgaaggttgcaagggcttctttcggcgaactattcggctaaagctggtatatgacaatgtgatcggagctgtaagattacaaaaaaagatttggacgcatgccaagatctgagaaagcaaaattgaaagcagaaattcttacatgtgaacatgatctggaagattcggagactgcagacctcaaatctctggccaagagaatccacgaggcctacctgaagaacttcaacatgaacaaggtcaaggcccgggtcatcctcgcaggaaagaccagcaataaccctccttttgttatacatgacatggagaccttgtgtatggctgagaagacgcttgtggccaagatggtggccaacggcatccaaaacaaggaggcagaagtccgaatcttccactgctgccagtgcatgtccgtggaaactgtcaccgagctcacagaatttgccaaggccatcccaggcttcgcaaacttggacttgaatgaccaagtcaccttgctaaagtacggtgtgtatgaagccatattcacaatgctgtcctctttgatgaacaaagacgggatgctgatagcgtatggcaatggcttcatcacaagagagttcctgaagaacctgaggaagccattctgtgacatcctggaaccgaagtttgattttgctatgaagttcaatgccctagaactggatgacagtgacatttccctttttgtggctgctataatttgctgtggagatcggcctggccttctaaacataggatacattgagaagatgcaggagggtatcgtgcacgtgctcaaactccacctgcaggtcatcaagaagactgagactgacgcagcgctgcacccgctactgcaggagatctacagggacatgtactgatttttcctgagatggcggcaattgccactgtccagggacctctgaggtctgcagccccacacagaagagcagggatttgcacagacggccaccctacccttcggaggtgaagagggctgagcctaggtaatgcaggctcttcccacttcttacctttctggatgggcacttctaagaacacctgctactcaaatcctggtgatcggtagctaataggattcagacaatcacagagagtggcaatccccagtctgatcttaactggtccaatgttaatcaatgctcatttctttatatcacttttataatttgcccttaattaacgtgtaacctcaaagtccaagtttctcttctctgcttaccgtccttctggctgtgtgcacccttgtaaatcccaaaaactaatctgcacttttttaaccttttaaaacctacaagtcaccatgtggcccaaggtgagacatttaaatgtggcaaaaaaaaaaaaaaagttaattgaaatttaacttaaaaaaanaaaaaaaaagggcacagccaactcttttgtcaggcctgaaactaagtgtacctcacatcaaatgaatgccacttggcacctttctaggaagatgtcagtattacccatgttaagtgtcactatgttttctgcactgaatgaaaaagaattatctttatagctatatcttaaatactgtgatttctattttggtttttaaaacactctgatacaagtagttgacaagcttgtgatgtgtgtctaatcgccaacacctggaatcttctaagttgaggttcagtgtggtttatgtttaaagcctggctcttgaacctgctggacacaggaattattacctataaattaccaaagaactgtggcaatctgagcngtttcactgcatctccatgtcatttccagtgtcctggccacattctttttggtgtgtcttcgtaacaccctctaagatctacagtgtcataacactagagcccacggggaggggtctgacagacacatgaggacatgctcatttccaaagcaaggtctgagcccagctttctgccacctgctcactactgtccttggtgccattctctcagacctaggggctttcagcccttcacctctgtgataagaacagtcctgaatagggattgttgagctggtgccagcatcctctccaaccttccagctctttgtggatacagggctagccaggacatcaggaatccagggtgaacacagaagggtaaatagaatttcctagtcacatgaactgattggttccaggcaattagaaaatggctataacttaaccttaattaaaaaaataattgagtcttcttcgttttctccataggagattaaactgactgtacacattgatttatatcctgaatttatgggaacctgtatgtttggaatgtcctactgtaagactgatgaatgtaaagagttaatttcagggtacagttttgccttaatatggtttaaaagataaactattttaaaaaa

SEQ ID NO: 613 - DNA, 2729 bp, Cricetulus griseus
tgatcatgggcagctccaacttccggagcaagggcagacttccagtcttgtcctactgccggcagggcaccgaggctgccatttgtcgatgtagtcagccattgtcaggcttcagtgccaggtgcctggaggatgagaaattgcttaaagccattagtacagccaactcgggaaaccactacatgtatgttgtcgataccaggcccaagctgaatgcaatggctaacagagcagccggaaaaggttatgaaaatgaagacaactattctaatattagatttcagtttgttggaatagaaaatattcatgtcatgagatccagccttcagaaattactggaagtgaatggcagcaaggggctttccgtcaatgatttctactctggtttggagagctcaggatggcttcgccatataaaggctgttttggatgctgcaatcttcttagccaaggcaatagtggttgaaaatgcaagtgtactggtccactgttcggatgggtgggataggacttcccaggtttgttccctcggctcgctcttgttggattcctactacaggacaatgaaaggatttatggttttaatagaaaaagattggatatcatttgggcataaattttcagagaggtgtggccatttggacggtgacccaaaggaagtctcaccagtgtttactcagttcttggagtgtgtgtggcatctgactgagcagttcccacaagcctttgagttcaacgaagcgtttcttcttcagatccacgagcatgttcattcatgccagttcgggaacttccttgggaactgtcagaaggaaagagaggaactcaagttgaaggagaagacttactccctgtggccttttcttttggatgacaaacagaagtacttaaatcctctctacagttccaaatctgagagcttgacagtcttggagccaaatacggtttctttcaattttaagttttggagaaacatgtatcaccagtttgatcggacactccatcctcgacagtctgtattgaacataattatgaatatgaatgagcaaaacaagcagttagaggaagacatcaaagacctagagtctaaaattacacaatgcaaaaatggcctcctaacgaaggacttgctacatgttcaccctgaatcacctgccctcaaaacctccttgtctctgaaagagcagagtctgcttccagtgaatgacacacttcgggctatagagggcagcaacccaccagataatcggtactgtgactacccggaggagttttctaagtccgagcctactgtggtcagcttggagtatggtgtggcaagaatgacttgttagattccttcaagtatgtctcctggactgactgtagtgtaagaaatatgtagtcgtgaggatgatctgttcatgtgggcagggggatttgttcagtgactttggggctcaacagcaggtgaacagttgagaaaaggatcataactgctcttgagaggaatatgtcagctaagtgctgtttgtagcaagagtgatactcatctctgtaggaagtgagtggtattgggtgaactgcactctcattacttgagggctgtacgctgcagtgcttctgcatagaaagttgtagactccagtaaatcgtaattggccaacccaaccatattcaaagttagcacctctgaaggctttgttctggatgtcatttgtttcaagctgcagctgacagttcattatttacagcttagcagactgatttcttagacaagtataagcacatttggcatttactttcagattactgcattctgttaactcatacttcctggttggctttactcctttgagaactgtccatttaaagtggtgaagctctaaaaagttctgagtgctaactacttataactgcctgatctagaacatttcactttagtgtccctgcctacacacactgagagtggagattttgcttggctatgtgatttttaaagcaatcatttttatgtagaacatatttcttttctcttaaatatagaagggacagaaagggagcactgaggggagccggttaatgtaccaacaaaagcagcttgaactctagaaaagtagttttagttgccttgttacggtcattgtttattctgtgtgaggtacagttcaagggcactaagaaatctgcataatttatcttatatatctcctgattgcacctatatctgtaatacttcttatattagtcttgaatatacgtatcttttcttgaaaaagaaagaaagctttattgtatctgatttttgtctagttctgtttatttttccagtttacttccgtaagaccttatataataaaaacactgcattttaaaaagtaacagaaatgtactataaaaatatagtgtataattaatgatgtttagacattgggaaaggaaactaatctctgtggccacaacaggaagcttttgtgccttggttccatcaggttgtagttttagactcttctatggcagacttcttataatcatcattttggttcattatgctaatcttcaacttcacatgtacatatgtgtttacatgctcacacacagataacatcctgggtaacatagagggcatatgttgacaaaagtctgtgtaaatgtcttataaaattggagttatgttcattgtgttttgggatgtatagcatgtaaattatttcatgtattatttaaaggcaattaaatgttcatgtttt

SEQ ID NO: 614 - DNA, 2729 bp, Cricetulus griseus
agtatgggctttatctaatctttgtagagggaagagtcctcctccagaatttgctaaggtttctccctgtctgagtgtcctttcttggttgctgtttgtcagtgacactgatgtactagtgcctgctgggccctatcatacctgtcagatggacccaatgataaaattcaggcagtcatcgatgcaggagtatgtaggagacttgtggagcttctgatgcataatgattataaagtggtgtctcctgctttgcgagctgtgggaaacattgtcacaggggatgatattcagacacaggtaattttgaactgctcagctcttcagagtttattgcatttgctgagtagcccaaaggaatctatcaaaaaaggaagcatgttggacaatatctaatattacagctggaaatagggcacagatccagactgtgatagatgctaacatgttcccagctcttattagtatattgcaaactgctgagttccggacaagaaaagaagctgcttgggccatcacaaatgcaacttctggagggtcagccgagcagatcaagtacctagtagaactgggttgtatcaagccactttgtgatctcctcactgtcatggactcaaagattgtacaggttgccctcaatggcttggagaacatcctgaggcttggagagcaagaagccaaaagaaatggctcaggcattaacccttactgtgctttgattgaagaagcatatggtctggataaaatagagtttttgcagagtcatgaaaaccaggagatctatcaaaaggcttttgatcttattgagcattactttgggaccgaagatgaggacagcagcattacaccccaggttgaccttagccagcagcagtacatcttccagcagtgtgaggctcctatggaaggtttccagctttgaagcaatcctctgctttcttgttcctgtgtcagaccaggctacccagtcaagtcctcttgtggagcccacagtcctcatggagctaatttctcaaatgttttccataatactgtttgcgctcatttgcttgccttgcgcacctgctcttttacacacatctggaaaacctctggctctctgtggtggaataccctttattacaagggtaaccagaatggcccactctcttatggaaaaatccctaagctttggagatccgcactaatattagagtcatggggatatacacatattaatgtggctcccttttttgtgggggaaaaaagaggactcttcctcattccgtaaagtggggaaaatgaacatttaaaagataaactaaaacctttaatcttgaattttacacaactacttggacaagggagatacttagacttgtgcatacatcagagtactcttctcgagttcttccacagtgaaccaacccttggagtacccggtggctttttctagccaaatttgcattaatccttattgagataggatggttttctttcctctaatggagtcattcttcagatattaaagttaaaccatccactccctcaccttcagccttcagtgaatgtgcttctagttgtcaggaatgctgaagaattaacaatttgacttttaaatgtgatactggcttggcagattcccttacagcagaaagagaggagcacagattatatttaaatgttacttaggatttttcccttagtcagtgcagcgcgattctaatgtatcatgctgcatacatgatcctgcagtgcagcatccttatctttaaaagctaacagtctcctcaaaatgacctctaaactaaagggcagtgatctttttctaataacctcagtgttccctggttttatttcatctcctactagtaccctactccccaagtaaaaacagtgcccacctcctgtttatttaatggtgactgtaatgtatctgcaaatggcgcttccagtactgtgttcactgatccacatttttgcttggactagaaggggagaaaatcaaagaaagcttaattgccaagagaactgcaaatgagttcaatgcgacttctcggtgctagttggccatcttggctcaatgttgggacactatcagagaagagatgataattctgttcaaaatgaattctgaaggaaaagttgctcacgtctgttgggagcatacccttttaaatctctttagactgctcttctagaattcattgtaaccccaaagtataaaagctatctgggagatgcccctgacaagctattgcacatctctggtgaatcctgctgaatgtaagggatattcagaactttcatacctcatcatgatgttatttaagcagccaacttacatgacccgatttactttgaaaaatttatttcattcaaatgagaaagttgcagagacaaaggacatttctcagccaagagtgtgatgcattcttgctctagtctttaaattgtgtctgtgctctgggatggataccgtctgatgtctgttattgatggagcaggcactacaaaactagtcaactcccatctgtcctgttgttttctagtgctgctttgtgctgagagaacatgttagtttactgaacttgacctgtacaagactgattctttgtaattttagggataaattaggtggttaatttaaaatgatctttcaatgttgcctttacatcacattaaaatatcacttctttcagaagggtaatagaagcactgattcataagtaaaaatctttgttttagtcttt

SEQ ID NO: 615 - DNA, 2728 bp, Cricetulus griseus
gggagaggagttccccttcgagaggaggtcagattcccctctacatagacgacaccctcacgatggtgatggaatttcctgacaatgttccaaaatcttgatggacatcagaataatggtgcacaactaaagcagtttattcagcgacatagtatgcttaagcaacaagatctgagtattgccatggtggtaacatcacgtgaagtcttgagtgcactttctcagcttgtcccatgtgttggttgtcgtcgcagtgtggaacgcctcttttctcagcttgtagagtctggaaatcctgcccttgaacccctgacagtagggcccaagggagtactatctctgactcgaagttgcatgactgatgacaaagagtctttatactattattttatgtacatgggtaccaaactaaatgatatgatagatgcttattaccaaaaagtaagaagaacaagagatgtcaattgcactccttagatacacacaaacctaaacctttgggaggatgttggatggatgtatgggaactaatgtcccaggaatgcagggatgaagtagttttaattgactccagttgtcttttagaaacactagaaacatatctgcgaaagcacaggttttgcactgattgcaaaaataaagttctccgagcgtacaatatcctcattggtgaacttgactgcagcaaagagaagggctactgcgctgcactttatgaggggctgcggtgctgtccacacgagcgacacatacatgtttgctgtgaaacagacttcattgcgcatctcctgggccgtgctgagccagagttcgcaggagggtatgagcgaagagaacggcatgctaagacaatagatatagctcaagaagaagttctgacctgcttggggattcatctttatgaacgattgcatcggatctggcaaaaactgcgggccgaagagcaaacgtggcagatgctcttctatcttggtgttgatgctttacgtaaaagctttgagatgactgtggaaaaagtacagggtattagccgcttggagcaactttgtgaggaattttcagaggaagagcgagttagagaactcaagcaagaaaagaaacgccaaaaacggaagaacagacgaaaaaataaatgtgtgtgtgatattcctacttccttacacacaacagatgaaaaggcagtaagccaagagaaggaaacagacttcattgaaaatagctgcaaagcctgtggcagcactgaagatggtaatagttgtgtagaagtcattgttaccaacgaaaacacatcgtgtacctgtcctagcggtggcaatcttttggggtcccctaaaataaagaaaggcgtatctccacattgtaacggtagtgattgtggatattcatctagcatggaaggaagtgaaacaggttctcgagaaggttcagatgttgcctgcactgaggggatttgtaaccatgatgaacatggtgaagattcctgtgttcatcactgtgaagataaagaagatgatggtgatagttgtgttgaatgttgggcaaattctgaagaaaataatacaaaaggaaaaaataaaaagaagaaaaagaaaagcaagatgttgaaatgcgatgaacatatccaaaaacttggaagctgtattacagatccaggtaatcgagagacctcaggaaacaccatgcacacagtgtttcaccgtgacaagaccaaagatgcacatcctgagagttgttgcagcactgagaagggtgggcagccattgccttggtttgagcataggaaaaacgtaccacagttcacagaacctacagaaatgccatttggtcctgactctggaaaaggtgccaagagcttagttgaacttcttgatgagtctgaatgtacttcagatgaggaaatctttatctcacaagatgaaatacagtcatttatggctaataaccagtctttctacagcaatagagaacaataccgacagcatctgaaggagaaatttaataaatactgccgcttaaatgaccacaagaggcccatttgtagtggctggttgacaacggctggagcaaattaaataaataaaatagctctgtctttcaatgaaacactcaagatgactactgcgccttctcttttaaaaactcttaatttagtgacttctggcaaaattttatcttaaatcaatgtgattccttgttttgggagacggtggaggtaacctcattcgtttgttctttcttcaggcttgtgtctttagttgcgtggctacacaggcctgcttatgatttaagccatctcttcattaaacgtttctcttcctgtgagacttactaaagcaacttagtggcaaaagtaatgttgtacttacacctctgtacagaaatgacagtgagctggatatatggtttacagtagacatccacttgcaaagtgtctggacgcaatgttaaaggcaatgtgcaaaaatttaaaataaaagagtatttattaatacgcatagtagaatgtggtgtacatgtttctactcaatgtggtggtacttcagtgtttgccactcatgaacttcttacttggccatcattgatggagagagcatgaagagcatatgaagatagagatgcagactgatcaagacagaattcttcctttgatgagacttgacaactgcaagaagcagtttctagttctttttcgtaaagaataaatggccttaaaataaaaaaaaaaaaa

SEQ ID NO: 616 - DNA, 2727 bp, Cricetulus griseus
ccaggtccaagcaatatagccagacatctcaacaaacagggtaaaatacacataattaagaagattgagacagaaaatgaagtgaaagcaaatggactgagcagttggaatgaagaagatacaaatgattttagtttgtggatctggaacagacatttccaggaaggaaacaaatggaatattgcatcccagagacacctctgtcatttttaatggacactctcatagctctaatggtgccttaaagacacaggatagcttggtgcctgtgggcaatagtgttgctagcaggctttctttagattctgcccaggaggagaaggcagagaagagcaacactgacttcagagactgcacagtacagcagttgcagcagagcaccagaaatacagatgctttgcggaatccacacagaactaattctctctcatcgtctttgcacagtaacattaaaatcaatggtgctcaccactccactgttcaggggccttcaagcacaaaaagcacttctgttgtgactcttagtaaccagatgggcagtaccacctgcaaccagatgaagtagatgatttcatcagaggtcagcttgttactcgctaccgggtgttggacgttcaatggaatctaagctagcatctttaggaattaaaacttgtggagatttgcagtgtatggccatggcaaaactccagaaggaatttggccccaaaacaggtcagatgctatataggttctgccgtggtttggatgatagaccagtcagaacagaaaaggaaaggaaatctgtgtcagctgagatcaactatggaataagattcacccagccaaaagaggcagaagctttccttctgagtctttcagaagaaattcaaagacgacttgaagctgctggcatgaagggcaaacgtcttactctgaaaatcatggtacggaagccgaggggcccctgtagaaactgcaaaatttggaggccatggaatttgtgataacattgccaggactataactctggaccaggcaactgatagtgcaaaagtaattggaaaggctactctaaacatgtttcatacgatgaaactaaacatatcggatatgagaggggttgggattcatgtgaatcagttggttcctactaatccaaatccttccacaagttcaagtcgcccatcaattcagtcaagcctctcccctggtcgatcacattctgtccataatctcatccaagttcagaaagactaagaaacccacagaagagcaacacaaggaagtatttctggctgctgtggatctggaagtagcccctcgcctctaaaccgtgtactttattgtcaccctttctacacatctggcagctagtgtcagtactgacactaacagaggcgaatgttcaaggaaatggaatggactgcattctcctgtcagtggacagtcaagacttaatctgagtatagaggtcccatcaccatcccagattgatcagtctgttttggaagcattaccacctgatctccgggaacaaatacaacaagtttatgctgctcaacaaggagagccacgtagtaccaagaagaaagaaccagtaaatggctgcagttcagcggtattgccacatcctgttggcacagttctgttacaaatcccagagtctcaagaatctaatagtgacactggaatcaacgtcatagcccttcctgcattttcacaagtagaccctgatgtcttcgatgctcttcctgctgagcttcaaagggagttgaaagcagcatatgatcaaagacaaaggcagggagaggacactgctcatcagcagacagccagtgcatctgtgccgaagaatcctttacttcagctaaagccaccagcggtgaaagacaagagaaacaagaagaaccccattgcttctcccagaaagattcagagtcctttgaaaaataagctgcttagcagtcctgcaaaaactctgccagggggctatgggagcccacagaagttaatggacagttttctaaaacatgagggaatggctgccgagagacccctggaagaattctcagcttccacctctggtgtgcagaacccctctagtttgcagcccaaccagcccagttgtgttagaccagttgcccccaatttagctggagctgttgagttcggtgatgtgaagaccctgctcaaagaatggataactactatctcagatccaatggaagaagacatcctacaagttgtgaaatactgcactgaccttatagaggaaaaagacttggaaaaactagatctagttataaaatacatgaaaaggctgatgcagcagtcggtggagtcagtttggaacatggcgtttgactttattcttgacaatgttcaggtggttttacaacagacttatggaagcacactgaaagttacctaaaccttccagagagcctggtgctctctgctctctgccagcagtgcttgtgaggtatttgcaaagtgcatgatagtgatgctctgagtttttataattttaaatttctttttaagcaagtgttttgtacatttcttttcaaaaaagtgccaaatttgtcagtattgcatgtaaataattgtgttacttcttttacttgtagcatagattctatttacaaaacgtttgtttataaagttttatggatttttacagtgaagtgtttacagttgtttaataataaagaactgtatgtataatttgtaaaaaaaaaaaaa

SEQ ID NO: 617 - DNA, 2725 bp, Cricetulus griseus
tggagatcctcaaggctgaaattgaagagaaaggctcagacggggctgcatcaagctaccaactcaagcagctagaggagcagaacgcccgcctaaaggacgccctggtgaggatgcgagatctctcctcctcagagaagcaggagcacgtgaagctgcagaagctcatggagaagaagaaccaggagctggaggttgtgagacagcagcgtgagcgtcttcaggaggagctgagccaggcagagggcaccatcgacgagctcaaggaacaggtggacgctgctctgggtgccgaggagatggtggaaatgctgactgaccggaacctgaatctagaagagaaagtgcgagaattgagggagacgtgtgggggatttggaagcaatgaacgagatgaacgatgagctgcaggagaatgcacgtgagacagagctggaactacgggagcagctggacgatggccggtgcccgagtaacggaagcccagaagcgggtggaagcagcccaggagacagttgcagactaccagcaaaccaatcaagaagtaccgccagttgaccgcacacctgcaggatgtcaaccgggagctgacaaaccagcaggaagcatctgtggagagacagcagcagccaccgccagagacttttgatttcaaaatcaagtttgccgagaccaaggctcatgccaaggcaattgagatggagttgagacagatggaggtggcccaggctaaccggcacatgtccctgctgacggccttcatgcctgacagcttccttcggccaggtggagaccacgactgtgtcctggtgctgctgctcatgcccccgtctcatttgcaaggcagagctcatccggaaacagcagctggatgaaactgtcaacgtgagcccctcaccaaggccatcaagtactaccagcacctctacagcatccaccttgctgaacaacccgaggactccaccatgcagctggctgaccacatcaagttcacccagagtgccctggactgtatgagcgtggaggtggcacggctgcgtgccttcttgcagggtgggcaggaagcaacagatattgcccttctcctccgagacctggaaacatcatgcagtgacatccgccagttctgcaagaagatccgaaggcgaatgccagggacagatgctcctgggatcccggcagcgctggcctttggatcacaggtatccgacacactcctcgactgcaggaagcacttgacatgggtggtagctgttctgcaggaggtggcagctgcagccgcccagcttattgcccccctggcagagaatgaagggctgcctgtggctgcattggaggagctggctttcaaagcaagcgagcagatctacgggagcccctctagcagcccctatgagtgtctgcgccagtcatgcaccatcctcatcagcacgatgaacaagctggccacagccatgcaggagggcgagtacgatgcagagcggccccccagcaagcctcctccagttgaacttcgggctgcagccctgcgtgcagagatcacagatgctgaaggtctgggtttgaagcttgaagatcgagagacagttatcaaggagttaaagaagtcactcaagattaagggagaggagctgagtgaggccaatgtgcggctgagcctcctggagaagaagctggacagcgctgccaaggatgcagacgagcgcattgacaaagttcagactcgactggaggagactcagaccctgctgcgcaagaaggaaaaagactttgaggagacaatggatgcactccaggctgacatcgaccagctggaggcagagaaggcagagctaaagcagaggctgaacagccagtccaagcgcacaattgaggggctccggggtccccctccctcaggcattgctaccctcgtctctggcattgctggtgaagaacagcagcagggggcagtcctgggcaggctgccggcgccttgccaggcccggggccggtgaaggactctccactgctgctccagcagatctctgccctgaggctgcacatatctcagctccagcatgagaacagcatcctcagaggagcccagatgaaggcgtccttggctgctctgccccctctgcatgttgcaaagctttccgtcccaccccacgagggcccgggcggtgagctcatagctggggcattgtatcgcaagaccagccagttgttggagacgctgaaccagctaagcacccgcacccatgtagtagatatcactcgagccagcccagctgccaagagcccatcagctcagcttatggaacaagtggctcagctcaggtccctgagtgacaccattgagaagctcaaggatgaggtcctcaaggagaccgtaactcagcgtcccggagctaccgttcccactgactttgccaccttcccttcatcagccttcctcagggccaaggaagagcagcaagatgacacagtctacatgggcaaagtgaccttctcatgtgcagcaggcctaggacagcgacatcgtctggtgctgacccaggagcagctgcatcagcttcacagtcgcctcatctcctaagcactccttccctgcatttgtctgttcagctgctccctctttcctgaggggcctcagggcattggaggggggctgacacccctccactaaggattgagtgaggtctccctgactgaggacttcaccccttgattaaagtaactt

SEQ ID NO: 618 - DNA, 2723 bp, Cricetulus griseus
ggaagctatagttcagaagatcacatcccaaatattaggaggagtgcatccacaaatagtactgaggctggggagacacagtcacactggatgatatactgtctctgaagagtggtcctcctgaaggtgggactgtggctactcaggaggctgagatggagaagagaaaaggtgaggtggtatctgacctagtcagtgtaactaatcaggaatcaaatgttgagaagcctcttccaggaccttcagaagagtggcgtggcagtggggatgacaaagtcaagacagaggcacatgcagaaaacagctcctactggaaaggaaccttctggtactatgacatccacagcttcacagaagtctggtggtaaccaagggagaccagatggttccctgggtggggcagcaccactaatctttcctgactctaagaatgtagctccagtgggcattttggcccctgaggcaaacccaaaggctgaagagaaagagaatgaaacagtcatgatttcacccaaacaagaaagttttccccctaaagggtatttcccatcaggaaagaaaagggagaccgattggtagtgtgaataagcaaaagaaacagcagcagccaccacctccaccccctcaaccccctcagataccagaaggttctgcagatggagagccaaagccaaaaagcagaggcaaccaaacaagcagttcccatcgtagaacctcaagaaccagagatcaagctaaagtatgctacccagccactagataaaacagatgctaagaacaagtctttcttcccttacatccatgtagtaaataagtgtgaacttggagctgtttgtacaatcatcaatgctgaagaagaagaacagaccaaattggtaaggagcaggaagggccagagatctctgacccctccccccagcagcacagaaagcaaggtgctcccagcttcatcctttatgctgcagggtcctgtggtaacagaatcttctgttatggggcaccttggtttgttgtctttgtggcaagtgggccagttatcggaacagtgggtgaccttctttggacccttttatccccaagattatgcagccactcttccgaagaatccacctcctaaaagatccacagaaatgcagagcaaggtcaaggttcggcacaaaagcacttctaacggttctaaaacagacactgaggaggaggaggagcagcagcagcagcagaaggagcagaggagcctggctgctcaccctaggttcaagcggcgccaccggtcagaagactgtggtggaggccctcggtccctgtccaggggactcccttgtaaaaaagcagccactgagggcagctgtgaaaaggctgttttggacacaaagccctctgtacctaccacttcagaaggtggtcctgagctggagttacaaatccctgaactacctcttgacagcaatgaattttgggtccacgagggttgtattctctgggccaatggaatctacctggtctgtggcaggctctatggcctgcaggaagcgctggaaatcgccagagagatgaaatgctcccactgccaggaggctggcgctacgttgggctgctacaacaaaggctgctccttccgataccattacccatgtgccattgatgcagattgtttgctacatgaggagaacttctcggtgaggtgccccaagcacaagctgcgcctgcccatgccagcacttccttcccatgttttcacatcacactcaaactggtgacaccacaggagagaaagacacagatgttggaatggctgtttccatggacacaatctccatagtgacaatatgggggaggggggaggggtgggttagtgggggaagggggggataaaagggagggataaaaaatatatatatataaatctatttttagtctggaaagactttgtttaaatgaaaggtgcgctatcccttttgattctattttaaaattatctagttaactcaaaatttgttccaatgacaatgaaatttaaatgtgaaattgaactgaacaaactcatctcataaaggatggggtgtggctttgatctttagcctgtctcacaagaattcagtgaacactagacccaggactgaaagagcagaccaatgacaaccacctttcctctggtcagtctgtctcacaggggaagtttttgggggagggcagaatggggatggtcattttcaaaagtgtggggaatgatgtttaaacacaaaaataaatttttttttcctttccagaaacactatttatttattttaattttttggtggaattggtagatgctccaaggtcatgctgtgtcctggatctctgtggccccaccaagtaggtagagtagccccacagcaacaggtatacttaaggaatggcttacctctggcgccctctttccttgacaaattttatgtaactgggacccatcaggacccacaggatccatggaacccatggaggcccaggcctctgctgctgaaataggccaggtctgggggagaagagcgtaggagccatgtgggtgggtgaagctgaccagaaccacccacttgaacactttttttgctttcatttttataatggaaaaagggggcttgtcagatgtgtggcctcatgctacatgaatctttatgttgtattgttttgttttgtaaattgtataatttttaaatatatgagttttaaaaaagaaaaaaaaa

SEQ ID NO: 619 - DNA, 2722 bp, Cricetulus griseus
tgcaaagaaagccaaaccagccatgccccaaggaaagagtgccaccctcttcagccgccataccaaggctatcgtgtggggcatgcagacgcgggctgtgcaaggcatgctggacttcgactacgtgtgctcccgagatgagccctcagtggctgccatggtctaccccttcactggggatcacaaacagaagttttactggggacacaaagaaatcctaatccctgtctttaagaacatggctgatgccatgaaaaagcacccggaggtagatgtgctgatcaacttcgcctctctgcgatctgcttatgacagcaccatggagaccatgagctatgcacagatccggaccatagccataatagcagaaggcatccctgaggccctgacacggaagctcatcaagaaggctgaccagaagggagtaaccattattgggccagccacggttgggggcatcaagcccggatgctttaagattggtaatactggtggtatgctggacaacatcctggcctccaaattataccgcccaggcagtgtggcctatgtctcacgatctggaggcatgtcgaatgaactcaacaatatcatctctcggaccacagacggtgtctatgagggtgtggccatcggtggggacaggtaccctggctccacattcatggaccatgtgctgcggtaccaggacacaccaggagtcaagatgattgtagttcttggggaaatagggggcacagaggagtataagatctgccgaggcatcaaagagggccgcctcaccaagccagtggtctgctggtgcattggaacctgtgccaccatgttctcctctgaggtccaatttggccatgctggagcttgtgccaaccaggcttctgaaaccgcagtagccaagaaccaggccttgaaggaggcaggagtgtttgtgccccgcagcttcgatgagcttggagaaatcattcagtcagtgtatgaagatcttgtggccaaaggagccattgtacctgctcaggaagtgccacctccaacagtgcctatggactactcttgggccagggagctgggtttgatccgaaaacctgcctcattcatgaccagcatctgtgatgagcgagggcaggagctcatttacgcaggcatgcccatcaccgaggtcttcaaggaagagatgggcatcggtggcgtcctcggcctcctctggttccagagacggttacctaagtattcctgccagttcattgagatgtgtctgatggtgacagctgatcacgggccagctgtctctggagcccacaataccatcatctgtgctcgggctggaaaggacctggtctccagcctcacatcagggttgctcaccattggagatcggtttgggggtgccttggatgcagcagcgaagatgttcagtaaagcctttgacagtggcattattcctatggagtttgtgaacaagatgaagaaggaaggaaaactcatcatgggcattggccaccgcgtgaaatcgataaacaacccagacatgcgagtgcagatcctcaaagactttgtcaaacagcacttccccgccaccccgctgctcgattatgcactggaagtggagaagatcaccacttcaaagaagccaaatcttatcctgaatgtggacggtttcattggcgttgcatttgtggacatgcttaggaactgtggctccttcacccgggaggaggctgatgaatacgttgacattggagccctcaatggcatctttgtgctgggaaggagtatgggcttcattgggcactatcttgatcagaagaggctgaagcaggggctgtatcgtcacccatgggatgatatttcctatgttcttccggagcacatgagcatgtaactgaatcaggaaccttgctgtagtaaaaggaagacaagagctccctcctgggtagtaatggacagacagctggaagcagagtccattacaggctgggcctggagcagaagtagccattgatgtacaggcacggaagaccaacacctacaggctagtacccattcagtccacacaaagaagcttagtattttttttatatatatatatatataagcatagaaattgaaaaccaagccaatacttgtgacatttgctctgctacctgctgtatctattatatggaaagaatggtgttcttctagggccttatgatgttttctttttttaattagttaaaagcttatttttggtttggaggaagggaatgcaacttttaagactttaccacttctcgttatcttcacataacatgaagaacactgtattagtctgatttcttttttttttctgtgttatgtgttaagggtttatttagtatcccactgaaatgttctgtgttacagatcagtgtctacttaatgtcagagggaggggtgggaccattacattcttagccaattgtcatacatatgtggagtagtaacttaaatgtaaagttgtaacatatgagtgtttaaaatggaaacacaagcaaaaagctgtgaaatgtcttgtgtctcatgttccgtgtttatgcagctgatttgtctgttactgaagtgtgggtccaaagactcatatagctgttttgcatctgtaacccacaaagattcccggcagctgccacctcagtctcttctctgtattatcatgtttggtttaaataaactatacagtaacaaaaaaaaaaaaaaaaaaaaaaaa

SEQ ID NO: 620 - DNA, 2722 bp, Cricetulus griseus
  modified_base (1354)..(1354): a, c, t, g, unknown or other
gaggctgttcaatcaccaggagcacaaagttatcattgttgggctggataatgcagggaaaacaaccatcctttaccagttttccatgaatgaagttgtacacacatcccctacaataggaagcaatgtagaagagatcgtggttaataatacgcgtttcctgatgtgggatattggtggtcaagagtcccttcgttcttcctggaacacttactatactaacactgagtttgtcatagttgttgtggacagcacagacagagaaaggatttctgtaactagagaagagctctacaaaatgctagcccacgaggatctaagaaaagctggattgttgatttttgctaataaacaagatgtaaaagaatgcatgacagtagcagagatctcccagtttttgaagctaacttctataaaagaccaccagtggcatatccaagcatgctgtgctcttactggcgaggggttatgccaaggacttgagtggatgatgtcacggctgaaaatcagatgatctctactgacctcttcccatgaactctatcaacaaagtgctgactttacctgaaagctaaaaaaaaaaaatggttcacatatatttataataaactgatttgagagtttttctattagaagaaaagttaagaccacttatttgaaaacaaagatgaaatgtcaccacccagtttgctctctcattccttccaaacattgagtcaaatacaaatcagcacagatactgtttccagtttttaaaaatgtaatattatggaaagtattttgcttaaagttgaatatgtattgtgtatatacctcaagttcaggttaatggctttgatttgtgttctaaagaaaagcaaataacacaaataataaccttagttattaccctagtgtcattcagtaccaacattggtgttaagtgtcatttctgtggttcaccctctgttctctgtgttgtcctaacaagccaaccctgatccagaattgttgagatgctccttaaaaacaaagctggaagaagcttgacactgtataccaatttttgttgctcagtaagagatggtaacagcaagtgagtcgagtgtccactagacccctggccaggcgtaactgggcagaattacatggtaagcaattattagacttccccctctgttgatctttatgctaactcaactactaatcagtcatagcacattctggtgttgccaaggtattagttagaatttattcttaattggatatttaaagcatttgctctattgttaaagttggcatagtatagtcagttactgactgtcataagaaagcatgaaactttaccacttttacaaactatgatttttttttnttttttttttgggtttttttggagacagacaggcaagaggtccctaaggtgtcttttccttttgtctgagtgtatagtattaggatgcccagaagagggacaatgttggtcctctcttacaggcactttatatttcttgctgtaactacagcaatcacatacagtacagacaacctcaaaaatctgtttatattagtgtaaatagaaaaatcatagacagctgtctagtttcctctgcaggcatttttgggaatgcatctatagtctgttctactttgtcaatagtggataacagctcatcctagatcatatgtgaactttgggattttctaattgcccttggtatcctggtaccattctcattttcaaggcaaagtagagggtttctttacataacagatttgaccgctttcattctccaaacacaatgtagaatttcttgttcaggggcaacttcatggctcagcttgcccttgctgtcctggatgtttgctcacctccaacgaaggttgctcttgcatcatcagagattctgagtctatcaggagactagattcagattgtggtttatagctaccaatagaaaaatcctgttatatactgtacttagcaccttaattcttcttaatattaacttcttacactgacagctagattcagcaagacaaaaaatacatagactatttcaggtccttgagctacacaagttaggaccaaaggccattgttatgttcacattctcctcatataaacaagaatggtgatgttctggagaataccagttcagccagtggaagatggaaaaggataacaaaacaaaactatatagcgttgaacttgaagacagcctaaaatgatttcccacattccatttttcttcatgtttgcttaagtagaaaagatgagtattaaatgtttaaaggaatttgtaatttgagacctagtattacaaaataaacttactgaaacaagctttaaaagacagcaaaataagcaatatgtggtggtgttgtgccatgttcctcaaagcaggtgcagttgattaagaccatgatagtggagtaagggaaagagcaggatttagcactctggatgcttaagaagtgagtgcttgtatttaaccctaaaattgtttgaaattgggaagaaatgtaacaggatacaattgggctaattatgcaatatttatcttttgaattctctaactctgtactgttcctaaatggaagagtgagtcttttggtgttgcctgctcgatgtgcggatctttggtagtagacatttctcatagtgtgtacttaagaagtgcctgacattgatttgtgttgatttctaagtccatgtaataaacgatacttgttttctatg

SEQ ID NO: 621 - DNA, 2718 bp, Cricetulus griseus
  modified_base (2699)..(2699): a, c, t, g, unknown or other
gaagagtgctgcaggggagtttgctgatgatccatgctcttctgtgaagcgaggtaacatggtccgtgcagctcgagctctgctctctgctgttacccggctgctgattctggctgacatggcagatgtccataaattacttgtccagctgaaagttgtggaagatggtatattgaaactgaggaatgctggcaacgagcaagacttagggatacagtacaaagctctgaaaccggaagtggataagctgaatatcatggcagcgaaaagacaacaggaactgaaagatgtaggccatcgtgatcagatggctgcagctagaggaatcctgcagaagaatgttccaatcctctacactgcatcccaggcctgcctgcagcaccctgatgttgcagcctacaaagctaaccgggacttgatatacaagcagctgcagcaagccgtcacaggcatttctaatgcagcccaggccaccgcatcagatgacgcctctcagcaccaaggtgctggaggtggagagctggcatatgctctcaacaactttgacaaacaaatcattgtggatcccttgagcttcagcgaggaacgctttaggccttcactggaggagcgcctggaaagcattattagtggagctgctttgatggctgactcatcctgcactcgtgatgaccggcgggagcgcattgtggcagaatgtaatgctgtccgccaagctctacaggacttgctctcagagtacatgggcaatgctggacgtaaagaaagaagtgatgcactcaactctgcaatagataaaatgaccaagaagacaagggacttgcgtagacagcttcgcaaagctgtcatggaccatgtatcagactctttcctggagaccaacgtccctcttttggtactgattgaagctgcaaagaatggaaatgagaaagaagttaaggagtatgcccaggtttttcgtgaacatgccaacaaattgattgaggttgcaaacttggcctgttcaatctccaataatgaagaaggtgtaaagctcgtccgaatgtctgcaagccagttagaagcactctgtcctcaggttatcaatgccgcattggccttagcagcaaagccgcagagtaaactggcccaggagaacatggatctttttaaagagcaatgggaaaaacaagtccgtgttctcacagatgctgttgatgacattacttccattgatgacttcttggctgtctcagagaatcacattttggaggatgtgaacaagtgtgtcattgctctccaagagaaagatgtggatgggctggaccgcactgctggcgccattcggggccgggcagctcgagtcatccatgtagtcacctcagagatggacaactatgaaccaggagtttatacagaaaaggttctggaagccaccaagctcctctccaacacagtcatgccacggttcactgagcaagtggaagcagctgtggaagccctcagctcagacccagcccagcctatggatgagaatgagtttattgatgcctcccgactggtttacgatggcatccgggacatcaggaaagcagtgctgatgataaggactcccgaggaattggatgactctgactttgagacagaagattttgatgtcagaagtaggacaagtgtccagacagaagacgaccaactgatagctggacaaagtgcccgggcgatcatggctcagcttcctcaggagcaaaaggcaaagattgcagaacaggtggccagcttccaggaagaaaagagcaaactggatgctgaagtgtccaaatgggacgacagtggcaatgacatcattgtgctggccaagcagatgtgcatgatcatgatggagatgacggacttcacgcgaggcaaaggaccactcaaaaatacctcagatgtgatcagtgccgccaagaaaatcgctgaggcaggatccaggatggataagcttggccgcaccatcgcagaccattgcccagactctgcctgcaagcaggacctgctggcctacctccagcgcattgctctctactgccaccagctcaacatctgcagcaaagtcaaggctgaagtgcagaaccttggtggagagcttgtcgtctctggggtggacagtgccatgtccctgatccaggcagccaagaacttgatgaatgctgtggtgcagacagtgaaggcgtcctatgtggcttccaccaaataccagaagtcacagggtatggcgtccctcaaccttccagcagtgtcttggaagatgaaggcgcccgagaagaagcccttggtgaagagggagaagcaggatgagacgcagactaagattaagcgagcctcgcagaagaagcatgtgagccccgtgcaggcccttagcgagttcaaagccatggatagcatctgagctgctctgcccatggggtgctgccctcagatgtgtttgctaagtagagaacacttagattccacagggaggtagcagatttccaacccaaccaggtggtgaattttgcaaggacatgtttctgttaaagctaggtttaaaaaaaaaaagctttagaattcagaagtatatttctagctatatttttataagcttaaatgaaaataaaagttccataaccaaagagtaccacattaacttcttaagtcatatttcagagtagggtgaaagaaccaaaaaaaaaaaaaanaaaaaaaaaaaaaaaaaaa

SEQ ID NO: 622 - DNA, 2717 bp, Cricetulus griseus
  modified_base (1613)..(1613): a, c, t, g, unknown or other
  modified_base (2518)..(2518): a, c, t, g, unknown or other
agaagaagaagaagaagaagaagaagaagaagaagaagactggcgggatttccgtcctctggagaagcgttttgaggggacttgctccaaaaaagatcaaagtacttgtttgatgcagctcttccagagtgatgctatgtttgagccagacatgcaagaagcaaattttggaggatctcccagaagggcctaccctagttactcaccccctgaggagccagaggaagaagaagatgagaaggaagggaatgccactgtgagtttctcacaggccctagtagagtttaccagcaacggaaaccttttctccagcatgtcctgcagctctgactctgattcatccttcactcaaaacctccctgagctgccccccatggtcacctttgacattgctgatgtggaacgggatggagaaggcaagtgtgaagaaaatcccgagttccacaatgatgaagacctcacagcctccttggaagcttttgagctgggttattaccaaaaacatagccttcaatagctatcacactcgattctaccaacccaaaacaaaagttaattaatccctcacaattcagaaggacagcacagtccattgtctctgaagggacctgccataactctgacacattttgctgtgctttgaaaagtcatacctctgagtaggacctggggctaagtagaagtttatggcttggataacattgttgcctgaaagtcctttcactgacctggctgctagcccagggataaaatcttcacagcctaaagtggaacagctaaggtatacggttacagaagcaaactcctttatataaacaaatgctagctgcagtctagaagagaaaggacgatttggctgaggacatatggtaatgacaacatggttaaccatgggaaatacaacagtctccaggtatctgcccaaatatgggcgtgtactcttctttggctgataccaaatatgcttccaactaccagacgtgttgctattgtgtccacactgaggctggggccagacaaacctcccgtctccattggaggtcttcagacaatgtacttggttgtgacttcaagggaagatgtgatgatagaagggggctggcatcatgttgttgcccaataatactatagtgtcagttctgatcctgagaatttcttgatagcctagtccttagaggaccagcgaatgtgggtaagaaaggccacctagcaggcctcttccaaagccaggatgccaatttcttggtgctttagattctccaaggaagccctgccttggggatcatctggctttagcttggataccagaccacaagcttcgtggataatggtttcagtaaatgccagtgtccctcctcttagtgctataccaaggagggaagtagctttccacactcagaatgctgggtgcatgctctcattctgccgccagtggcttttctcacctgcaccagtgccaccactgccctcggcccctaggctcacttgctagagggaagcatgggggtttaccagggatacttcaagtttacccatatgtatgttgcatccaagttgtttttaatatatatataaatatatatcaaaagccaattatctacactcttcattcnctttcctcacgtaaggacagaagaatgcccaggtactgaagaccaataccaggtaactcaggcatgtagaacctggaagacagcattgtggttttagctttaattttctcttttgagcccttccttctccatgtgtagacattctgagagtactcatgcctcttggcttttattcttttcctttcttcatgttttatgcttctattggcaaagcatcctactcacattgtgcgcttggttgtgttgtttcttcaaaggagcattaggggtacattcttcaccaagagacttgggatgacagatgacaatgatagttgaaccaccaggaattggtcatctcctggaggaaacccttgaatggtacttaccaggaacttagtagattgtgacattgtccagaaaagacattagataattctgtgctccctcttgctactttgggagactctcctcccccctcctgcctccttcgttcccttccctgttccagctcacaagtggatggtacttttggaaaccgaactcttgaacttttgtcttttggttgtaagccttagcctttaatggctgagccgcctcttttgccaggatggcacttttgggaatggtgactgttacagtcgtggctgggtggcctgatccacggtttctccatcctataatcattccaaagaagaaaatccacatggcatgtatatttgtgagggttgggtctattaagagggggctttaattattcctattactattggtgcttattttccctgctatatatgggggctgggaagggctggggtaaaccaggaatgtatatttaggtcatgttaaataaaatggctgggggaaggagaaagatattctatgtgtaagagttctctcttccagtatgaaaggggagtgtagcnctttgctgtgcctgagcttcccttccccattcctgagacatcacagactcatctgcattgtgacctctccatccctagcactcactggcatctggctatctcgatacactgcctgtatgttacaacatatatttctttttgtctgaatgctaataaaacttactgggttcgatgaggggaccgtccagtcaaaaaaaaa

SEQ ID NO: 623 - DNA, 2715 bp, Cricetulus griseus
ccagtgctttgacaggaatgagctcagtgacaagaagcggccagaaacggttgccacgcagttcaagatgagcctcctacagctagtggagatcctgaagtctaaggagcctgcctatatccgctgcatcaagccaaatgatgccaaacagcctggtcgctttgatgaggtgcttatccgacaccaggtcaagtacctgggactgatggagaatctgcgagtgcgtagagctggctttgcctatcgacgcaaatatgaggctttcctacagaggtacaagtcactgtgtccagagacatggcccacgtgggcaggacggccccaggatggtgtggcagtgctggtcagacatctcggctacaagccagaagagtataaaatagggcaggaccaagatcttcatccgattccccaagaccctgtttgccacagaggactccctggaagtccgacgccagagcctggccaccaagatccaagcggcctggaggggcttccattggcggcagaaattccttcgggtgaagcgatcagccatctgtatccagtcatggtggcgtggcacactgggccggagaaaggcagccaagaggaagtgggccgcccaaactatccgtcggctcatccgtggcttcatcttacgccatgcaccccgttgccctgagaatgccttctttctggatcacgtacgcacatcatttttgcttaacctgaggcggcaactaccccggaatgttctggacacctcctggccaacgcccccacctgccctgagagaggcctcagagctgctacgggagctgtgcatgaagaacatggtgtggaaatactgccggagtatcagccctgagtggaagcagcagctgcagcaaaaggctgtggctagtgagattttcaagggcaagaaggacaattacccccagagtgtccccagactcttcattagcacacgtcttggtacagaggagatcagccccagagtgcttcaggccttgggctctgagcccatccagtatgctgtgccagtggtgaaatatgaccgaaagggctacaaacctcgctcccggcagctgctgctcacacccagtgctgtggtcattgtggaggatgctaaagtcaagcagaggattgactacaccaacctaaccggaatctctgtcagtagcctgagtgatagcctatttgtgcttcatgtgcagcgtgaggacaataagcagaagggagatgtggtgctgcaaagtgatcatgtgatcgagacactaaccaagacggccctcagtgctgatcgtgtgaacaatatcaacatcaaccagggcagcatcacattcgcagggggtccaggcagggatggcatcattgacttcacatctggctcggagcttctcattaccaaggccaagaatggccacctggctgtggtggccccaaggctgaattcccggtgatgaaggcaccggtggacctctcctgactcctgatgctttgcttcttcctctcccccgctcccagttaccaaagactcgagcttccagtcagggatccagggacacctccaaagcccacctgcaaattcctgcctcctgctcaccctctcatgaggtgatcagggggccagggagctaccccaggagtgggccaggccgggccacagcaatagaaaagcaggggcctgagcagaccaggccaggcctctgctgatgccaaatatctgagagaagggaattttaactgaggtttttgctgagattttttttttgatgctttataggagactatttttttaaaaaagccattttcctaccctaaacacactggatgtgttttcctgactcaaacagggcaaggaatgtagctaaaagattgggtggactgggctgtggggccctcttctctggccaagcctcttctcattacctttggcaccttgtctgtctgtctacccacctgcaccttttgcggcccactctgacctccacctgggggctgagaccatctttgcctaccccatcttcctgccttaagaatccccctttaggggctgggggtgtagcccagtggtagaaccggtgctaagcatgtgtgagaccctgggtttaatccccagcattaaaaagaaagtttttaatatttccacctcattctgagggcaccctggagtggggaaaaagttttaagagtttggaagacttaagagaaatcgtctagtccagtaccctggaatcacagagctggagacaggcaagccacagaagcaaggcttgcctaatagcaggctggggcaaatcctaaagtgaagccctatcctcagaacaactcactgccttttccagggactcaggaggcccatcaagcgagggtcatgtcttaagtatgtaccaggctctctaaccagcaatcaaccttgggagccaccaggtgggaggtgtctcctgcctgggtctatgcctcaggatggcaacctcctctcacacacacactttggacccaatttaaggatgctagggtctttattggcctgggcacctctgtgacctgggagcgtggggtcagggctagccttggaggagctgcaggggcatcacctctttctttctctcgaccgcacagggccttaggtttgcccagctccctctgtgccctctggggttctcagcccactgctgacacttctgcaatccagagaaacactaaataaagcaatatgtgtttgaccaa

SEQ ID NO: 624 - DNA, 2714 bp, Cricetulus griseus
catccatggccaattttttgatctgatgaaactttttgaagtaggaggatcacctgctaatacacgatacctttttcttggtgattatgtggacagaggttattttagtatagagtgtgttttattatttatgggtcttgaagattctatacccaagcacattattccttctgagaggcaaccatgaatgcagacaccttactgaatattttacctttaagcaggaatgtaaaattaagtattctgaaagagtctatgaagcttgtatggaagcttttgacagcttgccccttgctgcacttctaaaccaacaatttctttgtgttcatggtggactttcaccggaaatacacacactggatgatattaggagattagatagatttaaagagccacctgcatttggaccaatgtgtgacttgctatggtctgatccttctgaagactttggaaatgaaaaatcacaagaacattttagtcataatacggttcgaggatgttcttatttttataactatccagcagtgtgtgaatttttgcaaaacaataatttgttatcgattattagagctcatgaagctcaagatgcaggctatagaatgtacagaaaaagtcaaactacagggttcccttcattaataacaattttttcggcacctaattacttagatgtctacaataataaagctgctgtactaaagtatgaaaataatgtgatgaatattcgacagtttaattgttctccacatccttactggttgcccaattttatggatgtcttcacatggtctttaccgtttgttggagaaaaagtgacagaaatgttggtaaatgttctgagtatttgctctgatgatgaactaatgacagaaggtgaagaccagtttgatggttcagctgcagcccggaaagaaatcataagaaacaaaatcagagcaattggcaagatggcaagagtcttctctgttctcagggaggagagtgaaagcgtgctgacactcaagggcctgactcccacagggatgttgcctagtggagtgttggctggaggacggcagaccttgcaaagtgccacagttgaggctattgaggctgaaaaagcaatacgaggattctctccaccacatagaatctgcagttttgaagaggcaaagggtttggataggatcaatgagagaatgccaccccggaaagatgctgtacagcaggatggtttcaattccctgaacaccgcacatgccactgagaaccacgggactggcaaccatagtgcccagtgaccagcagcttcccagggactctcaggtcttgggccccaaatggacagatcacccaaggaactggaggggtcggccaagctgatgataaatgtcacaatctctctgaagaaaccattgtgctttttgagacccgtgcccccttcctggttggaggcttgagggccctgggacatgtgctgtctaataagattgggtcatcgctgccacagtggagagcagtgagcaaggggcttggggcaatttccattggagggtatctacacctccagttatgcttgtggttcacacatttacgtttacaaatgagatttcctttttttttttcttcagtagaattaggttttttcaaccatgactttaaatgcaatctttagagttaatgtggactcctcccctaccccatgaaatgtctttaaaaggatgaattagcatggtcttaaaatatatttctgaggttactagctgtattttgaattgtaggcaaaaatctgagaaacccagatggtgtttatacaaaatgatgacctcaggtctatagttcttaaatgtggctaattctgtaacatagtcttggtatttttcaattatgaaaaataaactatttctaagaagactcttacttgaacacaaatccaaaaaccaatttagaatcttttttgcccatagcttttgagatttacatcccaaagatttaagaaaaaaaaaaaaaaatacctaaaaaatttcaaattatgaagaattacagaattactcatttaaggtacttaaaaaaaaagtttgtacattgtcaaagtaaattttaattcaaatcatgtctgtaaaacttgacgtattttgtgtatgcatgttttcattttgcagatatttaatatatagacctatgatgtacaggtacaacatgtataggttacatagatgttatgagaaattttagtttattgtgagtactccagttgcttaaaaaaccaccagggtaatttgctgctggctttctatcatttttatgtttaaatgcaaaggaaaattttaaatgtctggaaatgtttttgattaatgcagcctagaagtaatggttctcttcaacccttcagatgttagtggaagcataaaagtcaaagactgcatgttgaaattttacttttgatagttacagaactgcttggttaaactaaatggaaccatgtgctaattttacacagttattgacctatgctgattgccactgtagtttggtatttccctttactttggtggcctgtttccctcatgtcctggaatacaactcagagctccaggcagcggaatcatctgttgttttgtttgccagaaagtgcaccctgtatggtctcctgtctaagttggaaatattatgcatgtgcaggactattcgagtattttataaacagtagcacacaataaattccatgcatgggc

SEQ ID NO: 625 - DNA, 2714 bp, Cricetulus griseus
ggaagacgcctttcagatgaaagctgaagaggaaacggatgaagagaagccaaagaacccctatggtagagctgttctacggaagattcctggctgtgggagtgcttgaaggaaaaaaatttgaaaatactgaaatgtttggtcagtatccacttcaggtcaacggggttcaaagacctgcatgagtgcctggaagctgcgatgatcgaaggagagattgaatccttacattcagataactcaggaaaatcaggccaagagcattggtttactgagctgccacctgtattaacatttgaactgtcaagatttgaatttaaccaggcattgggaagaccagaaaaaattcacaacaaattagaattcccccaagttttgtatctggacaggtatatgcacagaaacagagaaataacaagaattaaacgtgaagagatcaaaagacttaaagattacctcacagtattacaacaaagattagaaagatatttaagctatggttcgggtcccaaaagattccccctggtagatgttctacaatatgcattggaatttgcctccagtaaacctgtttgcacctctcctgttgatgatattgatgctagttcctcaactagtggctccataccatcacagtctttaccaagcacaacagaacagcagggaacccctgccccagaactgcccagctcatcacctgcatcaggttctgccctgtcattgagaacagtgatacacaaaccattcactcagtctcggatacctccagatttgcccatgcatccagcaccaaggcacataaccgaggaggaactgtctgtgctggagaactgtttacatcgctggaggacagaaatagaaaatgacacacgagcttttggtggctatagaaatgccagtgcatactgtttaatgtatataaatgacaaggcacaattcttaattcaagaggagtttaataaagagactgggcaggcccttgttggaatagaaacattaccaccagatttgagagattttgttgaggaagacaaccaacgatttgagaaagaactagaagaatgggatgcacaacttgcccaaagagcattgcaagaaaagcttttagcagctcaaaaactgagggaggcggaattttctgcagctacagcacaagcaggaggatcagactatctagagcagccatcaagaagcgacttctcaaagcactggaaagaagaaactatccgagtgattgccaaagcatcccatgaacatgaagacaaagggcccgaaacagttttgcagtcggcaattaaattggaatattcaaggctggttaagttgcaactatgtatctcataattggattggagaatttccagcgagaaagttatatagactccttgctgttcctcatctgtgcttatcagaataacagagagctcttgtccaagggtccctacagagggcatgatggagagttgatatcgcattacagaagggagtgtttactgaaattaaatgagcaagcggcagaaatgttcgagtctggagaggaccgggaagtgaacaatggcttgattattatgaacgagttcatcgttcctttcttgcccttgttgctggtggatgaaatggaagagaaagatgtccttgctgtggaagatatgagaaatcgatggtgttcctacttagggcaagaaatgggatccaacctccaggaaaagctgacggattttctgccaaaactgcttgattgttctacagagattaaaggtttccatgagccaccaaagttaccttcctattctgcacatgaactctgtgagagattcgcccgaatcatgctgtccctcagtcgtattcccgctgatggaagataaactgcccagagttcccacacactatagaaactcttttcttaccccatcttcctgtggcgggatgtgcttgttgctgctagagtttttaacttttattttaataactgcaaaagacaaaacgactatgccgaccttaaccagactgcaaacaataaagccgagaatcgcatggcattcagactttgtttatctggaacctatgtataattgcaaatcaactgatttcttgtggcagaactatgcttttgccaccgtctattgcagtattgcctctcagttttctttatcaacagctttccatttagtctggaacttccaagactaagccattaagtgttcagcactgtgtatgatatataatatttggtagcttgtaaatgaaatcaaagaataaagttttattatggactactgagttcttggacctaaatatgttgtattcagtcaaaattttcactaaaagtgagtgactgggttttaagtcaagatgcactgaaacttttaaccttttcttagattaaacgtttgttcctttatgtatgtggaaatattataacaagatgattatttcaagagaaacctgaaaaatgtacttgaataagggctattgtgaaatttaaaaagaaaaatgtgcacatatacacacatacatgcacatacatgtattcttcataatggagggcaatgtttttcattatataattattctatttttgtaaattatatactactttaattgaaaatgtcctctactaaccaatgctgtgaatgaaattgatactgttcaactaggaattataagaatctttaactttttatttgtccttcttggttttttaccaaaaaaaa

SEQ ID NO: 626 - DNA, 2713 bp, Cricetulus griseus
ctgcatgagaaacgaacacctgcagaggccgtacccaccaccctgaacgaagagctgggccaggtggagtacatcttctctgataagacgggcaccctcacccagaacatcatggtgttcaacaagtgctccatcaatggccacagctatggtgacgtgtttgatgtcttgggacacaaagctgaactgggagagaggccagcacctgttgacttctcctttaatcctctggctgacaagaaattcttgttttgggacccaagcctcttggaggctgtcaagatgggggacccccacacacatgagttcttccgtctcctttccctgtgtcacactgtccagtatttcatcaccctgtataacatcgtgtacacttcgctcccagtcctggccatggggtctttgaccaggatgtcccggagcaacgaagcatggagtacagactaccagtcctttgtcagtcactgtggccacatcgctggtcattgtggtcagtgtgcagattgggctggatacaggctattggacagccatcaaccacttcttcatctggggcagcctcgctgtttactttgccatcctctttgccatgcatagcaatgggctctttgacatgtttccaaaccagttccggtttgtggggaatgcccagaacaccctggcccagcccaccgtgtggctcaccatcgtgctcaccacggctgtctgcatcatgcctgtggttgccttccgcttcctcaggcttagcctgaagccggatctctccgacacggtccgctacacccagctggtaaggaagaagcagaaggctcagcaccgctgcatgcggcgagtgggccgcacgggctcccggcgttccggctatgccttctcacaccaggaaggttttggggagctcattatgtctggcaagaacatgcggctcagctccctggctctgtccagctttagcacacgctccagctccagctggatcgagagtctgcgcaggaagaagagtgacagtgccaacagtcccagtggaggggctgagaagcccttcaagggctgaagacccggactgggattccttgtgccagggaccagagctcacagggccagtgtccggaaactgctggtcttccctccccgcagcctgtctcctctgcctggtggactgccctgcgggtctcaccagtttgtagaagtggagggagtggagcccagggacagagcaggggttccggccttggtaaggtcgcagtgagggactagttgtggaaccaaaaaacacgagaaactacgagattgggtccacccctgtcctgcttggagtccacagggagactataatctccatatttttttactcctattccccagaggggcctgtgcccctcttcctgaattacacaagaatgtatcacgccgggaagccagagacctgctggggcctccaagccccttacatcatcgtgtgtccttttggtttgtgtttgtgtcttttgattttgtcttttttatttggtaagtggaggaggtgttcatgtgactttatgttatggttagtgtctcaactcttctgggaaggggagactggcacacactgggatgccctacctggtggagtggttcagaaggggccacatctcacggtcaccttcagggtgccattgtccttatgggatacaggagctaccagatagggaggaactgtcagcaagaggattttgggagaatggaaaggaagagtgtcctggctccttcctcacctgtgctgtggcttccccagggcacatgtgagttcttgggttaactaagtcctgctggtgctgggctgcagcccagatagtggtcccattgttctcagtgagccaaagctgagcatgaagtgtagtgctgaggggggaagtacttttcttggattccaagttgagtccccaattccttagcatactcgcttccaactttccttcctccccttatccggtgctttttctgcctaccctggggtgggactgaaaggaagctggcttctgctgctttgccccagtaacctatgaccctaccctccggctcagcctctggctagagtggtaggaggtagagaaacctgttcagccaggtgaccacttgcttggtctggacagaacacctttgccccctcttctcaacctggctccccatggcagggacctcttgagttagttgctattttgtcagcttccagaagaactccttatttgttagcagcagagtaagggaggaggaatggtgtggagctgggagtggggtgcaagcatctaaatgttccatgtaggagccccaaaggagctggaggtaggttgcagtgtagtggggctgcctgagtggggagtgggaggggaagtcttgagggggaaatcccttttggccacagtttacaagcccagtatcatgtctgtttgtgtgtctcttaaggggaaagtctgatttttataccaaagaggaaatgatttttttttgtatttggtttgtctatattatataaatacatatatatatatatagctatatatatattttatttttttgttctctctcatttttttagggagggaggaaagtaccacgttgcattgagctgtaattaaggaacattctgtataatttatgacatttctataattgcaaaaattatatcattttatggatataaaagaaaaatgcctttttataaaattccaatttctga

SEQ ID NO: 627 - DNA, 2713 bp, Cricetulus griseus
gatagacctgaactgcaaacagctgacggcagattttgtgaaccagtcagtactccagatcagcagccaggatgtggagagcaagcgcagcgataagaccgactttgctgagcagcttggagccatgaacaaaagttggcagctcttgcaaggtcgagtgggtgagaagatccagctgctggaaggcttgttggagtcttggtcagagtatgaaaatagtgtacagtctttgaaagcttggtttgaaaaccaggaaaagaagctcaaacagcagcagcaaattggtgaccagacttccgttcagaatgccctgaaggactgtcgaagaaatacagaggaagctgagtgaacagcaggagcttcagagggacatcgagaaacacagtacaggtgtcgcctccgtcctcaacttgtgtgaggtcctgctacatgactgtgacgcctgtgccactgaggccgagtgtgactccatccagcaggccacacggaacctggaccggcggtggaggaacatctgtgcgatgtccatggaaaggagactcaaaattgaagagacatggcgactgtggcaaaagtttctggatgactattctcgttttgaggactggctgaagatttcagaaaggacggctgcattccccagttcctccggggtactctatacagttgccaaggaggagctgaagaagtttgaggatatcctcagaagcaaaactcccacagggccagacctggacaccagctacaagggctatatgaagctgctgggggaatgcagtggcagcatagattccgtgaggagactggagcacaagctggcagaggaagagacctttcctggcttcgttaacctcaacagcaccgagactcagccagcgaaccttcaaaaatggcagcagttcaattcagacctcaataacatctgggcctggctaggtgagactgaggaggaactggaccggctccggcacctggcactcagcactgacatccacaccatcgagtgtcacatcaaaaagctcaaggagctccagaaagccgtggaccaccgcaaagccatcaggagatgggaccgagtgtgctctctgctggaggactggcgaggcctgctgcagggtgcactgatgcaatgtcaggaattaccacgaaatgagccatgctttgcttctcatgctagaaaacattgacagaaggaaaatgaaattatcccaattgattctacccttgacccagagacgcttcaagaccatcacagacaactcacgcaaataaagcaggagcttcagaaatcccagctcagagtggcctcactgcaagacatgtctcgccaactcttagtgaatgccgaaggctcagattgtctagaagccaaagaaaaagtccatgtaattgggaaccggctcaaacttctcttgaaggaagtcagccatcacatcaaggatctggccaagttactggacgtgtcaagcagtcagcaggatttgtcttcctggtcttctgcagatgaactggacacctcaggatccgtgagtcctacatcgggcagaagtacccccaacagacagaaatcgccacgaggcaaatgtagtcactcacagcctggaccctctgtcagcagcccaaagagcagggtcacaaaaggtggctgcgattcctccctttctgaacccaggccaggccgtgtgggtcgagccttcctgttccgggtcctcagggctgctcttccccttcagctgctcctgctgctccttattggactcacctgccttgtccccatgtcagaggaagactacagctgtgccctctccaacaactttgcccgatcattccaccccatgctcagatacaccaatggtcctcctccactctgaagcaagatgccctccgcacaagtgctggcaggacatatgttcaatcatgttcatagcagcattgtttgtaatagccagaacctggaagcaacctagatgctcctcaactgaagaatggatagagaaaatgtagtacatttacacaatggatactgggggggtggaatcttgaaattcaaaggcaaatggatggaactagaagaaaccatcctgagtgaggtaacccagacaacagaaaagacaaacatggtatgtactcactcataaaggaatgttagcctggacatggatgggaagcaacaagaggagaagaaatgggattgggactgtgtcatttgacactctgagccttaacactaaagagattaagttaagggcatacagagttccctggacccatgaagtcaggcctttggcacagccaatggctctaatgggccatctgggcagctttcctatggtgctgctccatcaacccaaaattcaccctcccaggtaccatgtcagtatcgtacaatctaccaacctgaaggaggcattagaacctcctcatataccatttttaggagcgtatatggcagcttcctctctatcttattttctttggggcatgatgtttcaatgttgctttagaggtacaagctgtaaatctgaaagtcaactttaaaaaaaaaggtataaagaaaacctggatgtaataaataagatcatggaaagctttatgtgaagaaaattgaatgttatagtataaaaaagatatttatgtatgtacagtttgctaaagccaagttttgtttgttgatttctttgcatttattatagatactataaagtactttgtc

SEQ ID NO: 628 - DNA, 2712 bp, Cricetulus griseus
gagaagttgttccagctgacccaggctaggctggctgtgttccatcgtgatgtccacaagctcctggtggacctggagctgctgctaggcatggccaagggcttgggggagcacgaccagcgcagcttccaggccctgtacacagccaatcagatggtgaacgtgtgtgaccctgcccagcctgagacctactcagcagccaaggccctggcctccaagttctttggccaacatggaggtgaaagtcaacatactatccatgccatgggacactgccacattgatacagcctggctttggcccttcaaggagactgttcggaaatgtgctcggagctggtcaacaactgtgaggctcatggagcagaacactgacttcgtctttgcctgctctcaggcacaacagctcgaatgggtaaagaaccactaccctggcctgcatgcccggctccaggagtttgcctgccgtggacagtttgtgcctgtgggaggcacctgggtagaaatggatgggaaccttcccagtggagagtccatggtgaggcagttcctacagggtcagaacttctttctgcaggagtttgggaagatgtgctctgagttctggctgccagatacatttggctactcagcccagctcccccagatcatgagcggctgtggcatcaaacgcttcctgacacagaaactgagctggaacttggtcaactctttcccacaccataccttcttctgggaggggctggatggctcccgagtgctggtccacttcccacctggagactcgtatggaatgcagggcagtgtggaagaggtgctgaagacggtgaccaacaatagggacaaggggcggaccaaccacagtggcttcctcttcggcttcggagatgggggtggtggccccacacagaccatgctggatcgcctgaagcggttgggcaacactgatgggctgcccagggtgcagctgtcttctcctgggcagctcttcacagcactggagagagactcggtccagctgtgtacgtgggttggggaactcttcctggaactacacaatggcacctacactacccatgcccagctcaagaagaggaatcgggaatgtgagcaaatccttcatgacgtggagatgctgagcagcctggccctagcccgcagtgcccacttcctatacccagcagcccagttgcagcacctctggagactcctactcctcaaccagtttcatgatgtgttgactggaagctgcattcagctggtggcagaagatgccatgaactactatgaagacatccattcccatggcaatacgctgctcaatgctgcagccgcagccttatgtgctggggagccaggtcctaagggcctcctcgttatcaacacgctgccctggaagcgcactgaagtgttggcactgcccaagcctggtggggctcacagcctagccctggtgacagtgcctagtgttggctatgcccctgctcccacacctacttcactgcagcccctgctgccccagcagcctgtgtttgtggtgcaggagactgacggttctgtgactctggacaatggcatcatccgggtgagactggacccaaccggctgtcttacttccctggtcctggtggcttctggcagggaggccatcgctgagggtgccctggggaaccagtttgtgctgtttgatgatgtgccattgtattgggacgcgtgggatgtcatggattaccatctggagacacggaagcctgtgcggggccaggcaggaaccctggcagtaggcactgagggtggcctacggggcagtgcctgtttcctgctgcagatcagccccagcagtcggctcagccaagaggttgtgctggacattggttgcccctatgtccgcttccacactgaggtgcactggcatgaggcccacaagttcctgaaggtggagttccctgctcgaatacggagcccccaggctacctacgaaatccagtttgggcaccttcagaggcctacccactataacacctcttgggactgggctcgatatgaggtatgggcccaccgctggatagatctgtctgagtgtgattttgggctggccctgctcaacaactgcaagtacgggacatcagtacgaggcaatgtcctcagcctctcgctgttgcgtgcacctaaggccccagatgttactgctgatatggggcgccatgaattcacttacgccttgatgccacacaagggctcattccaagaggctggtgttatccacgctgcctacaacctcaactttcctctgctggcactgtcagctccaagcccagcacctgccaccacctggagtgccttttctgtatcttcaccagcagtagtgttggagaccatcaagcaggctgagaagagccatcagccccgcacactggttctaaggctgtatgaggcctatggcagccatgtggactgctggctatacacatctttgcctgttcaggaggccatcctttgtgacctcctggagcagcgagaccctactggtcacttgtcccttcaggacaaccgcctgaagctcaccttttctccctttcaagtgaagtccctattgcttgtgcttcagcctccaccgaactgagtattgtttgtggagagctttgggagctcctcatttccacctccctagcccgaaataagcttcttgtgcaataaatgcttagattagcag

SEQ ID NO: 629 - DNA, 2712 bp, Cricetulus griseus
gtggggcagacggaagacgccgaggaagaggccggaccggagcccgaagtgagggccaagcgggcggcccaacccgaagaggaaacggcgacgagtccggccgtgtcgcccccgccgcagccggcggaacgatcctcggcgcaggagccctctgctcccgggaaggcggaggccagcggggagcaggcccgggagcactccgtcgctggagcggaggaggagggcggggtccgatggcagctcgcctgaggcggagccgcgggctctggagaacggagaggcggatgagccctccttcagcgaccccgaggatttcgtggacgacgtgagcgaggaagaattacttggtgatatactcaaggatcggcctcaggaagcagatgggatcgactcagtgattgttgtagacaacgttcctcaggtgggaccggatcggcttgagaagctcaaaaatgtcatccacaagatcttctccaagtttggaaaaatcataaatgactattaccctgaagaggatggaaagactaaagggtacatctttctggaatatgcttctcctgctcatgctgtggatgctgtgaaaaacgctgatggatacaagctggacaagcagcacacgttccgggtcaacctcttcactgattttgataagtacatgacgatcagtgatgagtgggacattccagagaaacagcctttcaaagacctggggaatttgcgttactggttggaagaggcagagtgtagagatcaatacagtgtaatttttgagagtggagaccggacatccatcttccggaatgacgtcaaagatccagtctcaattgaagaaagagcgagatggacagagacttatgtgcgctggtcccctaagggcacctacctggccacttttcatcagcggggcattgccctctggggaggggagaagttcaagcagattcagaggtttagccaccaaggcgtgcagcttatcgacttctctccatgtgaaagataccttgtcactttcagcccactgatggacactcaggatgaccctcaggccatcattatctgggacattctcacagggcataagaagagaggattccattgtgaaagctcagcccactggcccattttcaagtggagccatgatggcaaattctttgcaagaatgactctggatactcttagcatctatgaaacaccctctatgggccttttggacaagaagagcttgaagatctctggaataaaagacttttcttggtctccgggaggtaacatcattgccttttgggtgccggaagacaaagatattccagccagggtgaccctgatgcagctccccaccagacaggagatccgggtgaggaatttattcaatgtggttgactgcaagctgcactggcagaagaatggagattacctgtgtgtgaaagtggacaggactccaaaaggcacacagggtgttgtcacaaactttgaaatcttccgaatgagggagaagcaggtacctgtcgacgttgttgagatgaaagaaaccatcatagcctttgcctgggaacccaatggcagtaagtttgctgtgcttcatggcgaggcacctcggatatcggtctccttctaccacgtgaagagcaatgggaagatcgaactcatcaagatgtttgacaagcagcaagcaaacaccatcttctggagtccccagggacagttcgtggtgctggccgggctgaggagcatgaatggtgccttggcgtttgtcgacacttcagactgcaccgtcatgaacattgcagaacactacatggcctctgacgttgagtgggacccaactggccgctatgtggtcacttctgtgtcatggtggagccataaggtggacaatgcttattggctgtggaccttccaaggacgccttctccagaagaacaacaaagatcgcttttgccagctgctctggagaccaaggcccccaacactcctcagccaggatcagataaagcaaattaagaaggatctgaagaaatactctaagatcttcgagcagaaggatcgcttgagccagtccaaagcttcaaaggaactggtggaaagaaggcggaccatgatggaggacttccggcaataccgaaaaatggcccaggaactctacatgaagcagaagaacgagcgtctagaactgcggggaggggtggacactgatgagctggacagcaatgtggatgactgggaagaggagaccatcgagttttttgtcactgaggagatcattcctctcggaagtcaggagtgacttcaacactgtgtgttactgtgccgtgcccaggatccgaggccacccttcacagagagcctcaggctgggttctcatctgtgcttttttgctctggacttcgagtacacccggggttcttccatcccgacacagctctgtgccttcagcccctgggtccacagtggggacactcgaggctcctctctcatttgacctgtttgggtttttatgccatgtctgctgtggggcctcattgcagcgctcttggtggctcctttcactcctgctgcccgtggtgtttccagagactccacctgcagctcagtggggtccctattcatggactggctgtccctgctctggaggcacccagcacctcacacctgttcaggctgtggcggggccctctgcgcaggttggatgtggaaataaaagcaaccctgtgt

SEQ ID NO: 630 - DNA, 2712 bp, Cricetulus griseus
tgtccccagtgtatgaaagctcttggctctgccgatgaacttttcaaacactatgaggcagttcatgatgctggcaatgacgctggtcatggtggagaggccaatcttgctctgacacgagatgacataacactactcagacaagaggtccaagacctacaggcctcacttaaggacaaacagaaaattttaatattaagcagatgaaagatttatttgaacagaaagcagcccaacttgctactgaaattgcagatataaaatcaaaatatgatgaggaaaagagtctccgagaagctgctgaacaaaaagtgacacatttgactgaagaattaaacaaacagacaactgtaattcaggatctgaaaactgaactgcttcagagacctggtatagaagatgttgctgtattaaagaaagaactggtccaagttcaaacactaatggataatatgactttggaacgtgagagagaatctgaaaaactcaaagatgaatgacaaaaagttacaatcagaatatgctaattgctggaaagccaccttaggatcttgaagcaagaatttgaaaagttaagtcaagatgcagagaggcagcacaaggagctgaatgacagaatccaagtgacagccacagacctgaaaacagtagaggcgcagaaagaagctctaatgacggagctttcaacaacaaaagaaaaattgtcacaagtttctgattctctaaagaactccaaaagagaatttgagaaagagaatcaaaaaggaaaagctgctatattagatttggaaaaagtttgtaaagaactaaagcatcagctccaagtacagacagaaagtacgctcaaagagcagaatgaactgaagaagtcacttgaaaaagagaaagagacttctcaacagttgaaggaggaactcagttcactcaaggcagaagtcacaagggctcaagatacattaaaacaaaaggaaaaggaagagacaacagctccagggcaacataaatcagctaaagcagttgactgagcagaggaaaagcaaattgaagcagcagagagagaaaaactgtcaacgttacaaagcacctatgacaaatgccaggcaagcctgaaacagcttcagtctgacctctacggcaaagagtctgaacttgtagccacaagacaagacctcaagtctgtagaagagaagctctcactggcacaagaagacttgatttcaaacagaaatcaaattggaaaccaaaataaatcaattcaagaactgcagtctgccaaagctactttggagcaagactctgcaaagaaagagcagctgctaaaggagcagagtaaaagcgctgcaggatgtgcagagagaaaagtcaatgaaggaaaaagaactaagtaaatgaaaaagtctaaattggcagagacggaggaaattaagtgtagacaaagaaaaaaaaatacattaaactcaacgaagaactcaagtcccacaaacaagaaagcataaaggaagtagcaaacctcaaggatgccaaacaacttttgattcagcagaaattagaacttcaaggcaaagtggacttgctgaaggcagctctggagcaggagaaggaaagtcagcgcctgttacaagagcaagcgaaaaaggaggacgagatgcggaaggaggagttttctgagaaggaagcgaagctgcattctgaaataaaagaaaaggaagcaggaatgaagaagcatgaagaaaacgaggctaagcttaccatgcaggtcacaacattaaatgaaaacttgggtactgtgaaaaaggagtggcagtctagtcaacggagagttagtgagcttgagaagcaaacagatgacttacggggtgaaattgctgtcttagaagcaacggttcagaataatcaagacgaaagaagagcacttctagaaagatgtcttaaaggagaaggtgaaatagaaaagcttcagaccaaagttctagagttgcaaaggaagctggataacacaactgcggctgtacaggagctgggcagagaaaaccagtccctgcagataaaacacacacaagcattgaacagaaagtgggcagaagacaacgaagtgcagaactgtatggcctgtgggaagtgcttttcagtcacagtgagacggcatcactgccgacagtgtggaaatatcttctgcgctgagtgttcagccaaaaatgccttaactccttcttcgaagaagcctgttcgtgtctgtgatgcatgtttcaacgatttgcaaggataacggtttaacacaattgcagagtactgtcacactaacattaaatgtctaataaatttgatttggactctggttgcatactaggccaaattggaattcgtatattttggaatgttaccagtgtcaagtaaaactcttctatttttgtgagacttgggttcagttttgattacttttctccatttaatccctaaaacagctttcatgccaaggtcagaattagacaatgaaatgtaaataatctttggatggaaaatagcaatgtattttttaaatataatttaattattcacaaatgatgaatacaattccttagtttcatcctctcaaataatatgtacaaaatgtatgggtggttgttaccatttgttatggtttctgttgcacaataacagtgattatttgttctgttggtggagtcattgcacaggagtgtaacactctctgtt

SEQ ID NO: 631 - DNA, 2711 bp, Cricetulus griseus
  modified_base (2698)..(2698): a, c, t, g, unknown or other
tggtttaacttgggagttttggacagtaacttcatggctaataataagttattagcgcttctttttgaggttttgcaacaggataaaacttcatctaatctacatgaagctgcttcagactgtgtgtgctctgctctctatgccattgaaaatgtggagactaacttgccattggccatgcagcttttttcagggggtcttgacattggagactgcctatcatatggctgtggcacgtgaagatttagacaaagttctgaattactgccgtatcttcacagaactatgtgaaactttcctggaaaaaattgtttgtactccaggccaaggtctgggagaccttcgaactttggaactgcttcttatttgtgtcaggccatcctcagtacgaggtagtagaaatttcctttaactttggtaccgactaggagaacatttgtacaaaaccaatgatgaggttattcaagagtgtcagacctggtgaaggacctgattttcttgattggttctatggaatgctttgcccagttgtattctactctgaaagaaggcaacccaccctgggaggtgacagaagcggttctctttatcatggctgctatagcaaagagtgttgatccggagaacaatcctacccttgtggaggtactagagggagttgtccgcctcccagagactgtacatatggctgtgcggtacacaagcatcgagctggttggtgaaatgagtgaagtggttgaccgaaaccctcagttcctggaccctgtattgggctatttgatgaaaggcctatgtgaaaaacctctggcttctgctgcagccaaagccattcataatatttgttcagtttgccgggatcatatggctcagcactttaatggactcctagaaattgcccactcccttgactctttcatgttgtctcccgaagctgcagtgggtttgctaaaaggaacagctcttgtcctagcaagactgcctttggataagattactgaatgtcttagcgagctatgctctgttcaggttatggcattgaaaaagctgttgtctcaggagcccagcaatggcatatcttcagatcccactgtgttcttagatcgcctggcagtaatatttagacacaccaatcctattgtagaaaatggacagactcatccgtgccaaaaagtcatacaggaaatatggccagttttgtctgagactctaaataagcaccgagctgacaatcggattgtagaacgttgttgcaggtgcctgcgctttgctgttcgttgtgtaggcaaagggtctgcagcccttctacagccactagtcacacagatggtgaatgtgtaccgtgtacatcagcattcctgtttcctgtaccttggcagtatccttgtggatgagtacggcatggaagaaggctgtcggcagggattattagatatgctccaggcgctgtgcattcccacctttcagctcctagaacagcagaatggcctccaaaatcaccccgacactgtagatgacctattcaggttagcaacccgatttattcagcgtagccctgtcaccttattgaggagccaagtagtcatcccgatcttacagtgggccattgcatccaccaccttggaccaccgagatgccaactgcagtgtcatgagattcctgcgagacctcatccacacaggagtagccaatgatcatgaagaagattttgaattgcgaaaggaactgattggacaagtgatgaaccaacttggacagcagcttgtaagccagttgctccatacatgctgcttttgtctccccccatataccttaccagacgtggctgaagtgctctgggagatcatgcaggttgataggccgactttctgtcggtggctagagaattccttgaaaggtttgccaaaggagacgactgtgggagctgtcacagtgacacacaaacaacttacagacttccacaagcaagtcaccagtgctgaggaatgtaagcaagtttgctgggccttgcgagacttcaccaggttgtttcgatagctcaagctcacactcctgcactgtgcctgtcatccaggaatgtctttttttattagaagacaggaagaaaacaacccagactgtgtcccacaatcagaaacctccgtgtggcagaggggccttcactgtgagacgggcacattactaaggggaatgtgggaattcagatgaggaatatagctacaattggaattaaagagtcgggtcatctctgttctccttcctttaaacatgggtgaatagaaggaacacttgcacaccccagctgtcccacctttagagatgaccagacaaggagcctggtctgctttatgtcatggtcagggatgatggaactcgccagggccaaagttgctattcatgcggagcccaaccctgaccctattgagttgctaagtccactgcaattcacatgagttgtcatcagccttggggagaaaaaccaaaagtggggtgggtggagaggatacaaatgtgtattaaatctttctttttcttagtgaattattcatctgcagacataggagggggaaaagaaacaaaaaagaaggtatggaggaaatgtatttacaggacgactgtattttagttaaaaacaaggacactgttctgtcctgtggtgtagccatctcaagaataaatacaacagcaccaaaaaaaaaanaaaaaaaaaaaaa

SEQ ID NO: 632 - DNA, 2711 bp, Cricetulus griseus
tctccggaaaggcggctacggcggcaaaatgaagatctttgtgggcaatgtcgatggggcagatacgacgccggaggagctggcggccctcttcgcgccctacggcacggtcatgagctgcgccgtcatgaaacagtttgccttcgtgcacatgcgcgagaacgctggcgcggtgcgcgccatcgaggccctgcatggccacgagctgcgtccaggtcgcgcgctcgtggtggagatgtcgcgcccaaggcccttgaacacttggaagattttcgtgggcaatgtgtcggctgcatgcacaagccaggaattgcgcagcctcttcgagcgccgcggacgcgtcatagagtgtgacgtggtaaaagactacgcgtttgttcacatggagaaggaagcagatgccaaagccgccatcgcgcagctcaacggcaaagaagtgaagggcaagcgcatcaacgtggaactctcaaccaaggggcagaagaaggggcctgccctggctatccagtctggggacaagaccaagaaaccaggggctggggatacagcattccctggaactggtggcttctctgccaccttcgactaccaacaggcttttggcaacagcactggtggctttgatgggcaagcccgtcagcccacacctccattctttggtcgcgaccgcagccccctgcgccgttcacctcctcgagcctcttatgtggctcctctgacggcccagccagccacctaccgggcccaaccctcggtgtcgctgggagctgcctatagggcccagccttctgcctctttgggtgttggctatcgaactcagcccatgacagcccaggcagcctcttaccgtgctcagccctctgtctcccttggggccccatacaggggtcagctggctagccctagttcccagtctgctgcagcttcctcgcttggcccatatggtggagcccagccctcagcctcagccctttccacctatgggggtcaggcagctgcagcttcttcgcttaactcctatggggctcagggatcctcccttgcctcctatggtaatcagccatcctcttatggcgcccaagctgcctcttcctatggggttcgtgctgctgcttcttcctataatacacagggagcagcttcttccttaggttcctatggggctcaggcagcttcctatggtgcccagtctgcagcctcctcactagcttatggagcccaggcagcttcttacaatgcccagccctcagcctcttacagtgcccagtctgccccatatgctgcacagcaggctgcttcctattcttcccagcctgctgcttatgtggcacagccagccacagctgctgcctatgctagccagccagctgcctatgctgcacaagccactaccccaatggctggttcctatggggctcaaccagttgttcaaacccagttgaatagttatggggctcaagcatcgatgggcctgtcaggttcatatggagctcagtctgctgctgcggccactggctcctatggtgcagcagctgcctatggggctcagccttctgccaccctggcagctccttaccgcactcagtcgtcagcctcattggctgcttcctatgctgctcagcagcatccccaggctgctgcctcctaccgtggccagccgggcagtgcctacgatgggacaggccagccgtcagcagcctacctgtctatgtcccagggggccgttgccaacgccaacagcaccccgccaccctatgagcgtacccgcctctccccaccccgggccagctacgacgatccctacaaaaaagctgtcgccatgtcgaaaaggtatggttccgaccggcgtttagccgagctctctgattaccgccgtttatcagagtcgcagctttcgttccgccgctcgccgacaaagtcctcgctggattaccgtcgcctgcccgatgcccattccgattacgcacgctattcgggctcctataatgattacctgcgggcagctcagatgcactctggctaccagcgccgcatgtagggccatcctggggatggggcaccacagaaagggagagagaggaagaggtagggtagggtgcagacccaggttatcaccaccctgtctcatacctctcccgatggtggtttttcatcccctccctctaccatgtgggccttccccaggagaggacccttttgtgtttggcagtaacctgctttgttttctttgcctcagcagcacatcttgctactggctttagatctgcagttttccctctaccctgccatctccccagaatgggtatttcttttatatttttatttttttcctggctcccttttatttttctgcgcgatacttatggttgcctggagggtgatacaacctgcagctgaggtcgggcggcgcctttttctttttagatgtgagggaggccaggaaagggttactttaaccatttcctatgggccaagctatgccagcagtccagggggccctgattctcctccgtagagactgttgagactgagatcctgttgggacagtcagttggtatgtgtccaaatccctgcttaccactgaagttttagctgatggtgactggcatagtcccaattccctatctccccaagtaggtggtgttagaaaccttaatttttttctcttttgtatggacgacaaataaaacttggggcgatttgtggtttgg

SEQ ID NO: 633 - DNA, 2711 bp, Cricetulus griseus
gcaggcattgccacccaggtggtagtggagaagaagctctggagagagcggggtgtgaaccggcaccagctgggccgtgaggcctttctccaggaggtgtgggagtggaaggcggagaagggtgacaggatttaccaccagttgaagaaacttggcagctccttggactgggaccgagcctgtttcaccatggaccctaaactgtcagtagctgtgacagaggctttcgttaggctccatgaagaaggggtcatctaccgtagcacccgcctggtcaactggtcctgcaccctcaattctgccatttctgacattgaggtggataagaaggagctgactggtcgtaccctgctctctgtgcctggctacaaggagaaggtggagtttggggtcctcgtgtcctttgcctacaaggtccaaggctcagacagcgacgaggaggtggtggtggcaacgactcggattgagacgatgctgggagacgtggctgtagctgtgcaccccaaagaccccagataccagcacctcaagggaaagagagtcatccatcccttcttgtcccagagcctccctgttgtctttgatgactttgtggacatggagtttggcacaggtgcggtgaagatcacccctgcccatgaccagaatgactatgaggttggacagcggcacgggctggaggccatcggcatcatggactccaaggggaccctggtcaacgtgccgccacctttcttggggatgcccaggtttgaggcccggaaggccgtgctggctgcactgaaagagcggggactgttccgcggcatcaaggacaaccccatggtggtgccactttgcaaccgctctaaggacgtggtggagcccctgctaaggccacagtggtacgtgcgctgtggggagatggctcaggctgccagtgcggctgtaacccggggcgacctccgtatcctgcctgaggcccatcagcggacttggcattcctggatggacaacattagagactggtgcatctctcggcagctgtggtggggccaccgaatccctgcctacttcgtcaccgtcagtgacccagctgtaccccctggggaggaccctgatgggcggtactgggtgagcggacgcactgaagcagaggccagagagaaggcagcacgggagtttggagtgtcccctgacaagatcagccttcagcaagatgaggatgtattggacacctggttctcgtctggtctctttcccttctccatctttggttggcccaatcagtcagaagaccttagtgtgttctaccctgggaccctgctggagacaggccatgacatcctcttcttctgggtggcccggatggtcatgctcggcctgaaactaacaggcaggctgcctttcagagaggtctatctccatgccatcgtccgtgacgcccacggcaggaagatgagcaagtctcttggcaatgtcattgaccccctagatgtcatccatggagtctccttgcagggcctccatgaccaactgctgaacagcaacctggatcccactgaggtggagaaagccaaagaaggacagaaggccgacttcccagcaggcattcccgagtgtggcaccgacgccctgcgctttggactctgtgcctacacatcccagggtcgagacatcaacctggatgtgaacaggatcctggggtaccgccacttctgcaacaaactctggaatgccaccaagttcgccctgcgtggccttgggaagagcttcgtgcccttgcccacctccaagcctgaagggcacgagagcttggtggaccgctggatccgcagccgcctgactgaggccgtgaggctcagcaatgaaggcttccaggcctacgattttccagccatcaccacagcccagtacagcttttggctctatgagctctgtgacgtctacttggagtgcctgaagcccgtgctgaatggggcggaccaggtggcagtggagtgtgcccggcagaccctctacacctgcctggacgtcggcctgcggctgctgtctccattcatgcccttcgtcacagaggagctgttccagaggctgccccggcggacaccagcagctcctgccagcctgtgtgtcaccccctacccagagccctcagagtgctcctggaaggaccctgaggctgaagctgctatggagttggcactaagcatcactcgagctgtgcgctccctgcgtgccgactacaacctgacgcggaccaggcctgactgtttcttggaagtggctgatgaggccacaggggccttggcatcctcggtgtctggctatgtgcaagcgctggccagtgcgggtgtggtggctgtcctggccctgggggcccctgcaccacagggctgcgctgtggctgtggcttcagaccgctgctccatccacctgcagctgcaggggctggtggacccagcccgggagctgggcaagctgcaggccaggcgaagtgaggctcagcgccaggcccagcggctgcaggagcgccgtgctgcctccggctactcggcaaaggtgccccttgaggtccaggaggcagatgaggcgaagttgcagcagacacaggcagagctcaggaaggtggatgaggccattgccctgttccagaagatgctgtgaccccaattccaactctcagaacccccagtggtccaccaacagggatggcagcaataaaatatttt

SEQ ID NO: 634 - DNA, 2710 bp, Cricetulus griseus
atgacagctacctcctaccacacctccttccatccaaacctgggctggacacccacagcatgcggcgccccatggctaacaccatccagcgagtgtttaagatgagcttcgtgcctgttggcttctggcaaaggttcatagcacggatgctgatcagcttggctgagatggacctgcagcttttgaaacaagaagaatacaaaaagcaggaaccggaagtcaccatttacagttttacaggaaccagagaaatcgttgcagcacattcagagtcaaagaatcagaccatctactggcaggaaggctgctgggctcacccaaaaaatagcctaccagattgcctcaggcctggcctacctccacaagaaaaacatcatcttctgtgacctcaagtcagacaacatcctggtgtggtccctgagcgtcaaggaacatgtcaacatcaagctgtcagactacggcatctcgcggcagtcctttcatgagggtgccctgggagtggaaggcacccccggctaccaggctccagagatcaggcctcgcatcgtgtatgatgaaaaggtgatatgttctcctatggaatggttctgtatgagttgctgtcaggacagcgtcctgcgctgggacaccaccaacttcagattggaggtctggtacagcaatggccctggcctcctcatcatcgactgcacagtcctggatatcagcaggcgactggagccctttgcagccccttccacggtcacatcaattgtgtgcagctcagactgcagaggggaggaggtggtctggtgcctagatgacaaggccaattccttagtcatgtaccactcagccacctaccagctgtgtgcccgggacttctgtggggaccccagtcctctcagagacacgtttcctgtgcagccctcagtcccagaagccccaggcagtcacatagtcacctcaaaggagccagaggaagagtgcattgcagacgtgagcatcatgtacagtgaggagctgggcatgcagatcctgacccaccaggactcactcactgactactgctccatgtcctcctactcctcgtccccacccaccgagactcctaggtccccgtcagtctgcccagcctccctgaccagctattccagtgtgcctttcgcccagcgtcacttctgacagatctgagcctgacctgacccccatggatggggagacgttcaaccaacacctgcaggctgtgaaggttcttgctgtcaaagacctcatttgggtccccaggcatggaggggatgtcattgttattggcctggagaagaattcaggtgcccagaggggcagagtcatcgctgtcttaaaagcccgagagctgacttctcatggggtcctggtggatgcaggcggtggtggcaaaggacacggtagtgtgtggctttgtgcctggctgtctggaggggctggggcgccagggaatttgacatcttctaccagtcctatgaggagctgggccggttggaggtttgtacacgcaagagaaggtaatgcctgtggaagggcctctgcgtggagccagcaggtccgagccactgcctgacccctcggctacagccctccaagggcacagaagacaaacgggttctttgctaaccctgtgttaagaagggctgagaagctagtagctactggtggtttgggagttctcaggttcaatgggggagaattaccagcccaagggaagccacagggtctggttgagagaggccttctcttgcctcttccatgggcttccaggagctggggagagtgaccccattccaggccttcctggcataatgaatgggcctgtccgtttttatagccaggcctcagatggaattacactagagacttttggttgaggagcagttcagggcaaggtgggaggagggctcgtgacccccccggccctccttccccaaagaccccaggctctcagcctgtttcacaaggctctgagtccctggagcgtgaggccccgtttggtcaagctgagatcgaatctcctgcttggcaagggctctgtatgggaaacctcagaaggaccctgagcagccagcattgcccaatagtggggatgaatgggttccttcaagagtcacagccggaaagcccagtgcgagggctcctgctccccctgtacattcttctcccccaacaaaaggaaggagaaacccaatcagcaggcctggagaaagggcctgtgtttatagctcggtaaaataaacttggacgcagctcgagcacaagccttgtttgtttgcacatcataatcttgtttatcactttaacaaattaagtaatatctcagcggttaggcccggttgtgaaatcccatcgtatgggacttattctgaattatgtatttgccaaacatttactgcccacattgagggaagatgatgaaaagtgaaattgttagcagggtgtatgggcacaacagggaacattttataaattctgtgcacacacgtgcactcacgcccacgtctttgccaagcagtacccttggagtctgcttgacctagaactcaaatttgaatgtgaagttgtgcttggctcatgttgttgaaccttctctagaattaaattataaaaaaccaaacttgagatctggttggggtgtgcaagctgatgtgactcctgtatctaaaaataaacagacctagatagagaaaaaaaaaaaaaa

SEQ ID NO: 635 - DNA, 2709 bp, Cricetulus griseus
  modified_base (1667)..(1667): a, c, t, g, unknown or other
  modified_base (1677)..(1677): a, c, t, g, unknown or other
ggctcaccctggagattaaactggaaaataaccaaaactatccagaatggcagggaattgtttgagtcctccctttgtggagaccttttaaatgaagtccaggcgagtgggcacacgaagtcaaagcatgaaagcagaaaggagaagaggaaaaaaagcaacaaacacgaggcatccagatctgaagagcgcaagtcacacaaaatccccaaattagaaccagagggacaaaatagaccaaatgagagggtggacactgcaccagaaaaaccaagagaagagccagtgctcaaagaggccgtcccggttcagccaatactgtcttctgttccaacaacagaagcatccactggtgttaagttccaggttggtgatcttgtttggtccaaggtgggaacctatccttggtggccttgtatggtttcaagtgacccccagcttgaggtccataccaaaattaacacaagaggtgcccgggaatatcatgtccagttttttagcaaccagccagagagggcatgggttcatgagaaacgggtacgggagtataaaggtcacgaacagtatgaagagttactagccgaggcaaccaaacaagccagcaatcactctgaaaaacaaaagattcggaaacctcggcctcagagagaacgtgcccagtgggacattggtatcgctcatgcagagaaagcattgaaaatgactcgagaagaaagagtagaacagtacacgttcatctatattgacaagcagcccgaagaggcttcatcccaagcaaagaagaatgttacctccaagaccgaagttaagaaaccccgaagaccaagatctatgctgaatagtcagccagaacagaccaatgctggggaggtggccctcctcaacaatcaagtactgaccttcgaagacaaagccagaggcggcacacaagtgtggaagaggaagagccacctcctgttaaaatagcctggaaaacagcagccgcaaggaagtccttaccagcttccatcacaatgcacaaagggagcctagatttgcagaagtgtaacatgtctccagttgtgaaaattgaacaagtgtttgctcttcagaatgccacaggagatgggaagtttattgatcagtttgtttattccacgaagggaattggtaacaaaacagaaataagtgtcagggggcaagacaggcttataatctcttcaccaagtcagagaaacgagaagccagctcagaactcgtcatctcctgaggcgacatctggttctgcaggcccagtagaaaagaagcagcaaagaagatcagtcaggactcgatctgaatcagagaaatccactgaggttgtgccaaagaagaagatcaaaaaggagcaggttgaaacagctcctcagactgccctgaagactggattacagaaagggtcgacggaccgaggagtgcagggctctgtcagattcagtgacagctccgtctccgcagcgaatgaggaaactgtggactgagattcctgtacaatttcatcccagaaactccagacttgtagtctccgtgcaagatttctttgtcggcggctcgattaaagtttcttttgttttgtattttgtattttgccaatcatcatttattggctattctctggccttggtttcttcttcaagcttttttttttntttttttttntttttttgtaaactaccattaactttaacctgatcaattccaccatggactgttttcgttttgttttaaataaagcatcattaatacacatctgcagggttttgccaaacagcccaaactgtatacattgcaatcattaaaagctgttgttattttttttaatattagtgccgttatcatggagaacagcatgacagctgtcttcagcggtctgtcatttttctagcattttcagaaactcatcggaattggcggtacctgtgtttcccttcgaaagcctctcagtacagcactcctgttcctctgttaaacctccttgttaattcagtgatcttttaggccaaggaaatattttgtggtgatgttctggttccacacaccagcaatgaaagagatagatttgtgtattgtgttttttaatcagcattaacatgggcaggcaccctcacttgtagctgtcaggaagcattcagtgcaaacttgtaggatgggatgtgataacgaggttccagtaacccgagcagtctcccgaggcccacatcttccaccacagaatatggctatacaccaagcgttgctcccacccagcctgttgcggatcttcatggcctcaggagacttctttctccatagtctcttctggactgcacttccaccatagcttgctgggctgacctagaagtgtttgttgtatggaaagtttgggggggaaatctaaaaacacaaaactgtgggtggaaataataagcgtctccttggttccttggtattcaccgtgcctgagctgcacatttcaccgtggctgtctctgcatagcctactgcattagcccaagagattgttgctttgtaactttttgcactattgttttggctggatttgtattacacgttaaaaaaaaaaaatcaacactctaaaaaaaaaaaaaaaaaaaaaaaaaaaaaaaaaaaaaaaaaaaaaaaaaaaaaaaaaaaaaaaaaaaaaaaaaaaaaaaaaaaaaaaaaaaaaaaaaaaaaaaaaaaaaaaaaaaaa

SEQ ID NO: 636 - DNA, 2709 bp, Cricetulus griseus
aaaaatgtgcacagtgttttcagtgccttttgcacagaagagaacattgaacaaagtatttcatatcttgatcaggaactgactacctttggttttccttccttatatgaagaatccaaaagtaaagagacaaagagagaattaaatatagttgctgttttaaattgtatgaatgagctactggtgctgcagcggaagaaccttctggcccaggaaagtgtggagacgcagaatctgaagctaggcagtgacatggaccacctgcagagctgctatgccaaacttaaggaacaactggaaacctcaagacgagagatgattgggcttcaggagagagacaggcagttacagtgacaaaaaacaggaatttgcatcagcttctgaagaatgaaaaagatgaaggtacaaaaattacaaaacattaatagccagtcgggctactcagtataatcatgatatgaagagaaaagagcgtgaatacaataaactaaaggagcggctgcaccagcttgttatgaacaagaaggataaaaaatagccatggacgttttaaattatgtgggtcgagctgatggaaaacgaggctcgtggaggactgataagacagaagccaggaatgaagatgaaatgtacaaacttctgctgaatgactatgagtgccgccagaagcagatcctaacggagaacgctgagctgaagaaggtcctgcagcagatgaagaaggagatgatttctcttctctcgccccagaagaagaaacccagggaaagagcagaggacggcacaggcactgctgttatctctgatattgaagatgaccttggagagctgagcagagagagcgcgtggggccgtctcctgtgacactgtgagagagcagcttacaaacagcatcaggagacagtggaggatcttgaaaagtcacgtggaaaaactcgataaccaagtttcaaaggtccactcagaaggcctcaatgatgaggacgtcatctcacgacaggaccatgaagaagagactgagaaactggaattggagatccagcagtgtaaagagatgatccgagcacagcagcagctcttacagcagcagctggccacgacatgtgatgatgacacaacctcactgcttcgagactgttacttgctggaagaaaaggaacgccttaaagaagagtggtccctttttaaagagcaaaaaaagaattttgagagagaaagacgcagctttacagaagctgcgatccgcttggggctggagagaaaggcgttcgaagaagaaagagccagctggctaaagcaacagtttttaaacatgacgacctttgaccaccagaactcagaaaatgtgaaacttttcagtgccttctcaggaagttctgatccagacaatcttacagtgcactcacggccacggcaaaagaagccacacagtgtgactaatggggcaccagcttgcacatcaaaactggctaagtctcttcctgcttcaccctctacttcagacatttgccagacacgttcctgtgtgtctgaacacaggagttcaaccaatgtgctgaatatagctcctgaagaaactaaagcaaatgagattggaagagaatgcacaaatcagaaatggagtgtgatgtcaagacctggttcacgggaaggctgctacagtggctgctcctcgagttaaacagggtgtatcataaagtcagtcatctaatttaagatggtctgggttgtttgtctggacttcgcgtcttcccccaaagaactgcaatgtgagctattgaaaaggatgcaaaagctttgggagtgtggtagttagtgacagagcggctgggtctgtgacgagaggatgtgtggtgtttggatgagacagaggcaagagtgggcttcctctccaggtattgaaaatagcactttcaggggaccgattattgtaaacattcagtttttgtcccaatgtggttggcaccggaagtttagccttcacttgaatgtatactgtagatttttaacaaagcaagttctatatttattatgtttagtgtgatttgggattacctctttcatatgtttttctgtacatagagatatacatgattatgttaagaggctttaaggtttaaaaatttcacacaacgcttgagtgtagtgtttcatgccaataaaatgttttcagaggcattgtgtttacagatgcgttagggcaactgccacatggcatttaagattttattttaagccatctgggcaatagaaattcaaagccactctgtgaaagctgagttgagataactagaactactaacattacattttcgagatttttaaagcattatattttattttatatatgtgaatgttataatttctaagaggaatattgattatggagtaatgggggaaagacagaaagtatctttgaataacaatatgagggcattggtttaagatatttggatgataaaagataatttaagatagctggatggtgatattttccttaccaaatgggttgtcagtacaggaatatctgtaccagccaggactttatatcattgccaataattttataattaaaaaattttcaactagatactactactaaagaaataagacaatgtaaaaacattgacttttgtaattgagatatgacattctggacgcccttgtgtcatttcgttttcagaacaatcttaggctcttttgtctctg

SEQ ID NO: 637 - DNA, 2708 bp, Cricetulus griseus
ggaagaggtcagggaggaaccactgggctgggctccaagactggctcaatgtccaaacaggagcttgatgatatcctcaaatttggcactgaggaactattcaaggatgaagccacagatggaggaggagacaacaaagagggagaggacagcagtgttatccattatgatgataaggccattgaacgactgactaggaatcgaaaaccagggatgagactgaagacacagaattgcagggaatgaatgaatatttgagctcatttaaagtggcccagtatgtggtacgggaagaagaaatggggaggaagaggaggtagaacgggaaatcataaaacaggaagaaagtgtggatcctgactactgggagaaattgctgcggcaccattatgagcagcagcaagaagatctagcccgaaatctgggcaaaggaaaaagaatccgtaaacaggtcaactacaatgatggctcccaggaggaccgagattggcaggacgaccagtccgacaaccagtccgattactcggtggcctcagaggaaggtgatgaagactttgatgaacgatcagaagctccccgcaggcccagtcgtaagggcctgcggaatgataaagataagccattacctcctctgctggcccgtgttggtggaaatattgaagtacttggttttaatgctcgtcagagaaaagcatttcttaatgcaattatgcgatatggcatgccacctcaggatgctttcaccactcagtggcttgtgagagatcttcgaggcaagtcagagaaagaatttaaggcttatgtgtcactcttcatgcggcatttatgtgagcctggggcagatggggcagaaacttttgctgatggtgtccctcgtgaaggcttgtctcggcagcatgttcttactaggattggtgtcatgtccttgattcgcaagaaggttcaggagtttgagcatgtgaatgggcgctggagcatgcccgaactggctgaagtagaggagaacaagaaaatgtctcagccagggtcaccgtctccaaagactcctacaccttccacaccaggggacacacaacccaatactcctgcacccgtgccgcctgctgaagatgggataaaaatagaggaaaatagccttaaagaagaagagagcgcagaaggagaaaaggaggtgaaatctacagtccctgaggtgactgtggagtgtgcacagccccctgcccctgcccctgcccctgcccctgctcctgcctctgcccctgaggatgaaaagactcctgccgaacctcctgagggagaggagaaagtggaaaaggcagaggtgaaggagagaacagaggagcctatggagatggagcctaaaggttctgctgaggcggagaaagtggaggagaagtccgcaatagacctgacccctatcgtggtggaagacaaagaagagaagaaggaggaagaagagaaaaaggaggtgatgcttcagaatggagaaacccccaaggatcttagtgacgagaagcagaagaaaaacgtcaagcagcgcttcatgttcaacattgcagacgggggttttactgagttgcactccctttggcagaatgaggaacgggcagccacagttactaagaagacttatgagatctggcaccgccggcatgactactggctgttggctggcattataaaccacggctatgcccgatggcaggacatccagaatgatccacggtatgccatcctcaatgagcctttcaagggcgaaatgaatcgtggcaactttctagagattaagaataaatttctggctcgaagattcaagctcttggaacaagccctagtgatcgaggagcagcttcgaagggcagcttatctgaacatgtcagaggacccctctcacccgtctatggcccttaacactcgttttgctgaggtggaatgtttggcagaaagtcaccagcacctgtccaaggagtcgatggcaggaaataagccagccaatgcagtcttacacaaagtcctgaaacagctggaagaactgttgagtgacatgaaagctgacgtgactcgactcccagctaccattgcccgaatccccccagttgctgtgaggttacagatgtcagagcggaacattctcagccgcctggcaaacagggcaccagaacctcccccacagcaggtagcccagcagcagtgaagaaagacccagagtgatgacaccacctccaccactgagcagtgaccttcctcactctctcttgtcctggctgccccctgggggcctgggagatcctcgccttccttctgcccatcttctgagttgtaaaggagcagccctgtgcactaggggcagggagggagggaggggggacagtggcccccttcctgctggagagacaagcagcagtagtgcggcgccatgtgcaaggagctgcgggctggctgccttctggaccctggcttctccccaccgtgcgcctgttacaaactgttgtggattttgccaggcttgaagaaaatgatctgaatttcttcctctttttggttttattttgttggtttactttgtgttttctccttttgggggttattcagagtgggccgggccctgggcaagacacagctacctctgttggcatctttttaataccaggaacccagcggctccagccactgagcggctaaaataaagttgggggaaaaaaaaaaaa

SEQ ID NO: 638 - DNA, 2708 bp, Cricetulus griseus
atggagagtaataaatcaacacagccagtgactgcacacaagaaagcccctacgtagcggtatgccttctcaatcactccttgtgtccacttctagtactccgacacctgatcatgttatttttcatacttctgactttgaaattatctggaataaaagtagcatgtctgatgatgacattgactctgaaagatgaattaaaaatgatgattgcaaaagaggaaaacttacaaaaactaggcattccttagtaaatgaatctgaaaatgatccttttgaagttgtaaaggatgattttaaatcagatattcacaaacttcattcttcagccaagttaggaaatgactgtgaatatgactccagtgatacagatgaaattatcgcaatgaaaaaaacattgttaaggtcaaaaacagtacagaatcttcacaaccagaacagcctataagcaagaaaagttcttttaaaaagatagagccttctaacgattgtaaagtacaaaaactaaaagacaacaagaatcagccctgggtcatggagtaaagtgtttgaatcccaaatttccacctgactccaacgtcagtgactgtgaagaagagtccgaggaagatgaagaatataaagctttgatgaaaactgtccccgggtgaatctcactttggctgatttggaacagttggctggcagtcatcagaaggttccaggaagatgatgagagtgatgactcacaaaacatcaatcagtgcatatttgacacaaattccaagactcctaggacttcctatgacctgcacaatggccgacagtgcatttgtcctgaggatattgtggcctctcttttagaggaagaggacacttacagcaaacaaaaaccagaggaaaccactttaaagccaaaattccaggccttcaagggaataggcagtctctatgcaaaagagtcagtggacaaaactttgaaagagactgttgcctttaacaatatcagtgaacatcagagttccttgaaacatgaagatcataatagaatttttatagaaaatggatccaagtgtgctaatggctcatcaagcaaactgacttcatgccaacctgcaaagaaggtgaatagcccaaaccacattcagcctccaaagagacagtttactgttgagagccagagccatgaagtagtgtcctctactagttttgacaaggaaagtaaaaatcctccctcatgtctgttgccattaaaaggtaaaaagtccttaaatcttggtacaaagagtcacaagatagactgtgacagagacacttgccatctgcctgaaagtagaaaagcttcagagaaagagggcactgatacaagcaatattacatcttttgagaaaccacggaaggtgtgtctcagggaagataatcagaaaagcacagctagtttctcactttctgttagtaacgcatcatgtgtgagtgcaaaggataaacatgctgaagacaaccagaagcgactagccgccttggcagtgtggcagaaagctagagaagtgcagaaaaaactggttcacagtgcgttggcaaatttggatggtcatcaagagaacaaaaaaacacacattgtctttgcttctgataacgaaagtgaatcggaagagacacctactcatgaacaaaataattgtccaggaaaggaggtggtgaaggagtctgtggttaaagcatctgggaagttgtttgacagcagtgatgatgaagaatcagattccaaggaggacagcaccaggttcaacattaaacctcagtttgagggcagagctggccagaagctcatgaatttgcagtctcattttggaagtgatgagagattccgaatggactctagatttttagagagtgacagtgaagaagaggagaaagagttaaatgaaaataaaactaatgaagatgagcttgctgcagaaaaaaagaaaacattgaatgttgtgcaaagtgttttgaatatcaacttaaacaaccctactagcaaaggatcagtgactgctaaaaaatttaaggacattgtacattatgacccaacaaagcatgaccatgccatttatgaaagaaaacaagacgataacgaaaaagaaagtaaagcaagacggaagaagaaaagggaagaagctgagaagctgcctgaagtgtcccaagacacgtattataacatcgctacagatttgaaagacatattccaaaataaggacacaaatgaaaaggaagaagacctgccctggaacgagggttgcagtggagaggagactggggacgtcagtgatgctgcaaacctgacaagtggggcagagcagaccagcgggttcacattctctttctttgattcagacactaaagacataaaggaagatacctatagaatcgaaccagtgaaacgtgggaagatagtctgtcaggaagatccccgcttccaggatagtagttcagaagaagaagatgttactaaagaaacagatcacagaaagcccagtcctggagaagcatttcctgagaaagagaccacaagatttttctttttcactgagaatgatgacagacttcgtggttctaacttattctggtgtggtgtgggaagtagtattagcagaagttcttgggaagcccgaacaagtagtctccttttggattgtcggaagaaacataaagaagcgaaaaggaaggtgaaagcaaattagcca

SEQ ID NO: 639 - DNA, 2706 bp, Cricetulus griseus
ctgcatttgatggttcaactctgcaaagaccggtttgaatacctttccttttctcccaccacaccaatgagcagccatgggagagtcctgtctctgttgattgctatgctgctctcctgctgtggattggcagttgtctgctgtgtcacaggctatacccatggcatgcataccttggctttcatggctgcagagtctcttctggtaacagtaaggacagctcatgtgattttaagatatgtaattcacctctgggacctcaaccatgaagggacttgggaaggaaagggaacctatgtgtattacactgattttgtcatggagctcactctcttgtccctggacctcatgcaccacattcacatgctgttgtttggcaacatctggttatctatggctagcctggtcatctttatgcagcttcgttacttgttccatgaggtgcagcggagaatccgtcggcacaagaactatttgcgtgtggtaggaaacatggaagccaggtttgcagttgcaactccagaggagctagctgtcaataatgatgactgtgcaatctgctgggactccatgcaggctgcaaggaaacttccctgtggacatctttttcacaactcctgccttcgttcttggctagaacaagacacctcttgtccaacatgcaggatgtctcttaatattgctgatggtagtcgtgccagggaagaccatcaaggagagaacttggatgagaacttggtccctgtggcagctgcagaaggcaggccccgcttaaaccaacacaatcacttcttccactttgatgggtcccggattgcgagctggctgccgagtttttcagttgaagtgatgcacactaccaacattcttggcattacacaggcaagcaactcccagctaaatgccatggctcatcaaattcaagagatgttcccccaggtcccatatcaccttgtgctccaggatctccagatgacacgctctgtggaagtaacaacagacaacatcttagaaggacggattcaagtaccttttcctacacagcggtcagatagcctgaggcctgcactgaacagcccagtggaaaggcccagcactgatcaggaggagggaggagcttctcttcagacggagcgtgtaccactggacctcagtcctcgcctagaagagaccttggacttcagtgaggtagaagtggagcccagtgaggtggaagactttgaggcccgggggagccgcttctccaagtctgctgatgagagacagcgcatgttagtccagcgcaaggatgacctcctgcagcaagctcggaagcggttcttgaacaaaagttctgaagatgacatggcctcagagagactcctcccctctgaaggcacgtcctctgaccctgttaccctgcgccggaggatgctggcagctgctgctgagcggagacttcagaggcagcagacgacctagtgcttcctcatcctcagcctcctgtccagccctacctaccggaagaggcctgtcccggttttgcctgctgtgtggagacccgcgactgcattgctgctgcataaagcatgtggtcttaatagtgtgtggacagccgacaactttaatccttgtaatactttctatgtggcatttctcttccccttagaaatactgcacatttgaactctaggcatgacctcttctggtgttgactggacttcttgggagtggggacaagcaaaaggaagtaggcacttgggcactcacctgcctgcagcaggtagtttcaatttctgctttggtataagccatggcagatgttaagtgaggtcagtaccacaggctcctggacttctagaccagcagggcatcatgtataaagaactaatttggtacctggagcagaaagggaaagctcagggctgcagaaggaggagacccttttctgcccttaatattcaggaccgacctgagccccgatccacagctggctttacttccgttcactctggtgctcctgcatcacataagcttgccccctttggttatggttttgattccttggtcaaccctgttaggctatgctaaacatatatgggtttgatccttggataggtatgggcctgcaaggcagggatgttttaggggacattgctgaagtgtaataccttatgtatctttctcccccagagcccttcatttccctgcttttgttcctgtgggtctcattaaacagaaagggaagatgttgaataatccacatgcctcaagcagacttggtcctggattttctcaaattctccacgtatttaaggatttgaaacaacgcaatcataggttacatagttttatgtcccattggattttttttttttaaatgtttgaaaacatagttttatggtagtccttttgggaagaatccagtattatctaaaattattggcaaagttaaatgtattttacatacctggaagtttttagaatgttgacaagtaattgaagaaagggcaatagatgaataggcagagtaatttatttcaataaatcttccaaaagccttaccttgaactgctgttagttcaattcctgtgtagtttttttttttttttaatctgttttgctgagagcatagtgatttgtttttattgtaaagcaacaataataaaaaggcaacctcttgtagtgtgttgtctttccatgctgcacatgaaaataaaggtgaag

SEQ ID NO: 640 - DNA, 2705 bp, Cricetulus griseus
ggaaggcagagcggcgggagaggagctcgggctccgggtctccgctgccaccatggccaccgtggacctggagaagttgcggatgtcgggggctggcaaggccatcggagtgctgaccagcggtggcgatgcgcaaggtatgaatgctgctgtcagggctgtgactcgtatgggcatatacgtgggggccaaagtcttcctcatctacgagggctacgagggccttgtggaaggaggtgagaacatcaagccagccaactggctcagtgtttccaacatcatccagctgggcggcaccattattggcagtgcccgctgcaaggccttcactacgagagaaggacgcctggcagcagcctacaatctactccaacacggcattaccaacctgtgtgtcattggtggggacggcagcctcacgggtgccaatgtcttccgtagcgagtggggcagcctcctggaggagctggtgaaggaaggtaagatctcggagagcacggctcagaagcatgcacacctgagcattgctggactggtgggctccatcgataatgacttctgtggcaccgacatgaccatcggcacagactcggccctgcatcgtataatggaggtcatcgatgccatcaccaccactgcccagagccaccagaggaccttcgtgctggaggtgatggggcgtcactgcggatacctggccctggtgtctgcgctggcctcaggggctgactggctgttcatccctgaagcaccccctgaggatggctgggagaacttcatgtgtgagaggctgggtgagacgcggagccgcggatctcgattaaacatcattatcatcgcagagggtgccatcgaccggcatggaaagcccatctcgtctaactacgtgaaggacctggtggttcagaggctgggctttgacacaagagtgaccgtgctgggccacgtgcagcgaggagggacgccctcagcctttgaccgagtcctgagcagcaagatgggcatggaggctgtgatggcattgctggaggccacacccgacacaccagcctgtgtggtcagcctctccgggaaccagtcagtgcggctgcctctcatggagtgtgtgcaagtgacaaaggaagtgcagaaggccatggatgagaagaggttcgatgaggccatccagctccgtggcaggagcttcgagaacaactggaaaatttacaagctccttgcccaccagaaggtctctaaggagaagtccaatttctccctggccattctgaatgtgggagcccccgctgctggcatgaacgcagctgtacgctcagcagtgcgcactggcatctccgagggacacacggtgtacgttgtgcatgatggttttgaaggcctggccaagggtcaggttcaagaagtgagctggcatgatgtggcaggctggctggggcgcggtggctcaatgctggggaccaagaggacgctgcccaagctccacttggaggccattgtggagaacctccgcacctacaacattcacgccctgctggtgattggcggctttgaggcctacgagggtgtgctgcagctggtggaggcacgggggcggtatgaggaactctgcattgtcatgtgtgtcattccggccaccatcagcaacaatgtgcctggcactgacttcagcctgggctcagacacagctgtcaacgctgcaatggagagttgtgaccgcatcaagcagtcagcgtcggggacgaagcgtcgtgtgttcattgtagagaccatggggggctactgcggctacctagccactgtgacaggcattgcggtgggggctgacgccgcctacgtctttgaggatcctttcaacatccatgacttaaaggctaatgtggagcatatgacggagaagatgaagacagacatccagaggggcctggtgctccggaacgagaaatgccacgaacactacactacagagttcttgtacaacctgtattcctcggaaggccggggtgtgttcgactgtaggaccaatgtgctgggccacctgcagcagggtggtgctccaactccctttgaccggaactatgggaccaaactgggggtgaaggccatgctgtggatgtcagagaagcttcgcgatgtctatcgcaaagggcgggtgttcgccaatgctcccgactcagcctgtgtgattggcctgcggaagaaggtggtggccttcagtcccgtcacagaactcaagaaagatactgattttgagcatcgcatgccccgggaacagtggtggctgaacctgcggctgatgctgaaaatgctggcacactaccgaatcagcatggcagactatgtgtctggggagctggagcacgtcacacgacgcaccttgagcatagacaaaggtttctaaggccgccatcaccagtcttcctgctttcccggactctcccctccagtgccagtcatggatcccagcactgaggggaactcacaaggaactcggagcccatggctggagggtggggtctggggtctagtgtgctgctctggggctcttcactcccctcgccacctctaggatagagcacccggggagccctcacctccagccctggctgggcaggcccacattgcctctccctcactggccagctggctgcctcaccacatggactaaaaagagccttttttttttagaaataaattcacctgactagagc

SEQ ID NO: 641 - DNA, 2705 bp, Cricetulus griseus
agggagaaactgcctacatccgggttaaagttgatgggcccagaagtccaagttatggaagatctcgatctcgaagccgtagtcgtagcagaagccgtagcagaagcaacagcaggagtcgcagttactccccaaggagaagcagaggatcaccacgctattctccccgtcatagcagatctcgctctcgtacataagatgattggtgacactttttgtagaacccatgttgtatacagttttcctttactcagtacaatcttttcattttttttaattcaagctgttttgttcagaatgggctaaagtgttgaattgcattcttgtgtaatatccccttgctcctaacatctacattcccctcatgtctttggtaaattgtattttaagtgatgtcatagacaggattgtttaaatttagttaatttccatgctcttcagactgtgatattgtgtaaatgtctattctgctctggtttgtgtgaaatgggatgttggggtgtttgtggttatcttacttggggaagttcttatgtttatcttgcttttcatgtgtctttctgtagacatatctgaagagatggattaagaatgctttggattaaggattgtggagcacatttcaatcattttaggattgtcaaaaggaggattgaggaggatcagatcaataatggaggcaatggtatgactccaagtgctattgtcacagatgaaattggcagtattgaccttatactaaaagacaagggttaaaatttttatctaccttaagacacttgcaaacatcttatgcagttatctttagctacaattgctttctaaaccttggcaattgtggcagaattgcccattttgtaacaattatttgctcccttcccccctttttgttttaatagggactaatgtgggaagaatggctaatttgtcacagtgcttagttacaactgttaatgtgtggcctgctgttggtgtacatgtgggtacagggtgtctatttccaaacagagtataatatcaatactgctaaatctgcatgtcctctgtgtgactgatagagcgttgttatttcatttttttaaagacaaaatgacagcaaaatagaattccaatgtattagtgtagataatctagttgggagtgctttaagtctcaccttcccttttaatattcataattgactcatgtttaatacactttaatttacaagctaaattgcagatgggagcaatagatttagtttagacttaggtgggtagcaataccagtaaacttcaattacataactttgcaaccacaaaacctgtgatacctgtacagtaacaagtgttggcattatcagttgaactgtaaatataaattgcttcttcctgttagtctctataatgattaagtttctaaagtttatctaaacaccatacagaaacttgttttggggaatttgatagttattgatgtacatctgttaaactgatgacagacataactcatcattccccagaaaccttttttgattacagtatctaacattttgcctcctcttttttggttttgctggttataaaggtttggattggagagggctcactggatcccaatccttggagctggatcattggattcaaatcataatgtggataggatagggaggatgaattaccaggattcatggagcgggatcagattaccaggaacataggagtggattccttcctgccccaaccaaaccgcattcgtgtggatttttttttttcattcaacttaattggctattccaaagagttttttttcctatttttgacgattggagcccttaagatgcacgatggaattgtgttttgcattttttggtaaaaggagcaaagcgaggacctggagataatacgctggagcaatctccttggaaggattcagcacgagtagatggtaaacatttaaaggggaaagggggggtttgtttaaaatagtaaatcagtaagtcacttctaaatttaaagaacaaaattggagttgaagaataagtaggtttccaattggctattgccgttttttctttgaaaaataaacattttttaaaaaacgatgcatggttgtcctttttcctcttcatgtaaaagtttactgggtaactagtgtatcggttatttctttaaattgacaatattctgattcttgtttgtgtgttagtaaattaaagataccattttggaaataaaaatactaccttgatttccacccccccttctctgttcccttaggatatttgtagggaccccatgattagtttttctaaccaagaaagcacttaaatctctttaagcaagtactttgcataacatctgattgaataacccaacttgctgttcagctcatcctactggagacaaaggtaagaaatattttctgatacctagtttgggatctggattttaagaactaaagtttggaatgaataattgctctgtctatgaaccatgcttttgtgggcaggtgctattttcagttttctgtggtcaaggtcaatttttggtgtttgcctttttgctttgtatataaaatttgtagttaaattacaaatgaaataaaatatgtatttcaatagtattaaaaggaaagaaagcattagactgagttctgttgttaaacacttgtggcttatttctactatggtttgaagacagattgacaattcacaattctgaaat

SEQ ID NO: 642 - DNA, 2704 bp, Cricetulus griseus
ctcttggagaggtcactccggagacggcggagcttttggggcgtgggggtcggtggcaggatgtggcgcgtctgtgcgcggcgggctcagagtgcagtccccagggccggactcggggctcggtgggcagtcttgaaggaaggccccggggccccgtgcgggaggcccacgggccggccccgctgcggctcgttgcagcagcgggaccccgagctacggggtccgcttgctgtgcggctggagctccggctcggacaccgcaccgcataaccgcttactgcggcagctcctggggtcgcccggccgccgctcttacagcctccccccgcaccagaaggttccattgccttccctttcccctacgatgcaggcaggcactatagcccgctgggaaaaaaaaagaaggggaaaaaatcaacgagggtgatctaattgcagaggttgaaactgataaagccactgttggatttgagagcttggaggagtgctatatggcaaagatccttgttgctgaagggacgagagatgttccaattggatccatcatctgtatcacagttgggaaggctgaggatattgaggcctttaaaaattatacattggattcagcagcagctactaccccacaggcggcagcctcagccccagctccagctgcttctgctgcatcagctgcagcttgtgcaaaggctcctggtagttcctatcctcctcacatgcaagtacttcttcctgccctctcccccaccatgactatgggcacggtccagagatgggaaaagaaagtgggtgagaagctcagtgaaggagacttactggcagagatagagactgacaaggccactataggctttgaagtacaagaagaaggttatctggcaaaaatcctggtcgctgaaggcacaagggatgttcccctgggaaccccactttgtatcatagtagaaaaacaggaagatatagcagcctttgcagactacaggccaacggaagtgaccagcttgaagccacaagcaccaccacctgtcccaaccccggtggcagctgctcctcccactgcccagcctctagcacctacaccctcagcccttcctgctggaccaaagggaagggtgtttgttagccctcttgcaaagaagttggcagcagagagagggattgacctcacccaagttaaagggacgggaccagaaggcagaatcatcaagaaggacattgactcttttgtgccttctaaggctgctcctgctccagcagctgccgtggctcccccgggtccaagcgccgcaccagctcctgcagcaggtgtcttcactgatatccccatcagcaacattcgccgagtgattgcacagaggctaatgcagtcgaagcagactatacctcattactacctttccattgatgtaaatatgggagaggtgctgttggtacggaaggagcttaataagatgcttgaagggaaaggaaaaatctccgttaacgacttcatcataaaagcttcagctttggcttgtctgaaagttcccgaagcaaactcttcttggatggacacagttataagacaaaatcacgtggttgatgtcagcgttgctgtcagtacccctgcaggacttatcactccaattgtgtttaatgcacacataaaaggactggaaaccattgctagtgatgttgtttctttagcatccaaagcaagagagggcaaattacagcctcacgagtttcagggtggaacatttacaatatccaatttaggaatgtttggaattaagaatttctcagcaattattaacccacctcaggcctgtattttggcaattggtgcttcagaggataaactcgtcccagcagataatgaaaaaggctttgatgtggctagcatgatgtctgttacactcagctgtgatcatcgagttgtggatggagcggttggagcccagtggcttgctgagttcaaaaagtaccttgaaaagcctataactatgttgttataatttacccaagaacttctacactgtctctgctgacattatatttatatgttattaaacagctggttcttttaaagtttcactagttaattttattatggagtctgtccagatgatttatttgtaataggcattaatgaatctttttaaaatgccagttacaccccaatattgtacccctctaaaattaaacatcaatttaaagctgtatacccctagtgaagggacatgtggcctaactcttcagtataaagtccttcctagggatacaggaggggtaggttcaaccaactgttatttttatatgaatctctaaataaaatagctttccccttcttagataaaagatataagccaacttcttggtataaatgagaatttatgtatttatttataaatgatttcaatctataatttgaaaattctgcagtttcgtccaaataaaagaacatgcttattgaaatgaacaagttgcagaagtaaaattttccttctaagatgaactggatgttgatttaaatgatcccaattaccaaatgtcattactcaactggagaactctgtggaatagagtatggaatgtatatgggagaaatgtacatatgtaatttatagttttagagttgtatatgtgtcaaaatccagttttcaccagatcctgcctgagaagaaatgggagtgaggatgttggtgggcagttggcagtgcta

SEQ ID NO: 643 - DNA, 2704 bp, Cricetulus griseus
cggcccggcctatcttgtgggaagagctgaagcaggcgcttttggctcggcgcggtccgctgcaatccgtggaggaacgcgccgccgagccaccatcatgcccgggcacctacaggaagggttcggctgcgtggtcaccaaccgattcgaccagctatttgacgacgaatcggaccctttcgaggtactgaaggcagcagagaacaagaaaaaagaagccggcgggggcggcgttggtggccctggggccaagagcgccgctcaggccgcggcccagaccaactccaacgcggcgggcaaacagttgcgtaaagagtcccagaaagatcgcaagaacccgctgccccccagcgtcggcgtggctgacaaaaaggaggagacgcagccgccggtggcgcttaagaaagaaggaataaggcgagttggaagaagacctgatcaacaacttcagggtgaagggaaaataattgataggagaccagaaaggcgaccacctcgggaaagaagatttgaaaagccacttgaagaaaagggtgaaggaggtgaattttcagttgatagaccaattattgaacggcctatccgaggccgaggtggtcttggaaggggtcgaggaggccgtggtcgtggaatgggccgaggcgatggatttgattctcgtggcaaacgtgaatttgataggcatagtggaagtgatagatctggcctgaagcatgaggacaaacgtggaggtagcggatctcacaactggggaactgtcaaagatgaattaacagagtctcccaaatacattcagaaacaaatatcttataattgcagtgatttggatcaatcaaatgtgaccgaggaaacacctgaaggtgaagagcacccagtggcagacactgaaaataaggagaatgaagttgaagaggttaaggaagagggtccaaaagagatgactttggatgagtggaaagctattcaaaataaagaccgagcaaaagtagagtttaatatccgaaaaccaaatgaaggtgctgatggacaatggaaaaagggatttgttctgcataaatcaaaaagcgaagaggctcatgctgaagattcggttatggaccatcatttccggaagccagcaaatgatataacgtctcaactagagatcaattttggagacctaggccgcccaggacgtggtggcagaggaggacgtggtggacgtggacgtggtggacgtccaaaccgtggcagcagaactgataagtcaagtgcttctgctcctgatgtagatgacccagaggcattcccagctctggcctaactggatgccataatacaacactggttcctttgtggaccctcctgttcaaagcttttgcatgcttaaggatcccaaacaactaagaattaaaaaaaaaaaaaaaaaaaaaggactgtcattcataccattcacacctaaagactgaattttatctgttttgaaaacgaacttctctagctacacagaagtaacaaatatgttagtcagttttgtatttagaaatgtattggtagcagggatgttttcataattttcagagattatgcattcttcatgaatacttttgtattgctgcttgcaaatatgcatttccaaacttgaaatataggtgtgaacagtgtgtaccagtttaaagctttcactcatttgtgttttttaattaaggatttagatgttccctcaattacaagccggttttaaatattagccaaaatactggttttaatatctgctttgcgttttcacacatggtcagctgggacatgtaaacttctgatttaccagattttatgcttcatggaatactaaccactatgtattttaactttatttttatttgggagttggcatttttttccccacatcttatgatagttgatatatactaaatctttatacagaattatcagtacttgaatgaattcaaaacacattggtttattaactcttgactcatgcatggtttattaggttcaaattatacctgattcacctatatttacttttaaaatgtgtggcttccccattttaaaagtagaactaaacactgcttttggaacttgtgtaagctacttcttgttgacagatatagcctgtgttcagtgcaatagttctgtgggtgtgggttttatcttctctccaacaaagtgggtggagtaagttaatttggttaattcctaatagttaaacttgtgtaaaataagagcctggccatttggtatttgtgtatgaaaggcccacaaatcaagagggttatctgtaatcaacaatcttcttgatttagaagaatcaaagggcactcattggttagtatgctgagatggaaaactatctttttggtttgttttggagagagattattgcatattccttgtgattgttatttttataattaccagaaatgattgatgacatagaaaagatgttgtacttagtttgcaagtaaaatgtaagtattttgtgttagatttttaaaaacatcttaagagcattagcaggttgaagaaaccaggtagtaaaaattaaaaatggaaagctgccagaaccttactgatgctgactttaaaggtaagacagtgcaggcacatctggacaggtggcccaacatgacctaattgctgtagtacacctatgatgcatgccattttgcttccctacccacactctctgggtgctgggtat

SEQ ID NO: 644 - DNA, 2703 bp, Cricetulus griseus
  modified_base (2696)..(2696): a, c, t, g, unknown or other
catgtgggctgcaggctgcatctttgctgaaatgctgactggtaaaaccctctttgcaggtgcacatgaacttgaacagatgcagctgatcttagaatctattcctgttgtgcatgaggaagatcgtcaggtagcttctcagtgtgattccagtttacattagaaacgacatgactgagccacacaaaccgctaactcagctgcttccgggaattagtcgagaagcactggatttcctggaacagattcttacgttcagccccatggaccggctgacagcagaagaagcgctttcccatccctacatgagcatctactcttttccaacggatgagccaatttcaaaccatccttttcacatagaagacgaagttgatgatattttgcttatggatgaaacacatagtcacatttataactgggaaaggtatcatgattgtcagttctcagagcatgactggcctattcataacaactttgatatcgatgaggttcagcttgacccaagagctctgtctgatgtcaccgatgaagaagaagttcaagttgatcctcgaaaatacttggatggagaccgagagaagtatctggaggatcccgcctttgacactagctactctgccgagccttgctggcagtatccggatcaccatgagaacaagtactgtgatctggagtgtagccacacctgtaactacaaaacaaggtcatcgtcatacttagataacttggtgtggagggagagtgaagttaaccattactatgagcccaaacttattatagatctttccaactggaaagaacaaagtaaagaaaaatccgataagaaaggcaagtcaaagtgtgagaggaatggcttagtcaaagcgcagatagcactggaggaagcatcccagcaactggcagagaaggaaagggagaagagccagggctttgactttgactccttcattgcaggaactattcagcttagttcccagcatgagcctactgacgttgttgacaagttaaatgacttgaacagttcagtgtcccagctagaattgaaaagcttgatatccaagtcagtgagccgagagaagcaagaaaagggaatggctaatttggctcagttggaagccttgtatcagtcctcttgggacagccagtttgtgagcggtggggaggaatgtttcctcatcagtcagttttgttgtgaggtcaggaaggatgagcatgtggagaaggagaacacatacaccagctatttggacaagttctttagcaggaaggaagattctgaaatgctagaaactgagccagtagaggaagggaagcgtggagagagaggacacgaggcagggcttctgaacggcaatggggagatcctcctgagcaagcagctagagtccataggcaccccacagttccacagtccagtggggtccccactcaagtctatccaggccacgttaacaccttccgctatgaaatcttcccctcaaatccctcacaagacgtacagcagcattctgaaacatctgaactaaacactcagcagacatttctttgttcttcatgaaatgtgttgtgtctttttttatcactaatgttttaagtctttttttttttacttgaatcagaaggtgtcattaatttgcaaggatttttttcttagttctcagtttgtaaaatgcagacttttttctacatgtgcgttagttttcatttgaactggcatgtcatttgcacacacacacacacacacacacacacacacatacacaaagaatagagcaaaacaatgcagtgcaggaggagatgatgcgctagggtgaattctctagacattctctagaccagtgacctgctttacaggaaacaaaaccttgccttgaaacttacacagtgagactgtacataattgcatgaaaagatctatttttttcctgaaacatttttcattcattagtattttcaagtttttcatactgtacacatttcttaagacacatgataccagcagcaactgaaaacgaatgccgaatttggtacacatgtgttatctacctcaaggtaacaaaagtatgtggcgaaacataaaccacccatagtgctccacggcatatgcacttctatctagccagcgtttatcgtagtaaactattgagactcgttcaccatttataaatgtcctggtattcattctttatagtgaagtgttaaatacatcacatcttatttatttttagcaaatcagtatattttctgtatttaattataaaagttaacttagttttaagtttatttgcaactgccctttttttccatttggcactatggtttgttgcctgccaagctgatgacttgatgtcggcttgtcctgaggctgtccatgtacgttaagtaaagtactcactgtgtataggaatctgtattttggaggtgcttgatctatctacaaagaaaaattaggaatttattataaaatgctcctagaagtcttaattgtgtttattttttaaaaacttgtaatgttagacttgtgtgcatggaagtaattaaggtacatcattattgtagtttaaacattgtacatgataagcctcccccctcccgtttttactgtatgtttttattgaatgatctattccccatccctaggcaagcatgaataaacttaggttaaatgtaaaaaaaaaaaaaaaaaaaaaaanaaaaaaa

SEQ ID NO: 645 - DNA, 2700 bp, Cricetulus griseus
  modified_base (402)..(402): a, c, t, g, unknown or other
taataaatgaaggagagcattcgtccagcaggatccgctgtaacatctgcaacagggtatttccgagggagaagtcactccaggctcacaaaaggactcatacaggtgagagaccgtatctgtgtgactatccagattgtggaaaagcctttgttcagagtggacagctcaaaacacatcaacgtcttcacaccggagagaagccttttgtctgttcagaaaatggctgcctaagcagattcacccatgcaaaccgccactgtccaaagcacccctatgccaggctgaagagagaagagccaacagacacactcagcaaacatcagtctgcagacaacaaggctgctggagagagcaacgcacccccacctctgaaggcaagctagttcagaaggctgatcnggagcagcaggatccgatggagtacctccaatctgatgaagaggacgatgagaagagtggcgcccagcgccggctgcaggagcagcgagagcggctgcatggggccctggcactcattgagcttgccaacctgacaggggcaccactccgccagtagccccaacactgactcttcactgtacaaaagtactgcccagcatacttacaaagtagatccttgggcataagctaagcaccttatttgcttatcataggctgctattctgtagaaactcatgaagaatgttgttgcctcagacatggggtgagacaagtttaatgcattcattggaagcagttctcacaggaagcactttgtgaataagacatttgtatgaaaagacagattggtacaaatagccaaagaaaagttgaaatagattatttataagatcattttaaacagtgtatgttagtatgtgtgacagtactgtaaacactgaagcgggccgtgtgagacatatgtataagatacatatttttaaattgcaaaatagcatgcccaataagtctagagaaatggcaggccaactatttggaaagatgctataagttatggacttggaagaaaatagatatttgaggatcttggtaaggggtagtagttgagagttttttaaattgttgtaaaatgagtcttaccccatttttctgggctttttaactcactgtaatgctgacgcttagaaagcactcgtcactcagcctgttgactggggacttttgcacattgctcagctgctggacctgagtgattaatcttgcaaagtctaggtaacctggcaactggtgcacgtgtgtgtacaccagtgagctcctttttgggccctgtaatgagattggcacttgtgtttatgttaataaaagggacatctgcagggttgtttgtagtgaaatgttctaggtcttttgatggtaaacactaaattttaattgtactgcttgtttagctattattagtggatggaagcctccatatttacattttcagtgcatattgccacctttctgcttcacttcagaataacatgccaagcttattttgtgttctacgtaaatttaactatcagttaaacacttgagtaaatattagctactcaaatatgcaggcttctgagatagttttaactgcaagtgtgctgtctggtggttcaaaaccattttctccaaatagatgaagttgtggaacacacgtagtgtacttaggcatggacagagtccagggctgagcatccacctcctctgtggagtcaggaatctcacttgagcttttgttaaaaggtagatgaaattatatgcagaacatggtgatttagactccttaattggagacttcaaagtaataggaggaaggtgggctcctcagtgcctttttctttgagttgagatagcaccctacaagtttagattacacattatagagaatgtaggctatcagaaatctctgtggttatagtacacaggtagttaattgtgtgccttggaggggggaggtaaggagatgtcttgagaagcgctagtgtgaaactgaagaagtggtagttaaaataatgtgtatgacgaggacatactttaaaaaatggaattcctctgtaaagtcaattacagatctttaggggtctttttttgtaataacagaatttatatttgtaatggtctaaaaattttatttgtagtctggtatgtagaattttaacttggagcacttataagtatggtaagagacccatagcatatgaattttttggtttgggggttcaacattttctctagaatttttcctgagatgaatgggagtgtatggattgaagtgcaacactcatcagtactgggaagttcaaaatctgatcaactcaccttatggacagcagtacaatttgaaaaatgcaattagccaattcacagatgacaaagggtcttcaaaaagtaagggtttggtttctttctccagatgacttttgtcaaaccattacagttacattcccaagagttttttatttgtatgattggacagtttaagaaattattccaactgcttaccattggccatgttttaaaaggttcttttttttttttaatataagctatgtacttggacaaaatacattggcatctaaaatttgaggtgtgttatgactgctttttgttttaaaaatgtggttacattcagatttttgaagtgttttattgcttcatatggctaagttgtagtttggcagagttaacagcatattaataaacatgctgtaatgttaaaag

SEQ ID NO: 646 - DNA, 2700 bp, Cricetulus griseus
ggcaaccctgaagtcctgaaagacatgggaagagctcatcaacttcagcaaaaggaggaaagtggcagagataacgggggagatccagcagtaccaaaaccagccttactgtttacgggtggagtcagatatcaaaaggttctttgaaaacttgaatccaatgggaaatagcatggagaaagaatttacagactatcttttcaacaaatccctagaaatagaaccacggaaccctaagcctcttccaagattcccaaaaaaatacagctatcctcctaaaaatccccctgggtgtcccgtcccgtacaaacccaagaccaggaaccatgaggcaccccacaccctctgcagcaggagccaagaaaaattagttacagcaggatccctgaaagtgagactgaaagtgcagcctctgcacccaattctccaagaacgccactgacacctcctcctgcgtccggtgcttccagtaccacggatgtttgcagcgtgtttgattctgaccattcagcaagcccttttcactcaagatctgcttctgtctcatctataagtttagccaagggcactgatgaagtgcccgtccccctcctgttacccctcgaagaaggccagaatctgccccagcagaatcatccccatctaagattatgtctaagcacttggacagccccccagctattcctcctaggcaacccacatcaaaagcctattcaccaagatactcactctcagatcggacctctgtatcagaccctcctgaaagccctcccttgttaccaccacgagaacctgtgaggacacctgatgttttctcaagctcaccattacatctccaacctccccctttgggcaaaaagagtgatcatggcaatgccttcttcccaaatagcccttctccctttacaccacctcctcctcaaactccttctcctcatggcacaagaaggcatctgccatcgccaccgctgacacaggacgtggacctccattccattgctgggcctcctgttcctccacgacaaagcacttctcaacttatccctaaacttcctccaaaaacttacaagagggagcacacacacccttccatgcacagagatggaccacctctgttggagaatgcccattcttcctgagctcctctgtctgggatgtatagtttcctagccccaaatccactgctggcaatggatgcactgaacatgccagcactgaggagttgaagtgaaaactccaaacactaatgactctgattcaagatacagtataagacaatgaatgaattttaatgtacacttcattacagaataagacggtattccagcttagaatgtggagactgattgaagctgaaagccacgtgaagggacttttctggccaataggcaagagtcctcattttgtgaagtaatctttatcattaaagggatggaaaacagcctaatgtccaacaggcccatatgttgacagtttttgtaaatcaaaatatcatgcactttttaaaaaaatcttaaacagggatcgtatccgcctttgttttcctttgctttattcttctattttagaatattttcataaacatcattcagaggactgtgagaaaaggctgcagtacctgaccttgttgaaatcaaggcccagcattgtactgcagtcctgtttacagattattacaatgaattgaatgggtaccgaggcttcaccaaagaggtactttttgttattgttattgttttaagaataattataccaattttaagaacattccctacctacccccactcacaaagtgtggtggtgttgccttccaacaagaaatttcatgtcattaacatgacggaagaggaactttttaaattgtaactgtcaagtatactatttacacttaggagactgttaatctatgctagactgtcatcctccttcccccttgtctcacaggagtttactggtaacatatgtcctggcttgtggctgtccctctaaccatactgcagaaatccaagcacccaatgtgaaaaggagcgctctctgggcctcactgacactattcatgttttactaatagttgagtagtcagcatacttagaattaccttttattgcctaaatcatgtgtatatagtgaatgttatataatatacctgacaggtctgtttttatttaattaaataaagtactttgtttggctggcatatattaaattattatatggaaaaaatgggtgtctaattcttacagaataatctgaagttgggagtttggcagatagagaaatactggcttaaaatgggatgggcatattttaagcagaaccatgcagtattttttaatttctcaaacaaccatacatgtttgttaacatttacattctactttgcttaaggtctttggttgtgtcagagctattccttagagaatgtctacctgtatcattaatatcatgtggttattcatgaagccttgtactgctcctctgagtctaacaaatactgtgactgaaatgcatgcaacttgaatagacaaagttgtattactctccactatgtctgtgaaccgtgtagtattccattcttagacagtcatccatgtgcatgaaaaaaagcatgaacttctacatgacaaatctaaagtaacaaaagacacttgtaaggtcttttataagtttcataccttattttccatttttgacaccata

SEQ ID NO: 647 - DNA, 2699 bp, Cricetulus griseus
tgagagcccagtgggaaatgggcattgttcaagcagaggaagctgctagcatgtcagtagaggagcggaaagccaaatttaccttcctttatgtgggggaccagctacacctcaatcctcaagtagctaaggaggctggcattgttgaagaacctttgggagaaatggtggactcgtcaggagccagtgaagatgttgctgcagaccctgggtctgccatgccacaaacccttcaaatccacggccatcaaaggtaaaatgatgcgatgtgtccgatgccctgttgcctatcatggaggggatgcctgtctggcagcaggatgttcagtgattgcttctaatagcataatctgcacaggccacttcactgctcggaaggggaagcggcaccacacccacgtcaatgtgagttggtgcttcgtgtgctccaaagggggaagtcttctatgctgtgaggcttgcccagcagccttccaccctgattgcctgaatatagatatgcctgatggcagctggttctgcaatgactgccgggctgggaagaaactacattttcaagacatcatttgggtcaaacttgggaactacagatggtggccggcagaagtttgccatcccaaaaatgttccccaaatattcagaaaatgaagcacgagattggagaattccctgtgtttttctttgggtctaaagattattactggacgcatcaggcacgagtattcccatacatggagggggaccggggcagccgctaccagggggtcagagggatcggaagagtcttcaagaacgcactgcaagaagctgaagctcgttttaatgaagtcaaacttcagcgggaagctcgagaaacacaggagagtgagagaaagcctcccccatacaaacatatcaaggtgaataagccatatggtaaagtccagatctatacagctgacatttctgaaatcccaaagtgcaactgtaagcccacagatgagaacccgtgtggctctgattctgagtgtctaaacaggatgctgatgtttgagtgccatccacaggtgtgtcctgcaggtgaatactgccagaaccagtgtttcactaagcgccagtaccctgagaccaagatcatcaagacagatggcaaagggtggggcctggttgccaaaagggacatcagaaagggagaatttgttaatgaatatgttggtgagctgattgatgaagaggagtgtatggcaagaatcaaatatgcacatgagaatgacattactcacttttacatgctcaccatagacaaggaccgaataattgatgctggccctaaagggaattattcaagattcatgaaccacagctgccaacccaattgtgagactctgaagtggacagtgaatggggacactcgggttggcctgtttgctgtgtgtgacattcctgcagggacagagctgactttcaactataacctcgattgtttgggcaatgaaaagacagtctgtcggtgtggagcctccaattgtagtgggtttcttggagacagaccaaagaactcaacatccctttcttcagaggaaaagggtaaaaagaccaagaagaaaaccagaaggcgaagagccaaaggggaagggaagcggcagtcagaggatgagtgcttccgctgtggtgatggtggacagctggtgctgtgtgaccgaaagttctgtaccaaggcctaccacctgtcctgcctgggcttgggcaagcggccctttgggaagtgggaatgtccttggcatcactgtgatgtatgtggcaaaccttctacctcattttgccacctgtgccccaactcattctgtaaggaacaccaagatgggactgcctttcgttccacccaggatgggcaatcctactgctgtgagcatgatttgagggcagaatccgcaagaagtaccaagactgagaaaccctttccagaatcactgaagtcaaaggggaagaggaagagaaggcggtgttggcgaagggtcacagaaggcaaatagcccttggtcagatccaggagtggcatggggcagccagccctgcctataatgggaaggcaagcacagcacttgccccaaggacccagcccataatgctatgacatgtacaggcctccttgggtgggagggagcacctcccaccactgagccatcctcagcagctgtgctgtgtctgcactgatgcttgtcagctgcacactcagtggtccaggacaaacaagccttactacacagcatcactgctacacttgaatctgagacccaacgtcaaggtgccctcccgtttccattttagattaaagttatgattgaagattaactggtatgtgaaacgctttttatcttacctgaaatgtatagagcttttttaaaggtcacccttagctctatcctgatggttcaggcttctgctcacatattgccccccactcaggacaaactgggatgaaggccctgggctacccagtcaggatttgatcatttattttgctcctttgaaacagcctatgttctttgtattaatgtgaatttttcctcaaagtgctttgtttccactttgagttggtgtggtgtagcacaattcctctcatggctttcccttttgtggacttgaccagtgatagcagtgtggcctgtggagcagagcagctgcctttgttttggctgttttctctgatgtcttatgaa

SEQ ID NO: 648 - DNA, 2699 bp, Cricetulus griseus
attcttaacctgacaaaagagcagcctcaggctaaagcgggcaatggccagaactcatgtggagtggaggatgtccttcagcttctgcgcattctgtatatagttgcaagtgatccttattccagaatatcacaagaagatggtgatgagcagcctcagtttacttttccacctgatgaatttactagtaaaaaaatcaccacaaagattttgcagcagattgaggaaccattggcattggcgagtggggctctgccagactggtgtgaacaactaaccagcaagtgtcctttcctaaataccattttgaaaccaggcagctttatttcacctgtaccgcattttggtgcatccagagcgatagtgtggctacagaaccgacgagaggccacagtggagcgaacaaggaccacaagcagtgtgaggcgaggatgatcctggggaatttagagttggtcggctcaaacatgaaagagtaaaagttccacgtggtgaatcactgatggagtgggctgagaatgtcatgcaaatacatgcagatcgtaaatcagttctagaggttgaatttttaggagaagaaggaactggcttgggacccactttagagttttatgcacttgtggcagctgaattccagaggactgacttggggacttggctctgtgatgataactttccagatgatgaatctcgtcatgttgatcttggaggtggattgaagcctcctggatattatgtacagcgatcatgtggtctgttcacagcgccatttccacaagacagtgatgagctcgaaaggatcacaaaactcttccacttccttggaattttcttggccaaatgtattcaagacaatagactggtggacttacctatttctaagcctttctttaagcttatgtgcatgggtgacatcaaaagcaatatgagcaaactgatctatgagtcacgaggcgacagagacttacactgtactgagagtcagtctgaagcttccacagaggaaggccatgactctatctcagtaggaagctttgaagaggattcaaaatcagaattcatcctcgacccccctaagcccaaacccccagcctggtttaatggaattttgacttgggaagattttgaactagtaaatccgcacagagccagatttttaaaagaaattaaagaccttgctatcaagaggcgccagattttaggcaataaaggtctttctgaagatgagaagaacacaaagttacaggagttagtgctcaagaatccatcaggttctggacctccacttagcatagaggatttaggtttaaatttccagttttgcccttcttcaagaatatatggcttcacagctgtggatcttaagccaagtggtgaagatgagatgataacaatggataatgcagaagagtatgtggatttgatgtttgacttttgtatgcatacgggtattcagaagcagatggaagcctttcgcgatggctttaataaagtttttccaatggagaagttaagttccttcagccatgaggaggtccagatgattctctgtggcaatcagtcaccgtcctgggcagcagaggacattatcaattacactgaacctaagcttggctatacacgtgacagtcctggcttcctcaggtttgtgagggttttatgtggcatgtcctcggatgaaaggaaagcattcctacagtttactactggctgttcaactctacccccaggtggactggctaatctgcaccccaggctcacagttgttcgaaaggttgatgctaccgacgcaagctatccatcagtcaatacttgtgtccattatctgaagttgcctgaatactcttctgaggagatcatgagggagcgcttgctagctgctacaatggagaaaggctttcatctcaattgaaaggagacagcagagacaagtctgagtgaagcctcttgctttgtttgccgagaagtgtgtgaccctcacactaatgacacttgccttgttttccaccagtaaggctttgagaacatgtggaataagttccttagctgctaatgacaaagtacatcccttaactacccagccagcaggtacccagcacagggcactgtgctgctttacaagggctcatgtgactggaaaaggtggttctgcctaactgttccacagagcagcctctcagatcttcagtgctcactggaagttctaactgtgtttgtatcaagttgtcatcgtttcatactccatacactacagttgccatcactgacccccgttttgctggctttttagctacttggtcaaaaatactgcttccgtaaaacatagagtgttaacgcgcatctcaagcttttccttttcctttttaatgatgcctgcactaccagagtgttccagtgttctctatttgttcagcacacaatcatgcacagcctttttgtttctctgaggtgggagtttattctttttcctaaataccattctataaagatgaaatcctagagtgtgtttgtgcagctcaacaataaagatatattatgggagggaaacactggtctaggtggaaggcacactcacagcaacttttatgtttggttgtcttttctttgtatattataaacatttatttaacttgttgcagtttgacgtaaatttctgaaatgtatgctcaacaataatcaattaaaatgtttgcagacgt

SEQ ID NO: 649 - DNA, 2698 bp, Cricetulus griseus
gccacctggacatctcccgagaccgcctctccagctactacaagttcaagctgacacggaaggtgccctacttggtgcagaagctggggaacctgatgtccctggacatctctggccacatgatcctagagaactgcagcatctccaagatggatgaggagcagggcagaccagcgcatcatgcctttccgggctctgaagaggccactgcagttccttggggctctttgagacctccctgtgtcgcctcacacacattccagcctacaaagtaagtggtgacaaaaatgaagagcaggtgctgaatgccatcgaggcctacacagaacaccgacctgagatcacttccagggccatcaacctgctatttgacattgcacgtattgaacgctgcaaccagctcctgcgggccttgaagctggtcatcacggccctcaagtgccacaagtatgacaagaacattcaagtgaccggcagtgctgccctcttctacctgaccaattccgagtaccgttcagagcaaagtatcaagctgcggcggcaggtcattcaggtggtgctgaatggcatggagtcctaccaggaggtgacggtgcagcggaactgctgtctgaccctttgcaacttcagcatcccggaggaactggagttccagtaccgccgggtgaacgaacttcttcttagcatcctcagccccacccggcaggatgagtcaatccagcgcattgccgtgcacttgtgtaatgccctggtctgccaggtggacaatgaccacaaggaggcagtgggcaagatgggcttcgtcgtgaccatgttgaagctgattcagaagaagctgctggacaagacgtgtgaccaggtcatggagttctcctggagtgccctgtggaacattacagatgagacacccgacaactgcgagatgttcctcaacttcaatggcatgaagctttttctcgactgcctcaaggagttcccagagaagcaggagctgcaccggaacatgctaggactcttgggaaatgtggcagaggtgaaggagctgcggcctcagctgatgacctcccagttcatcagcgtcttcagcaacctgctggaaagcaaggccgatggcatcgaggtttcttataatgcctgtggtgtcctgtcccacatcatgttcgatgggcccgaggcctggggtgtctgtgagccccagagggcagaggtggaggaacgtatgtgggcggccatccagagctgggacatcaactcccgaagaaatatcaactacaggtcctttgagccgattctccgcctccttcctcagggcatctctccagtcagtcagcactgggccacatgggccctgtacaacctcgtgtctgtctaccctgacaagtactgccccctgctgatcaaagaaggtgggctgcccttgctgaaggacttggtcaagatggccactgcgcggcaggaaacccaaggagatggcccgcaaggtgattgatcactgcagtaactatagagaggagaacatggacacgtccagatagaggcatatatatatatatatatatatatatatatatatatatattttttttttttttggttaggaagtgtgaagttttgtgtgtatgacttctcctgagtctttgcagctccttgccactcttagcccgcctccaagctttcattgctgccatgttcactcctgccccagccaggcttgcctctaattctgtgagtgtcctgcccttcccagtgagctcagaccctggcctggtttttgtctattgttggaggagctgacccttaccaggctgctcagcatcgctgatgcctgcctgagtgtcctgtctgggctcccaggtgatggtgatagcgcttggggattaagaccggccccactgagtctcccagaagcatgggtgctcctggctgtgagccatctggggccagagagtaagatgttaccaggcctcaggctatgcagctcctgtccagagaaccctggagaagcagggctgtgttggcccactgctctacggccaggcctgcctttggccgtgctgctatggaggctgcttcaagtctcccttttctgaaggctccagcccagagatggtcagaactcagaggcaattccactgccccttctgccaaacatgccccaacccaccccagctctggcagctggcaccttccaggaccagggtcttgctcatttttctgcagtcctcatctgctcacagcaccccagtgcccaggtactcccaccagcagagctgagcccatcccctgcccagaagatactacaaggcaggaggtccccactccagcccttcagagtggcagcgggcagccacctcgagaccagcactgggacagtcatgtgtccctccagcccactcaggctgtccctgagaagctgctgggcatgtctgcctccaggcagaaggggccggctgttcacagagctcagtgagaggtgactgacctctccaaaggaaacagtctccccagccaggttagagagttcaatatgtgcttccctaccttagtccctcctttccacccccaggcccttctggcagctgccagaccgtgagcagagttcacagcccattgctttaccacctgggggttggggaaatgtctgtactttggggtgtcacagaaatacatttttgtgcaaagtgcaaaaaaaaaaaaa

SEQ ID NO: 650 - DNA, 2697 bp, Cricetulus griseus
gacgctgtcgcaggggtggatcccgagctgccgaagccgctgccctgctctcccgcgcgggctcctttaatcccattgtttcttttagattcgcttgggcctagacgccctcggggcccgatattcgggttgggcggtaccgcggcctgggcctaggggcttaacagtagcgacagcagcggcggcggcggcggcggcggcggcctcctgaaccgagcacaggcgcgcggaagcccgcacaggcgtgtagagaaaatggcagacgatattgatattgaggcgatgcttgaggccccttacaagaaggatgagaacaagttgagcagtgctaacggccatgaagaacgtagcaaaaagagaaaaaaaagcaagagcagaagtcgtagtcatgagcgaaaaaggagcaaaagtaaggaacggaagcgaagtagagatagagaaaggaaaaagagcaaaagccgtgaacggaaacgaagcagaagcaaagaaaggagacgaagccgctcacgaagtcgagatagaagattccgaggccgctacagaagtccctactccggaccaaaatttaacagtgccatccgaggaaagattgggttgcctcatagcatcaaattaagcagaagacgttcccgaagcaaaagtccattcagaaaagacaagagccctgtgagggaacctattgataatctaactcctgaggaaagagatgcaaggacagttttctgcatgcaactggcagcaagaattcgaccaagggatttggaagagtttttctctacagtaggaaaggttcgagatgtgaggatgatttctgatagaaattcaagacgttccaaaggaattgcctatgtggaatttgttgatgttagttcagtgcctctagcaattggattaactggccaacgtgttttaggagtgccaattatagtacaggcatcacaggcagaaaaaaacagagctgctgcaatggcaaacaatttacaaaagggaagtgctggacccatgaggctctacgtgggctcattacattttaacataactgaagatatgcttcgggggatatttgagccttttggaaggattgaaagtattcagctcatgatggatagtgaaacaggccggtctaagggatatggattcattacattttctgactcagaatgtgccaaaaaagctttggaacagcttaatggatttgaactagctggaaggccaatgaaagttggtcatgttactgaacgaactgatgcttctagtgctagttcatttttggacagtgatgaactagaaagaactggaattgacttgggaacaactggtcgtctccagttaatggcgagacttgcagagggtacaggtttgcagattccaccagcagcacagcaagctttacaaatgagtggctctttggcatttggtgctgtggcagaattctcttttgttatagatttgcaaacacgactttcccaacagactgaagcctcagctttagctgcagctgcgtctgttcaaccacttgcaacacaatgttttcaactttctaacatgtttaaccctcaaacagaagaagaagttggatgggatacagagattaaagatgatgttattgaagaatgtaataaacatggaggagttattcatatttatgttgacaaaaattcagctcagggcaacgtatatgtgaagtgcccatctattgctgcagctattgctgctgtcaatgcattgcatggcaggtggtttgctggtaaaatgataacagctgcatatgtacctcttccaacttaccacaacctctttcctgattctatgacagcaacacaactactggttccaagtagacgatgaaggaagatatagtcccttatgtatatagtcttttttttttcttgagaattcatcttgagttatcttttatttagataaaataaagaggcaagggtctactgtcatttgtatacaactcctgttatcttgaaaaataaagatgttaacaggaatgcagtgtgctcattctccctaactagcaaatcctactttatgcaaagctgttcgcttgttctgccgttttaaatgtccatgtagaaaattacattaaggatctatagaatagctctaggggaacaaatgtcctttctgtataaaggcagacaggtaatattttaatgtttcagaagcctaactttttacatagcagttacagttcacattcattcatgtatttggctcatggttcagcaaaggtttctggaatacacagtgtatgaatagtctaggcagctaagaggctgtttagcatctcaccttgatcatttggcaagaaggtatttcaaaattatatttcttgatggtaacttttcaattaatgtatgtgtaaaagtttctttgtaaatactgtgttttagtgtgtcttgagtttccaaacaaaatgatccctgcatttcctgaagatggttgatgtaacagtttgagcaaagaagtctgggcaagatataggaaatgcagaaataggttttgtctggttgcatataatctttgctctttttaagctctgtgagctctgaaatatatttttgggttacttcagtgtgtttgacaagacagcttgatatttctatcaaacaaatgactttcatattgcaacaatctttgtaagaaccactcaaataaaattctctgaaaaaggacaaaaaaaaa

SEQ ID NO: 651 - DNA, 2697 bp, Cricetulus griseus
tttaatactggattgggacaacacacagagactttccagtcatgaatacggaccaggatgtagcactcaaacttgctcaggaacgagctgaaatagttgctaaatatgacagaggacgagaaggtgcagaaattgagccttgggaagacgctgattatcttgtttacaaagtcactgatagatttggctttttacatgaggaagagctcccatatcacaatgcaactgctgaccggcaaaagcaactggaaaattgaaagaactaccaaatggctgaaaatgctgaaaggatgggaaaaatacaagaacactgagaagtttcatagacgaatttacaaaggaattccactccagctccgaggtgaagtctgggctcttcttcttgagatccctaaaatgaaagaagaaacaagagatctttatagtaaattaaaacacagagcacgggcttgttcacctgatatcagacaaatagaccttgacgtgaaccgcacatttaggaaccatattatgtttagagacagatacggtgttaagcaacaatccttattccatgttcttgcggcatattctgtctataatacggaagtcgggtactgtcaagggatgagccagataacagccctactcctcatgtacatgaacgaggaagacgccttctgggccttggtcaaactcttctcaggccccaaacatgctatgcatggcttttttgtccaaggttttcctaaactcttgagatttcaagaacatcatgaaaaaattctgaataaatttctgtccaaacttaagcaacacttggattctcacgaaatctacacaagtttttatacaatgaaatggttttttcagtgttttcttgatcgaactcccttcacactgaccctcaggatatgggacatctatatctttgaaggagaacgagttcttacagctatgtcttacacgatcttgaaattacacagaaaacatctaatgaaattgtctatggaagaacttgtagaatttctgagactctggccaaaggacttttttcttcgaggatgattttgtaatagagcaacttcaggtttctatgtcagaactaaaacgggcaaaattagatctcccagaacctgcaggacagttccaggcactacaaccatgcagctgctaaccaaaatagcaatgcaatttcaaacatcagaaaggaatttatgcccaatcccagccatgtaagatacccatcccagttagaaggagaggatcacagggctgcgtatccaccctcctacagcaacccccctgtttaccatggaaattctccaaacacctccctgttgcccacagtggctttgtgtccccacagatcagccctgggactcaaattaatcttttccaggagaccatatggttcttctctttcagttgatatttctccagagaaatcttatagccgcccaactcctgttgttctgccatctagtcgaattgaagttcttcccattgacattggtgctgggggatatgcaggcagttcagggtcaccaaagaatggaaagttcatccttcctccagtggattatttaccagagagcagaaaatggtcagaagttagttattcatacagacctgagatgcacggacaatcatggactcgagatgctagccggagccacttcagcaatttaccaaaatacgcagcctttcaacacctaccttttcaggaccatggtcttccagaagtgtctgtagacagtccagtgaggtataaaacttcaccagctgtggaagatgccagtcctcctgggtatcaatatacaggtccctcacctccagcacatcactacagaaacagagagggactttctattcaagaatcagtgttgctgtgagagtttggctgtattcactgcagacaaaagaatagaaaccatacgataaccacattgctatgtttataattgccaaagcagtattttatactattgtaaacatatgctatcatacactactgttaccaagacactaatgaaatgctgggttctccaagagagggtgcctctgtctatgtggatgcccatcgcatcgttatcttcttgtatctgaatatcagaaagtagaaagtccaacagtgatggtccccctcctgcacgttggggatttaagcatttaaggtacaagaatatatcttaagattaaagtaacatttgtttagttagcgaacgtgacaatattttttatgtatataatgattctaatgtaatttaatcaacgtggtaatgatgttattaagtgtggaaacaaatgcagtatattaaaggtgaacaccacactgaaacgccaactcctgaaaacataaccaggctcttgatttagatcatgttgaaggtgagaaataaatgtatgtagaaatgtagttgaggatattaattacagttcttaaagtatgactctgtgacttataaggaccaagctgtacaatttagtttgtgatggcagtatctgtgcctctcaaaaagtatatatcatagtggtatataaataattgtatatatatatatatatatatatacattatatatatacacacactattttcttatgtcatttatggctatttttatatctgttattactttttgtatgttgtaattgtttttaacattgctaaaaagtaatttatttctaaataaaagaaatgataagaagaaataa

SEQ ID NO: 652 - DNA, 2696 bp, Cricetulus griseus
gttgtccgaagtgcaaaggacaagaggtttgaggagctgaccaaccttatacgaaccatccgtaatgccatgaagattcgagatgtcaccaagtgtctagaagagtttgagctcctgggaaaagcatatgggaaagccaagagtattgtggataaggagggtgtcccccgattctatatccgaatcctggctgacctggaggactatcttaatgagctgtgggaagataaggaagggaaaaagaagatgaacaagaacaatgccaaggctctgagtaccttgcgccaaaagatccgaaaatacaaccgagattttgagtcacatatcacaaactacaaacagaaccctgagcagtctgcagatgaagatgcagagaaaaatgaagaagattcagaaggctcttcagacgaagatgaagatgatgatggagtcagtgctgcagctttcttgaagaagaaaccagaatcttctggggacagccgaaagttcctaaaaaagatggacgatgatgatgaggactccgaagattctgaagatgatgaagaatgggacaccagttctacatcttctgactcagactcagaggaagaagaaggaaagcaaactgttctggcctcaaagtccttaaaaagcaccactacagaggaggacaaaaagcagctgagaagaaacgggaagacaaagccaagaagaagcatgataggaaatctaagcgcctggatgaggaagaggaggacaatgaaggcggggagtgggaaagggtccgtggtggcgtaccacttgttaaggagaagccaaaaatgtttgctaagggtactgagattactcatgctgttgtcatcaagaagctgaatgagattctgcaggccagaggcaagaagggaacagaccgtgccacccagattgaattgctacagctgctggttcagattgcttctgaaaacaacctgggggaaggtgtcattgtcaaaatcaagttcaatatcattgcctctctctacgactacaaccctaacctggccacatacatgaagccagagatgtggcagatgtgcctagattgcatcaatgaactgatggatatcttggttgcacattccaacatctttgttggagagaacattttggaagagagtgagaacttacacaattttgatcagccactgcgtgtacgcggctgcatcctaactctggtggaacgaatggatgaagaatttaccaaaataatgcaaaatactgatcctcactcccaagagtacgtggagcacctgaaagatgaagcacaagtatgtgccatcattgaacgtgtgcagcgctacctggaggagaaaggtaccactgaggaaatctgccaaatctacttgaggcgcatcctgcacacttactacaagttcgactacaaggcccatcagcgtcagcttactcctcctgaagggtcctcaaagtctgagcaagaccaagcagaaaatgagggtgaggactcagctgtgttgatggaaagactctgcaaatacatctatgccaaggaccgtacagaccggatccgtacctgtgccatcctctgccatatctaccatcatgctctccactcacgctggtatcaggcccgtgacctcatgctcatgagccacctacaagacaacattcagcatgcggatccaccagtacagatcctgtataaccgtaccatggtgcagctgggcatctgtgccttccgccaaggcctgacaaaggatgcacacaatgcccttctggatatccagtcaagtggtcgtgccaaggaacttctgggccagggtctgctgctgcgcagtctacaggagcgcaaccaggaacaggagaaggtagagcgacgccgacaggtgccctttcatctgcacatcaacctggaacttctggagtgtgtttatctggtgtctgccatgctcctggagatcccctacatggctgcccatgagagtgatgcccgacgacgcatgatcagcaagcagttccatcaccaactgcgggtaggcgagcggcagcccctgctaggtcctcctgagtcaatgagggagcatgtggttgctgcctccaaggccatgaagatgggtgactggaagacctgccacagtttcatcattaatgaaaagatgaatgggaaagtgtgggaccttttccctgaggctgacaaagttcgcaccatgctagttcggaagatccaggaagagtcactgaggacctacctctttacctacagcagtgtctatgactcaatcagtatggagacactgtcagatatgtttgagctggatctacctactgttcactccatcatcagcaagatgatcattaatgaagaattgatggcttccctggaccagccgacacagacagtggtgatgcaccgaactgagcccactgcccagcagaacttggctctgcagctggctgagaagcttggcagcctagtcgagaataatgaacgggtgtttgaccataagcagggaacctatggtggctatttccgagatcaaaaggatggttaccggaaaaacgaaggctacatgcgccgtggtggctaccgccagcagcagtctcagacagcctactgagttctccatttctgtccctgtgatcggactaacttagcttttcattcctaagcccaccccagtcattaaaggtctgttgcgaaatttaaaaaaaaaaaaaaa

SEQ ID NO: 653 - DNA, 2696 bp, Cricetulus griseus
gtggcgccagctgtccggggtgctaacccctggcagcccgagggctgagttccaaagacaagtacgttaaaggcctgattgagggcaaatcagacccctatgcgcttgtccgtgtgggcacccagacattctgcagtcgtgtcatcgacgaggagctcaaccctcactggggagagacttatgaggtgatagtgcacgaggtcccgggacaggagatcgaggtagaggtatttgacaaagatccagataaagatgattttctgggaagaatgaagctggatgtggggaaggtattacaggctggagtcctggatgattggtaccctctgcaaggtgggcaaggccaagttcatttgaggctagaatggctatcgcttttgccagatgcagaaaaattggatcaggtcctacagtggaatcggggcatcagttcacgaccggagccaccatcagctgccatcctggttgtgtacttggatcgggcccaggatcttcctctgaagaaaggaaacaaggaacccaaccccatggtgcaactgtcagttcaggatgtgacacgggagagcaaggctacctacagcaccaactgcccagtgtgggaagaagccttccggtttttcctgcaagaccctcgcagccaggagcttgatgtgcaggtgaaggatgattccagggccctgacattaggggcactgactctcccgctggctcgcctgttgactgcctctgaactcaccctggatcagtggttccagctcagcagctcgggcccaaactccaggctctacatgaaactggtcatgcggatcttatacttagattcatctgaaatctgcttccccactgtacccggtgcccaagacctggacggtgacggcccccagacaggcagcagtgtggatgccccacctcggccctgtcacacaactcctaacaaccactttgggacggagagtgttcttcggatccatgtactagaggctcaggacctgattgccaaagaccgtttcctgggggggttggtgaagggcaaatcagacccctacgtcaaactgaaggtggcaggacggagtttccggagccatgttgttcgggaggacctcaatccccgctggaatgaggtttttgaggtgattgtcacatcgattccaggccaagagcttgagattgaggtctttgataaggacttggacaaggatgactttctgggcaggtataaagtgagtctcaccacagtcctcaacagtggcttccttgatgagtggctgaccctggaggatgttccatctggccgcctgcacttacgcctggagcgtctgacccctagacctactgctgctgagttggaagaggtgctgcaggtcaacagcctgatccagacccagaagagctcagagctggcggcagccctgctgtctgtctacttggaacgggcagaagatctgccactccggaaaggcaccaagccccccagcccatatgctactctcagcgtaggagagacttcccataaaaccaagactgtttcccaaacgtcagcccccatctgggaggagagtgcctcatttctcatcaggaagccacatgctgagagcctggagcttcaggttcggggtgaagggactggtaccctgggctccatatccctgcctctctctgagctcctccaggcagagcgactctgtttagacagatggtttgcactcagcagtggtcagggccaggtgctgatgagagcgcagctagggatcctggtgtcccagcactcaggagtggaagcccacagccacagctatagccacagctcttcttcactcaatgaggaacccgaggcctcagggatacccagccacgccacttccccagtgctggaggtcaggcatcgcctaccacatggtgacagcccctctgaggctcctgttgggcctctgggccaggtgaagctgacagtgtggtaccacagtgatgaacaaaagctggttagcatcatccacagctgccgggcccttcgacaaaatggccgtgatctcccagatccctatgtgtcactgctgctactaccagacaagaatcgaggcaccaagaggaagacctcacagaagaagaggactctcaaccccgagttcaatgaacggtttgagtgggagctgcccctggatgggtctctcaggagaaagctagatgtttcagtgaagtcaaactcttctttcatgtcacgagagcgtgagcttctgggaaaggtacagctggatcttgcggagatagacctctcccagggtgcagcccagtggtatgacctgatggatgacaaagataagggcagttcctaggagctggggacagcccgacattgctctgtcttcttgccttgcctcttgcctcagtgtgatgagcccacagctagggctccagggctgagcctgaacccttttgccttctgggcccaaatcggggtctttgcctgaccaaagaggatcatatgtaacctttactgcacggcctttccccttgggctcctggggcagggacctaagctggctacttcctcttctgcctgcacctcactctcccttcccgactcctcagggcctcatgcacctgtgcctggccactggtagcaccagcagtggcaccaaatcatgccaaatacagcttttggaaagctcttttttacataataaaaaatatacagaaaa

SEQ ID NO: 654 - DNA, 2695 bp, Cricetulus griseus
  modified_base (203)..(203): a, c, t, g, unknown or other
  modified_base (491)..(491): a, c, t, g, unknown or other
  modified_base (622)..(622): a, c, t, g, unknown or other
  modified_base (1258)..(1258): a, c, t, g, unknown or other
ggcatattgaatgggagtcagtgctcaccaacacagctggctgccttagaaatgtaagctcagagaggagtgaagctcgccggaaacttcgggaatgtgatggcttagttgatgccctcattttcattgttcaggcagaaattggacagaaggattcagacagcaagcttgtggagaactgtgtttgcctccttcggaacttntcatatcaagttcatcgagaaatcccacaggctgaacgctaccaagaggcacttcccagtgtggctaatagtactgggccacatgctgccagttgcagggaaaaagcccacagaggatccagcaaatgatacagtggatttccctaaaagaactagtcctgctcgaggctatgaactcttatttcagccagaagtggtgcgaatatacatttcacttcttaaggagagcaagacgccggccatcctagaagcctccgctggagctatccagaacttgtgtgctgggcnctggacatatggtcgatacatccgctctgctctgcgtcaagagaaggctctctctcgccatagctgacctcctgaccagtgaacatgaacgagtagtgaaagctgcatctggggcactgagaacctggctntggatgctcggaacaaagaattaattggcaaacatgccattcctaacttggtaaagaatctgccaggaggtcagcagaactcctcctggaatttctctgaagacaccgtggtctctattttgaacaccatcaatgaagttattgctgagaacttggaagctgccaaaaagcttcgagagaccccagggtattgagaagctggtgttgatcaacaaatcagggaatcgctcagaaaaagaagtcagaacactggatcgatctggggatctgggtgatatggagccattgaagggagcacccttgatgcagaagatttagcaccactctacctgctccatctgagcatataatatattacttttatttttggtggtgaaatggactgatgatttttttcctttcttcgctggactattgtgccaactgccaggctgcctcctacccttatagccccagagtggctgccttcattccatcaacaccttccactgaagtttaattgtcctgtcctcccatcccccctacctccagtttccccaagaaacctgactcagttatttgcatatcttgagagactgctgcagattagctcttttttgccagccctccctggactcttggcctgtgtgggagggngggagaggagtggaactcttcgctggaagctgggaagaactgaaaattgcacgctgtatatgcagcattcagcattctgacaaactgatgacttttaatcaagactatctttctggtggggatagggaacttttaattttgttttggataatgggaaatatgagttcttcccttatccagtggctggttttgaagccaagaaggctggaaacattggcacattccacctggcagggatcctccagtaagcgaggtactcctcaaactgggattgagaactcttgttcctcctgtctgagacagagaccacaaaggacctacagactccatctcttctgtcagcttcaggccaaccttagggtgctgccctgaccaaggctgtcctcaaccctcctctcttaccctgtgataaatctgctaacttgacctggctgtttgcaagaggctatgtagaaaagagaacgccatggaacacttcttgcttgagaagaagcataaagattgtctatcggggaaaagatgaacctctagaaggaatgtacatgaagcggttagtctgagactggcaggaagcttcaagctggctttcccaccttccctgccccttttctcttcttcctttataggcttgtccctccttctctccctccctggatttgttggccaactacaagacttgtacataactcctgccccctttgcccttctaaggtaggagttgccctggctttgcctcctctttgtgcctttggcctggggtgcatctcctccctctcttccacgtgcctttctttgcctctgcagtctcatttttcatgattttgcaagttagattttgttattttcttaaccactgttgacccttagtagctgaaggaaagaaaaggagtgttacaggttgagctagagaatcagctactatgtggttggtttttttttttttaaactttttcccttatttgcttttgttccttaatgtaaaagctctattcaatgcaactggaattctttatccctcttgtcctgttccttaatatattgaggctatggggtaggagaaaagtgcacaacccaccaatgtgaccctcagagtacactacacagggagcctcacccacccagacctggctctattctcagtttctcttgtcctctgctcttcctggtgctcttgttttcggtggggtgtgggtaatagaatagccatgggctttgggggacctttaactgttttgtttgtttgttttgttttgttttctctttcatttataaaaacactaaacattcaatttcagcaaaccaaaaatcctaccttcccaccgaacactactaaggggcatgtcttctgctctgtatcttttctctttttctttctctcttgttaatgcttttaaaaacaaatgagttttttatataaataaagtttttaaagtgtgt

SEQ ID NO: 655 - DNA, 2695 bp, Cricetulus griseus
gtgaccttgctccgaagcctcactcatggatccctgattgtgggcaattctgcccctgtcaacggaacctcccagggcaagttccaaggcttagacctgaatgaggagctgtatctgggtggctatcctgactatggtgccatccccaaggctgggctgagcagtggctttgtaggctgtgtacgtgagctgcgtatccaaggcgaggaaatcatcttccatgacctcaacctcacaacacatggcatctcccactgccctacttgccaggaccgaccctgccagaatgggggtcagtgccacgattctgagagcagcagctacacatgtgtctgccctgctggcttcactggcagccgttgtgagcattcacaagccctgcattgccacccagaggcctgtgggcccgacgccacctgtgtgaaccggccagatggccgaggctacacctgtcgctgccacctgggccgttcggggatgaggtgtgaggaaggtgtgacagtgaccaccccatctatgtctggcactggctcctacctggcactaccggctctcaccaatactcaccatgagctacgcctggatgtggagttcaagccactggcacccgatgggatattgctgttcagtgggggcaagagtgggcccgtggaagactttgtgtccctagcgatggttggtggccacctggaattccgctatgagttagggtcaggtctggctgttctgcgaagccatgaaccgctggccctgggccgctggcaccgagtgtctgcagagcgtctcaacaaagatggcagcctgcgggtggatggagggcgccctgtgctgcgctcctccccagggaagagccagggcctcaacctacacacgctgctctacctgggtggtgtggagccctccgtacagctttccccagccaccaatatgagtgctcacttccgaggctgtgtgggcgaggtgtctgtgaatggcaagcggttggacctcacctacagctttttgggcagccagggtgtggggcagtgctacgatagttccccgtgtgagcgccagccctgccggaatggtgccacatgcatgcctgcgggtgaatatgagttccagtgcctttgtcaagatggctttaaaggagacctttgtgagcatgaggagaacccttgccagctccaagagccctgtctgaatggtggcacctgctggggtgcccattgcctatgtctccctggcttctctggtccccgctgccaacaaggcgcagggtatggcgtagtagaatctgactggcaccttgaaggcagtggaggcaatgatgctcctgggcaatacggggcctactttcatgacaatggcttcctaggcctccctggcaacatcttctccaggagccttcctgaagtacctgagaccattgaatttgaggttcggaccagcacagccaatggcctcctgctctggcagggtgtggtgagagaggccagccgcagcaaggacttcatcagccttggactacaggatggccatcttgtcttcagctaccagctaggcagtggagaggcccgtcttgtctctgaggaccccattaatgatggcgagtggcatcgggtgacagcactgcgaaagggccagagaggctccatccaagtagacggtgaggagctggtcatcggccggtccccaggtcctaatgtggccgtcaacaccaaggatatggtctacattggtggtgccccagatgtggccacactgaccaggggcaagttctcctctgggatcacaggctgtatcaagaacctggtgctgcactcagcccggcctggagccccacccccacaacccctggacctgcagcatcgtgcccaggcaggggccaacacacgcccctgcccctcataggcaccctcctgccgcccacggactcctgggccgcacccagcctgacaatgtcgagtatattattattaatattattatgacttttttgtaagagacggaggcaatgccacgcttgctgctaccaccctgggctggactggagggtgggtgcgccagctcccacacacgtgtgggcagagccccaaggttggtgggtggggcaggtggactggaagaggttttcctcagaaggccactgggacttaaagtcaggcccagtgactggtagggctcagaactgctctgactccatccccactacaaagtaaagccgggctgctcgttttagcagtccatggacagtcctcattgctgtgagtgccaacctcagtttaccgcctggtacctcactgtcaaactgaatgagggtatggtattgcaatagcctgagctactgtgctgggagcagaagacagctcaaccatcccagcttcctccacccccacctacccagaaaccccatgtccctggcagcatcccctcccacccagcccacgtccctctgcattccccaccaccaccaccaccaccaccaccacacacagctcagggccctgccctcaggagctgcaagggagaccaacttttcccctgacctgctaggcagagcccagcaatgaagtcccaacacaccaggccacaccccccacccttctggaggtgaaggcccagggcgtgggggagcaggaatcaggaagaccagtgccttggtgggggcatggcctcgggtcctagagggaaccctgtggtcttcatctga

SEQ ID NO: 656 - DNA, 2694 bp, Cricetulus griseus
tggggcaatgtcacaagttacaactacttatcttttgatgccccaccaacttcattcaacttttcatctttggatgctgaagaagatactgaaaatgtagactcatggtttgaggagaaggccaacttggggaacaagttgcttgggaagaatggaatagaagagctttttcagggcaaaacttccttgagaaaagccaaactccagaaaagccgagttacacctttgaaggcagttgacaacacttactataatgaggcagaaaaggcaaatcttcagaaacattctgttccatcagatgattgttctgtgaatgctgagggggctgtatcaggaaaaactcctgtccaggctcagagacgatccgtcagactctctgctaagaaggatttggagcataaatcaaaaaaacatgcccttgttgaaatgaaagcaaagagatgtaccactccttccagtgactttccaccttccaaaagaataagaatgtctcataaaaagaaaccagaggaagaggaagaagacagtgttcgaggtgcttccagaaagaatgaaagagaaagtctggagaaagtcaaaggcaaacatactgcgcctggtgttccacctgcaaggcagaaggttctaaaaagtactgaagagcaggagttggagaagagactaaaaatgcagcaggaggtggtagagatgcggagaaagaatgaagagttcaagaagcttgctctggcagggccagggcaacctgtgaagaaatctgtgaaccaagtcaccaaaacagttgactttcacttcctcacagatgagcgaatcaaacaacatcccaagaaccaggaagagtataaggaagtgaatttcatgtctgaacttcgaaagcatcctccatctcctgcccgagtgactaaaggatgcaccgttgttaaacctttcaatctgtccaaaggaaagaaaagaacatttgacgaaacagcttctacatatgtgcccattgcacagcaggttgaagccttccacaaacgaacccctaatagatatcatctgaggaacaagaaggaagagaacttgttaccctccagaactgagaccaagatctcaagagatccgaagactcccatactgcaaaccaaataccgtgccaggcttgtgacctgcaaaagtacagcagaacaggaggctgaggagcttgagaaactccagcaatacaaattcaaagcccgagaacttgatcccagaatttttgaaggtggacccatcttgcccaagagacctcctgctaaacctcccactcagcctgttggttttgatttggaaattgagaaacgaattcaagatcgagagtcaaagaaaaaatcagaggacgaacactttgagtttcattccagaccttgccctactaagatcttggaagatgttgtgggcgttcctgaaaagaaggtaattccagccactgtccccaagtcaccagtttttgcattgaagaacaggatccgagtgcccaccaaagaagaagaggaagaggataaaccagttgtgatacgagctcaacctgtgccacattatggggtgccttataagccccatattccagaggcaagaaacgtggaagtgtgccctttctcctttgatacccgggacaaagagcgccagttgcagaaggagaagaaaataaaagaaatgcagaaaggggaggtgcccaagttcaaggcacttcctctgccccagtttgacaccattaacttgccagagaaaaaggtaaagagtgtgactcaagctgagcccttctctctggagacagacaaaagaggtgcctttaaagctgaggtgtggaagcttcagctggaggaagagctgaaacagcagaaggaggcagcttgcttcaaggctcgtccaaacactgtcatcttccaggagccctttgttcccaagaagaagaaaccagttgctgagaacctgtctggttctctagttcaggaggagccctttcaactggccaccgagaggagagccaaggaacggcaggagctggaaaagagaatggctgaagaagaagccaggaaaatgcagcagctggaggaagtcagacaacaagaagaggagcagaaaaaggaggagctagtcaagctccggaaggaactggtacataaggcgaatccaatccgcaagtatgcagctgtggaggtgaagtccagtgagctgccattgactgtgcccgtgtctcctaagttctccaccagattccagtaggagcgctttacgtcacatcaggcacggagagagccctttctcagactcaccctcctgggtgtggcagtggaccccacaactgtggatgctggttttcttgaagatcactttacacaattctgaagctaatgagaagaaactcatttaggctttattcagacttcttgtagttatctccttccagcatcagttggtcctttactattgattttagctatggctagaatttcaagtgtttttttggcacagtctaattattttctcctaatctccccctactccccttttatatgtatattttaagcataaaataaaggcagttaaatcgtgggctgtggtttcagtcatagtgtaaaaagaagcagctaatccatcagattcatctttgttcagatgagtttgtggttaaggagccctgtgctgtggtttaatttcaggtctgacttctcttct

SEQ ID NO: 657 - DNA, 2694 bp, Cricetulus griseus
cgcagccatgaacggacagctcaacggcttccacgaggcgttcattgaggagggcacgttcctcttcacctcagagtctgtgggggaaggtcacccagataagatctgtgaccaaatcagtgatgctgttttggatgctcaccttcagcaggaccccgatgccaaagtggcttgtgaaactgttgctaaaactggaatgatccttcttgctggggaaattacatccagagctgccattgattaccagaaagtggttcgtgaagccattaaacacattggatatgatgattcttccaaagggtttgactacaagacttgtaatgtgttggttgccttggaacaacagtcaccagatattgcccaaggtgttcatcttgatcggaatgaagaagacattggtgcaggagaccagggcttgatgtttggttatgccactgatgaaactgaagagtgtatgcctttaaccattgtgttggcccacaaactaaatgccaaactggctgaactacgccgcaatggcacattgccttggttacgcccagattctaaaactcaagtgactgtgcaatatatgcaagatcgaggtgctgtgctcccctatcagagtccatacaattgttatatcggtgcaacatgatgaagaagtttgtcttgatgagatgagggatgctctaaaggagaaggtgatcaaagctgttgtgcctgcaaaataccttgatgaagatacaatttaccacctacagccaagtggcagatttgttattggtgggcctcagggtgatgctggtttgactggccgaaaaatcattgtggacacttacggcggttggggagctcatggaggaggggccttttcaggaaaggattataccaaagtggaccgctcagctgcttatgctgctcgttgggtagcaaaatcccttgttaaaggaggtctgtgcaggagggttcttgttcaggtctcttatgctattggagtctctcatccattgtcgatctccattttccattatggtacttctcagaagagtgagagagagctattagaaattgtaaagaagaattttgatcttcgccctggggtcattgtcagggatctggatctgaagaagccaatttatcagaggactgcagcctatggccactttggtagggacagcttcccatgggaagtgcccaaaaagcttaaatattgaaagtgttagccttttttccccagacttgatggcgtaggctacagagaagccttcaagctctgagggaaagggcccttcttcctaaatttttctgtcctctttcagctcctgatcagttgcagtcactctaatcaatgacatgaattttagcttttgtgggggactgtaagttgggcttgctattctgtccctaggtgttttgttcaccattataatggatatagtgagcataggtgatccatgtaactgcctagaaacaaacactgtagtgaataatgctttgaaatcgaacctttgtgccctatcacctaatcctccaaagtcctaattgcaattattttcccaccggatgctgaaaatgtccttgtaatgtgcacgtaaagtacttgtagtttgactatagactttggcaatgccatagccctgtcagcatgaatttgtaatgtcttgagctctatttattgaatgtgaagccccttccctcatcctccctgtaactcagtcgtttctaattatgtagttgtttgtcagggagtgttccctatccaatcaatcttgcatgaaacgcaagtttcagttggagctctagcctgactttaaaaaaaaaaggcagttacaattaaaccatctccctggtgcttatgctattaattgccacctcttaaacagcaccgaatcaaaatctctccacttttcagctgtctttggaggacgtacgtaataaggttttatttagtaaaccaaccctatgcatggtttcagcactagccaaacctcaccaacttctagtctagaaaaacaggcacttggcacccttgtgatgtcatacagagaagtcacagggcagtacctgagggtctgtaggttgcacactttggtaccaggtaacttttttttctttataagaaagacagtactccacactgcacaatagctcctcccagggttttaactttgttttattttcaaaaccaggtccaatgagctttctgaacagctggtgtagctacagagaaaccagcttccttcagagagcagtgctttttggcggggaggagaaaatcccttcatacttgaacattttctaattgcttatttattgtattctggggtatggcgtaagtacagagaagccatcacctcagatggcagctttcaaaagatttttttttttcctcaacaccatgattcctttaacatgtttccagcattcccaggtaggccaaggtgtcctacagaaaaaccttgggttagacctacagggggtctggctggtgttaacagaagggagggcagagctggtgcagctggccatggagaaagctgacttggctggtgtggtacagagaagccagcttgtttacatgcttattccatgactgcttgccctaagcaagaaagtgcctttcaggatctatttttggaggtttattacgtatgtctggttctcaattccaacagttaaatgaagatctaaataaaatgctaggttctaccc

SEQ ID NO: 658 - DNA, 2692 bp, Cricetulus griseus
gaaaaagaagagcgaggaattgctagattggctcaagctacccaggaaagaactgacctttatgcaaagcagggtaggggaagccagtttacatcaaaagaagagagagacaagtggattaaaaaggagctgaagtctttagatcaggctattaatgacaaaaaaagacagattgctgctatccataaggatttggaggatacagaggcaaataaagagaaaaatctggagcaatataataaactggatcaggatctcaatgaagtcaaagctcgagttgaagaactggacagaaaatactatgaagtaaaaaaataagaaagatagaactacaaagtgaaaggaattactatggagagaagagaatgcagagcaacaggcactcgctgccagctttctatacttgtgtggaggtcactgctggtaacaggttattttatcacattgttgattcagatgaagtcagcacaaagattttaatggagttcaataaaatgaatcttcctggagaggtgacttttctgcctcttaacaagttagatgtgagagataccgcctatcctgaaaccaacgatgctattcctatgatcagtaaactgaggtacaatcccaggtttgacaaagctttcaaacatgtgtttgggaagacactcatctgtcggagcatggaagtttctactcagctagctcgtgctttcactatggattgtattactttggaaggtgaccaagtcagccatcgaggtgctctgactggaggctactatgacacgagaaagtctcgacttgagttacagaaagacgttagaaaagcagaagaggagctgggtgagcttgaagcaaagctcaatgaaaacctgcgcagaaacattgaaaggattaataatgaaattgatcagttgatgaaccaaatgcagcagatagagactcagcaaagaaaatttaaagcatcaagagatagcatattatcagagatgaagatgctaaaagagaagaggcagcagtcagagaagaccttcatgccaaagcaacgtagcttacaaagcttggaggcaagtctgcatgctatggagtctaccagagaatcgctgaaagcagaactaggaactgatttgctttctcaactcagtctagaagatcagaaaagagtagacgcactgaacgatgaaatccgtcaacttcagcaggaaaacagacaactgctaaatgaaagaattaaactagaaggtattattactcgagtagagacttacttgaatgagaatctgaggaaacgcttggaccaagtagaacaggaacttaatgaactgagagagacagaaggtggtactgttcttactgccacaacatcagaacttgaagctataaataaaagagtaaaagatactatggccagatcagaagatttggataattccattgacaaaacagaagctggaattaaagagctccagaagagtatggagcgctggaaaaatatggagaaagagcacatggatgccataaatcatgacaccaaagagctggagaagatgaccaaccgacagggcatgctgctgaagaagaaggaagagtgcatgaagaaaatccgggagttggggtcccttcctcaggaagcctttgaaaagtaccagacactgagcctgaagcagttgtttcgaaaacttgagcagtgcaacacagaattgaagaagtacagtcacgttaacaaaaaagctttagatcagtttgtgaatttctctgagcagaaagaaaagttgataaagcgacaagaggaattggataggggctacaaatcaatcatggaattaatgaacgtgcttgaacttcgaaaatatgaagctattcagttaactttcaaacaggtatctaagaacttcagtgaagtattccagaagttagtacctggtggcaaagcaactttggtgatgaagaaaggagatgtggagggcagccagtctcaagatgaaggagaagggagtggcgaaagtgagaggggctctgggtcacagagcagtgtcccatcagttgaccagttcacaggagttggaatcagggtgtcatttacaggaaagcaaggtgaaatgagagaaatgcaacagctctcaggcggacagaaatctctggtggcccttgctctgatttttgccattcagaaatgtgaccctgctcccttttacttgtttgatgagattgaccaagcattggatgctcagcacagaaaagctgtgtcagatatgatcatggaactagctgtgcatgcccagtttattactactacttttaggcctgaactacttgagtcagccgacaaattctatggtgtaaagttcagaaataaggttagtcatattgacgtgatcacagcagagatggccaaagattttgtagaagatgataccacacatggttaattgaaagatactgcctgctgccttgaagatgtgtataataatgtggtcttcatactcaagaactgtaaattttaaaactaaataattggttattattgagtttttggatttagaatacacagtgcttttatacttgtctttgtattttataaactcccctgtaatgttacatttctacgtatagtcgaggaattttatttcctacacagctttttgtaaagtgttctcctattttaaatcttttgagatattctaaatattattccaaattattttat

SEQ ID NO: 659 - DNA, 2690 bp, Cricetulus griseus
tttctcccaaagcactgaaagatccgaatttcttcacaaacactgagaagttaaaatcacaactcctgcaaattcagacagagctgaataattcaaagcaagaatatgaagagttcaaagagctaactcggaaaaagcagctagaactggaatctgagcttcagtctttccaaaaagcaaacctcaatcttgaaaaacttttggaagcaaacaaaagcctgcaagcgccaagaagtttctcagctgaataaaatacatgctgaaacacttaagataattaccactccaaccaaggcttatcaactcagttctagactgctaccaaagtcaagccctgaactggggaactttggcttcctgcatacacagaattctagcagtttagataatgatatattaaatgagccggtgccacctgagatgagcgaacagtctttggaggctgtttctgaagagcttcggactgtgcaggaacaactgagcgctcttcaagtcaagctggatgaagaggtgcataaaaacctgaaacttcaacagaattttgacaaactagagacaccattctgcacaaatgttttgaaatgtgaggtccatgacttgcgtattgttcttcattctgctgacaaagagctgtctctgacgaaactggagtatagcaccttcaaagagaatcaagagaaggaactaagccaactttctgaaagacatgtgcaggttcaggttcagctggacaacaccaggaaaagcttcttaagagccaagcctgcatacaggattcctacgataacttgcaagaagtaatgaaatttgaaattgaccagctttcaaaacagcttcagagctgcaaacaagaaaatgaaactttgaagtctgatctgcataatttgatggagctttttgatgcagaaaaagaacgcaacaacaaattgtcattacaatttgaagaagataaagaaaatagctctaaagaaatcttaaaggttcttgaggctgtgcgtcaggagaaacagaaagagatggccaaatgtgaacagcagatggcaaaagtacagaaactagaagaaagcttgcttgctactgaaaatgtgatcagttctctagagaagtccagagattctgacaaggaacttgtcactaatctcatgaaccaaatccaggagttaagaacatcagctggtgaaaaagcagaaaccatagataccctgaaacaagaactccaggacataaattgcaaatacaatgttgctatggctgacaaagaagagagcagagagttgatcaggaaacaggaagtggatatcctggaactaaaagaaactctcagactgagaatcctctcagaggatattgagagggatatgctgtgtgaagatctggcccatgccactgagcagctgaacatgctcacagaagcctccaaaaagcactctgggctactgcaatctgcccaggaagagctgaccaagaaggaggcactgatccaggagcttcaacacgagttaaaccaaaagaaggaggaagtagagcagaggaagagtgaatataacttcaaaatgagacagctagagcatgtgatggattctgctaccgagtatccacagagtcccaaaacaccaccccattttcagcctcatttggcaaaactcttggaaacacaagaacaagagatagaagatggacgggcctctaagacttttttgcagcaccttgtcacaaagctaaatgaagatagagaagtaaaaaatgctgaaatcctcagaataaaggatcagttgtgtgaaatggaaaatctgcgcctggagtctcagcaattaagagatcaaaactggctcctgcaaagccagctggatgaggttaaatggcagaaggatggtggcaatcagagtcatccagacagtcaacagctgaagaatgaatatgaagaggagattgtcaaagaaagacttgctaaaaataaacttattgaagaaatgctgaaaatgaaaacagatctagaagacgtacaaactgcccttcatagtaaggagaaggtgtgccacagaatgaacgaggaagttgagcgaatcagaactttggagtctagagcatttcaagaaaaggagaagcttcggtcaaaattggaagaaatgtatgaagaaagagacagaactttccaggaaatggaaatgttgagaaagcaactagagtatcttgctgaggaaaatggaaagttagtaggtcatcaaaacctacatcagaagattcaatatgtagtgcgactcaagaaggaaaatgtcaggcttgctgaggagacagaaaagttgcgtgctgaaaatgtacttttgaaagaaaagaagaagaatgaattctaaagatcccagccagctccctgcacatcactttgtttagtttggttctttaaaaccactgtacttgcccaaataacagagctaaactaaaagaccgtagttatgaatcatgttgcgcagtaatcctcagtattctgatgaatattctgcatgcaaacacagcaaactgttaagttattttatttcttttttttttggttttttgagacagggtttctctgtgtagctttggagcctatcctggcactcgctctggagaccaggctggcctcgaactcacagagatccgcctgcctctgcctcctgagtgctgggattaaaggcgtgcgccaccacgcccag

SEQ ID NO: 660 - DNA, 2690 bp, Cricetulus griseus
ggcggggcgggacccggggctcccgcgcgcactcggcggccaagcgatattaaaatgtctgatgatgccagtgacatcatagccaataaagtcaaagaagatgctgctgagatgccccatagtgactccccagctgaagatgcagaagtgcaatgtggtccagctatgacttcaaatgagccagtgccagctgaccacacaggagagcagcatgagaccacagctgcatgtgcagagactgcccctacagggcttctagagcagtccaaggccggtgctttaactgcagtcaaggaaaaggccggggcaaccctgcgaatccacagtgtcaattctggatctcctgaaggggtaccaactgatgccgaaaaatgcattttctgaaaatgtgactccagatcaggaccctgccgggggcccccacacttctcctccgccaggggcagcagggtcgaggggcatgctgtcagccctcaccaacgtggttcaaaacacgggcaaaagtgtcttaagcggaggtctggatgctctggaattcattggaaagaaaaccatgaatgtcctcgcagaaagtgacccagggtttaagcggacaaagacactgatggagagaaccgtttccttgtcccagatgttgagagaggccaaggagaaggagaagcagaggttggcacagcagctcacagtggagaggactgcacactatgggatgctttttgatgaatatcaaggtttgtcacacctggaagccctggaaattctgtccaatgagagtgagagcaaggttcagtcatttttagcatcgctggatggagaaaagctagaactcttgaaaaatgacctaatttctatcaaagacatctttgtagccaaagaatccgaaagtgaagcaagtccagaagaacaaggcctgcaagaaaagggcgaagaatttgctagcatgcttaccgaactcctgtttgaattacacgtcgccgccacacctgacaaactcaataaggccatgaagaaagctcatgactgggtggaagaggatcaaagcctggtatcaatagatgtggcaaaaagttcagaggaggaagagaaaaaggaagaaaaggaagagcaagctgaagagcctgaagaagacaaagtaggggagaaaggaactaagactgtagaggaagtgtacatgttatccatcgagagtctggctgaagtaactgcgcgctgtatcgagcaacttcataaagttgcagagttaattcttcatggacaagaagaggagaaaccagctcaggaccaagcaaaagttctgataaaattgaccacagcaatgtgcaatgaagtaacctccttatcaacaaagtttacaaattctttaaccactgttgggagcaacaagaaggctgaagtccttaaccccatgatcaatagtgtgcttttagagggctgcaatagcaccacgtacatccaggacgccctccagctactgctcccggtgttacaggtctctcacatccacaccagctgtttgaaggctgagacccagctagactccagctagttcagtggctggccaagtctgttcactacacaccatttacaggggacagtcttcaacatcacaggcgggaccacccatccaaggacactacaagcagttttgcacagttttgcaaatacagagagttaacatttctcttaatgtatattgttgttttatcaataattgtattttcattatattaacttaaacttatacttgttatattgacattttcctttaatttgcagttcattcacaaatacgtgtttccctggtcaaatatgctatatctagaaatccatagggagatcctacatttttgtgcatctttgaaatgtttatctttaagtgccctatttttctaaaacatggatttaagtcagttcttacactgaacttcattttgttgtataaatatcacaagcaaaaataacactacttatttggtttttaaaagggacataaatatattttcactatatagaccaggctggcctcaaactcacaaactgcctgcctctgattcccaagttctgggattaaaggtgtgcacaaccatgcctgcttggcctgaagaagtaggattttaatttaggatatatgatggcaaaattggaaagcttggatgtttttcaatagaaaattaaaggggttttagcatgtagaagcccagacctgccttccaaaaatacctactaaaccaatcacacacactgtggtgcaagggtaaaaaatactggtgtgtgttggccaagtggtatattgattcagggagacgcctcgaagaccttgcagctagcagtggcaatgacattgggctctttctgagccgcacctgctcttggcaggttggggtctgtggcatgcttctgttccagagcctcactgacaaccataccagcagttccaaaatagtcatgcccagtggctatatcctagagcaattgatgtgtgtagtcttcaaagggagaaagtcactatgcctttctttatttctgtgatagaatcaactgtctctgttccctacaggctaagtagatatttgaatattttcagcagcatttttttgtgtgtctgtgttttgtttctcagctgtatgtctcctgaaacaaccaaataaaaagcataaggccaatttatttgcaactcagaaaaataaaat

SEQ ID NO: 661 - DNA, 2690 bp, Cricetulus griseus
gccgccgccggcggcgcacacagtcgtgtccgctggggtccggtctatggagtcagttggcgcggccggcggcgcggaggcagggggcggtgtccgagtaggggcctctgccccgccaggatgtttccgggcttggccgccgccgtcgcggcgcacaggtgcagctgggcgacgctgtgcaggctcggtggcggccgggcagtggcccgcggctgcagccagggatgggaagaatttaaatgacatttggaagcttcacatacatggttcccaatagtcacccacatgtttgtactctaaatagagtcaggttgtactctacagatgtccacaatggaggggcaggggatcacaagctccaagagccgaaaaagtctcaccacctaaggaagcagcagaaaatataggcgcagaactcaaagccccacttaaacaagatcctctccaagtaagagtcaaagcagtccttaagaaaaggggagtatggatcaaaatacactaagaataatttcatcactggagtaagagcaataaatgaattctgtcttaaatccagtgatttagaacaacttcgaaaaatcagacgacgaagtccccacgatgatactgagtcctttactgtgttcttgaggtcggatgtggaagcaaaagctttggaagtttggggaagccttgaagctcttgccagggagaaaaaattgacgtaaagaagcagaaatagaatacagagaacggctgtttagaaaccaaagaatattaagagaatatggtgatttcttgggcaacacaaagccacgatccagagctatgtcagtgtttcttaaaggaccaggaaaagtggtgatggttgctatctgcattaatggcttaaactgcttctttaaattcctggcttggatttacacgggttcagcaagcatgttctcagaagctatacactcattatctgacacttgcaaccagggtttgctagcactgggcatcagcaagtctattcaaacaccagacccttctcacccgtatggcttttcaaatatgcgctatatttcttcattgattagtggtgttggtattttcatgatgggcgcaggactctcttggtaccatggaatcatgggattgcttcatcctcaaccaatggaatcccttctatgggcatattgtattttagcaggatctttggtgtctgaaggagcaacacttcttgttgccataaatgaacttcgaaggagcgctcaggccaaaggaacatcattttataagtatgtcatggaaagtcgtgatcccagtacaaatgttatactattggaggacactgcagctgtcctaggagtaataatagcagccacctgcatgggccttacctctgtgacaggcaatccattgtatgattccctgggttccttgggtgtgggcaccttactaggtgtggtctcagccttcctgatctacactaacacagaagcactcctaggccgatccatacaaccggagcaagtacaacggcttactgaactcctggagagcgacccctcagtaagggcaatccatgatgttaaagccacagatatgggcttagggaaagtcagatttaaggcagaagttgattttgatggacgagttgttacacgatcatacttggaaaagcaggattttgaccacatgctgcaagaaattcaagaagtaaaaactcctgaacaattagaggcctttatgcttaaacatggagaaaatattattgatactctaggagctgaagtggacaggcttgagaaggagctaaaaaaacgaaatcctgaagttcggcacgtagatctggagatcctatagatatgatgaatgagtcacttgggacatagagacatcttcctccccactgaaggggagtcagtgccgtccagtgcttctcaagctagatgggatatttcatgtgctgagcaattgaagaggccacaggactaaaactcctttcttctaatcatgtcttcatgcttttgtagggacattggctgcttagatcacccacagtttctcattttagccagtctgtattgaaccgtgaaatcatgtttcctttcttaacatggtaaaataagtgttccctgtggacttgtaacttaggttaccactgaagactttagtccatcgaagtcttctgatcttgaatattctggctaaaccttgttgtgtgttttttaaacagtcactgtgttttgagttctgtctttcctggccagttgggaaagtatttctgtatatattgtggtttcgacctgaacactgagaggcactctcctaacttcattatccacagatgttcattccagaaatggcgtagttactgaatggagtgaaggcatttcagcatcttttagatcatagtagttgccattttgtaaaatttcttctttctcctttactttttttccttatttggtttaatttttgtaatgttaaagacataatcctagatatatgactttttttttaagctggcttcagtgccatggtgtttatttactgggaaataatgcatttgtaaatgttttaacattctgtaaaatggactagaaatatttataattttacagtcaggatagcattttgtttttaatttatttaaaagaaggcactacttatgtaaatctgaactgtgggatactttttactttgagagagaagtaaatctc

SEQ ID NO: 662 - DNA, 2689 bp, Cricetulus griseus
gacttcatgacagtatatcggaagagggcttccattacttggtgtttgacttagttactggaggtgaactgtttgaagacatagtggcaagagaatattatagtgaagctgatgccagtcattgtatacaacagattctagagagtgtaaatcattgtcacctaaatggcatagttcacagggacctgaagcctgagaatttgcttttagctagcaaatccaaaggagcagctgtgaaactggcagacttcggcttagccatagaagttcaaggcgaccagcaggcatggtttggttttgccggcacacctggctatctctctccagaagtcctgcgtaaagatccttatggaaaaccagtggatatgtgggcatgtggtgtcatcctctacatcttgctgggtggggtacccacccttctgggatgaagatcagcataggctgtatcagcagatcaaggctggagcttacgaatttccatcaccagaatgggacacagtgactcctgaagccaaagacctcatcaacaaaatgctcaccatcaaccctgatcactgcctctgaggctctgaaacacccatggatctgtcaacgctctactgttccatgatgcacaggcaggagactgtagactgcttgaagaaatttaatgctagacggaaattgaagggtgccatcttgacaactatgctggctagtttgttgaagaaaccggatggagtaaaggagtcaactgagagctcaaacaccacaattgaggatgaagacgtgaaagctcgaaagcaggagatcatcaaagtcactgagcaactgattgaagctatcaacaatggggacttcgaagcttatacaaaaatactgtgatccaggcctcactgcctttgaacctgaagctctgggcaacttagtggaagggatggacttccacagattctactttgaaaatgctttgtccaaaagcaataaaccaatccacactatcatcctgaaccctcacgtgcacctggtgggggatgatgcagcttgcatagcatacattcggctcacacagtacatggacggcagtggaatgccaaagacgatgcagtcggaagagactcgtgtgtggcaccgccgtgatgggaagtggcagaatgttcactttcatcgttcggggtcaccgacagtacccatcaagccaccctgtattccaaatgggaaagaaaacttctcaggaagcacctctttgtggcaaaacatctgaaaaccattcacatttgggtcttctaattttcaacagtgccacttctgcactctgttctcaaggcacccggaagggtaagtcctggggacgtcctctcctcctcttcatgcatgtttctgagtgcatgaagttgtgaaggttctacatgtaatgcatatgtgacgcatcatcttatcatgtgacgcatcatcttatcatatattccttcctatacattgtttacactccagctactggatgggatgttccatgcaaacttaaattgctgttggcaaactatagagggaggtcagacaagaaaattccacaatattccaagttcaactaatccatcaggtttctctgttaacgccaagatttagaagatttaattaaaattattgttctctaaatgacagtttgtgacagaaaagtaaatctttttagaatgctgacattaatcttttggggctttttgttgggatttggggtttatatatatatatcttcagttcctggtgtgatcctggtagagagggcctttactgcctcgctctcactagctagtaaaatgagggatgttccccatcctcatagtgtttgaacttgatctttgtgactatgtagttctagcttctctcttgagtcacagtgtcatcttcctgctaggagccagggtttttcccgattaaaacaaagaggaaaaggaaatgccccagttttctttgtggttctcatttcttctttgttgtttcagtccctgtgaggctgtttctctgtgctgaaatgctttgccatgcatggaatctctatcagcattactccaaccatagctgcccacagtcctcagaaacctatttttaaagcagaggcaaaaagcaaaactaaaacaccctctcccctcttttttctcatttcaccttttggtattgattgctaatcactttagatattgttgctagtgaatgtatgatagatgggttgaagcttttctgataattacatgatttaaaacaatatatatttaaaatgaatatatacagtaaacgtattgagccgtgttaacctgccaatgagatctgtgaaaaatgttaatggcctcacttttccctttttcatttctttttatctttttgtgaagcaaatctacgtggcatacatgtatttaaaaacacaaatagtagtagaattgttttttttttttgtttttttgttttttttttgttacacttttaacttagcatgtggtgttgaagtattaccatagatccagtttgtcttctgcactaagatgtgaggaaattgtgatttgttctctccagcacagtggaatcacacattcatcatcttccattgttttgaaaacactgcagattaccatggacactgtatatatttcttgccataatggtaaacgactgattgatatatttaagagttaataaatttgtgatttctgctgaacaa

SEQ ID NO: 663 - DNA, 2689 bp, Cricetulus griseus
tctcctggacaaggagagagtgcggctgctgagagccgagcacagcaatcctgatcctctgagtcgtgaagaagggagacagcaagggggttggggttggggcctgaggcaaggctctgctcttgccagagagacaagagctatggctcagaaaccggacggcggtgcaggcctccgcggctaccaggctgaggcctctgtagaagacagcgccttgcttgtgcagaccttgatggaagccatccagatctccgaggctccacccaccaaccaggccacagcagctgccagtgggcagaatgttagtccccagagttcacagcccccaactgccaatcagatggctgatactggggtttcaacagcagctgctaggcctaagacaggctttagagcccagaataccttctcaaagggtccaaatgatttctctcacgcacgtaatgccaaggagatgtccaagaaccagtctaaggcggcctataagtcacataatggcacctctaaagggccaaatgctgcctctaatttttcccacggagcaaccacaggcaaatcagcagctaaaaagtctgaaatagcctttaaggtccagaataccactactaaggcaggccctggtgccacctacaatttctctcagtctcccagtgccaatgagatgatcaacaaccagcctaagacagctactaaggcttggaatgataccactaaggtccctgcagctgatgcccagatccagaatgtaaaccaggccaaaatggctaatgtagggaccagcccaggtatctctgaaactggtggtgcagctgcacagacctcagccgatggctcccaggctcagaatgtggagtctcggactataattcggggcaagaggacccgcaagattaataacttgaatgtggaagagaacagcagtggggatcaaaggcgggcctcactagcttcagggaactggaggtctgctccagttccggtgaccactcagaacccacctggcgcaccccccaatgtgctgtggcagaccccactggcttggcagaacccatcaggctggcaaaaccagacagccaggcaggcccaaccagcacgtcagaatcccccagctaggcagacagcaacagcttggcagaacccagttgcatggcagaatccagtgatctggcctaacccagtgatctggcagaatccagtgatctggccaaaccccattgtctggcctggtccaattgtgtggccaaacccaatggcctggcagaatgcacctggatggcagaccccacctagttggcaggctccacccagttggcagggccctcaagattggcaaggccctccagattggcagataccccctgattggtcattgccccctgactggtcattttccactgactggccttttccacctgactggatccctgccgattggccgattccacctgactggcagaacttacgaccctcacctaatctgagatccaccccaaacgcccgtgcctcacagaaccagggtgctccccagccccgagatgtggcccttcttcaggaaagagcaaataagttggtcaagtacctgatgcttaaagactacacaaaggtgcccatcaagcgctctgaaatgctgagggatatcatccgagaatacactgatgtttatccagaaatcattgaacgcgcctgctttgtcctggagaagaaatttggaatccagctgaaggaaattgacaaagaagagcatctgtacattctcatcagtacccctgagtccctggctggcatactgggaacgaccaaagacacgcccaagctgggcctcctcttagtgattctgggcattatcttcatgaatggcaaccgtgccagtgaggctgtcctttgggaggcactacgcaagatgggactacgtcctggggtccgacatcccctccttggtgatctgagaaaacttctgacttacgagtttgtaaagcagaaatacctggattacagacgagtgcccaacagcaaccctcctgagtatgagttcctctggggcctccgttcctaccatgagactagcaagatgaaagtgctgagattcattgcagaggttcagaagagagaccctcgtgactggactgcacagttcatggaagctgcagatgaagcattggatgctctggatgctgctgcagctgaggcagaggcccgtgctgaagcacgaacccgcatgggaatcggagatgaggctgtgtctgggccctggagctgggatgacatcgagtttgagctgctgacctgggatgaggaaggagattttggagatccttggtccagaatcccctttaccttctgggcccgataccaccagaatgcccgctcccgatttcctcaggcctttactggccccattattggccccagtggtaccgctactgccaactttgccgccaacttcggtgccattggcttcttctgggttgagtaaaatatcagatcctgctcatcatttgcaatagttttccctctgagtgaggctgaagcctcagattccttcaaaacacagctatctagagagccacatcctgttgactgagagtggcatgcaagataaatttatttgctattctgtctgttacttttttttttccttgtgtgttgtcaagttttggtatcagaaataaatgttgaaattgcaaatgaa

SEQ ID NO: 664 - DNA, 2688 bp, Cricetulus griseus
tgatggcacaggtgtatttgtctcaggaaaaagtcaaactgtgttctcagtctctggaactttgtttgagctataattttaatgtgagagactacccattatatcatttaatcaaagcacagtcacaaaagaaaatgggagagatagcagaggcaattaaaactctacacatggcaatgaacctaccaggaatgaagagaagtagagcctcctcaaagtcaaaagcacagaactgaggttgatgcgagccatcgtttatcaatctttcttgagttggtggaagttcaccgcttaaatggagaacagcacgaagcagcaaaggtttacaagatgccatccatgagttttcaggaacgtgtgaagaattatagaggccaaagaaaaatggcagatatttacctgaagcatagaaaagagaaaatgttgtatatcacctgctacagagaaattgctgaaagaatgcccagtccccgggcctttctgctcctcggggatgcatacatgaacattcaagagcctgaagaagccatagtggcctatgaacaagcattaaaccagaaccccaaagatggaacactggcaagaaaaattgggaaagcacttatcaaaactcataactacacaaaggcaatcacctattatgaagctgctctgaaaagtggacaacagaattgcctttgctatgacctggctgagctcttactaagactgaagttgtatgagaaagcagagaaaattctccagcattctctagctcatgaacctgtaaatgaattgtcagctctcatggaagatgggcgttcccaagtccttctagaccaaagtttaactcaaaaatggaaagacccagtgatgcgattgcctcgttacagcaggctcgagaactgcaggctcggatattgaagcgcgttcagatggagcagccagatgcagttccctcacagaaacacttcgcagctgaaatttgtgcagagattgcaaaacactctgctgctcagcgagattatgaaaaagcaattacggtttatagagaggccctggttcattgtgaaacagatagtaagataatgctggaactggcacaattatacttggcacaagaagaccttgatgcctcactgaggcactgtgcactgcttctccagagggaccaggataatgaaccagccaccatgttgatggctgacctcatgttcagaaaacaggactatgaacaagcagtgtttcatttgcagcagcttttagaacgcaaaccagataattttatgactttgtctcgtttgattgatctcctgagaagatgtgggaaacttgaggatgttccgagatttttttctatggctgagaaacacaattccagaacaaaattggagccaggatatcagtactgtaaaggattacatttttggtatactggagaaccaaatgatgcccttcgacattttaataaagctcgaaaagatagtgattggggtcaaaatgcactttataatatgatagaaatctgcttgaatccagataatgaaactattggaggtgaagtgtttgaaaaccttgatggagacctgggtagttccactgagaagcaggaatctgtgcagttagcagtgaggacagcagaaaagctcctgaaagaactaaagcctcagacggtccagggccgcttgcaactccgagtaatggagaattgctgcttaatggccactaagcagaagtccagtgtggagcaggcactgagcaccttcactgaaatagcagcctccgagaaggatcatatcccagctctcttgggaatggcaacagcttatatgatcttgaaacagacgccaaaagccagaaaccagctgaagcggattgcaaaaatgtcttggaatcctattgaagccgaagacctggagaagagctggctgctgcttgctgatatttatattcagtcagcaaaatatgacatggcagaagaattactaaaacggtgcctgtgccataaccgttcttgttgcaaagcttatgaatacatgggatacattatggagaaagagcaagcatatacagatgcagccttcaactatgagatggcatggaaacacagtaaccagacaaatccagcagtgggatacaaattggcatttaattacttaaaggcaaaacgatatgtggatgcaattgacatatgtcaccaggttcttgaagcacatccagcttaccccaaaatcagaaaggatatacttgataaggcccgtgcatctttaagaccttgaaaatgattgttttcgtcaaactgttgagcaggagacagcatggatccgacagcctttgcaatacacacagctcctgctgacagtgtcacagaagcatgtccccctttctccagcagaggctgctgctgtccatggacaacactgactgtggcatttgctggtggagaggctgggtgagacctgacctttctctcttccattaggcgcaaatgaggcagttctgtgataaagactagctcatttctacagaggatatttttgttaaagtcaaggtgatataccttttctaaagagtattagattttccacgatcctatttaaagtcaacagttacctgttaatttttattatactttatgatataatcttgtgtaacttatgaaaaatagtatttttaatgtatattttaataaaggttttgtgaataaaa

SEQ ID NO: 665 - DNA, 2688 bp, Cricetulus griseus
acaaaatgaagaattaccttgttacatgtcccctgtgtacctcagaccgagggagctgtgttagtaccacagaagggatccagcttgccaaagaacttggagctacatatctggaactccacagccttgatgacttctacattggaaagtattttggaggagtgttggagtattttatgattcaaaccttaaatcagaagacaagtgaaaaaatgaggaaaaggaaaatgacaactccttccatggaattagaccgcctcaacttgaacaaccagaaaaagatgcctgtcttgaaagctgaagcatcacactaccactctgacttgaacaacttgctattctgctgccagtgtgtggacgtggtgttttaccacccagaagtgacaggcatcgtggaggccccaggtgctagccagggatcttccagcaacccacccctgcgagtcatcgtgaaggatgccctcttctgctcctgtttgtcctacattctgcgcttcatttattcaggtgcttttcagtgggaggaactagaagaagacatcaggaggaagctgaaagattctaggggacgtctccaatgtcatcgaaaaagttaaatgcattttaaaaacaccaggaaagatcaattgtctgaggaattgcaagacctaccaagccaagaaagcctctgtggttctataatacgtcgctcaagtttttccttaataaaccgatgcttgctgatgttgtcttcgaaatacaaggaacaactgtgccagcccaccagagccatcctggtggcacgatgtgaagtgatgccgccatgtttaatggcaattactcatggaagccaagagtgtcctgatcccagtttatggcgtttccaaagagactttcttgtcatttttagaatacttatacacagactcttgttgtcccagctggcattttcccaggccatgtgtcttttgatctgtgctgagatgtaccaagtctccagactgcagcatatctgtgagctcttcatcatcacacagttgcaaagcatgcccagcagggagctagcctccatgaacctggacatcgtggacctgctcaaaaaggccaagtttcaccattctgactgcctttcaacttggctgcttcatttcatcgccaccaactacctcatattcagtccaaaagccagaatttcaagacctttcagtggaagaacgaagttttgttgagaagcacagatggccatcaaacatgtaacctgaagcagctggcggagtataggaagtatatccactctcggaaatgccgctgtttagtcatgtgacctgcgctttttgtatacatacacttttttattattatgaagaatgggtaacctctgggttccagtaaaattcttataactaaatcggtatggtattttaaaaagtcaccatacagcttcttattgcctatctttgaaggactgtggcagtcttaaaaggaagcacagtctacagacttcagtgcttcccctagaatgtaagactgttggacagtggcttctcctctaggttgccccattgctgaaatgctttttcttggccttgggacactagctcacttctggctctatcccggaagagcaaaaacttgatcaatatgtgaagccaggaagttgataggagtgactgagtagcctgactataatacacagttacaaagacaatcacagggaaagatgctttgtagagacttggctacaaaagcttaagagttctttcatttaatatcactgtttagtgttagcatcgtgggcatctggaatttagtactgggatatacttttctaatttccagtgattttaatatgcatattttctccaactttttcaaaaagtttgattcaacagtctttcctgtagtgttaggattacatgcaaaaaagcccttttgtgtgtaaccagtactgtcaaaataatgggaaagaattcttttagctagaatcccaagaaagctcatattaattgtgctgtgtcagtgaagattattggaatgaattttggtgttttgtattttaatcacttgaattattcaactattggcacatcccatttggtggcttagcattgtaaagaacagaatatagcaatacctagaagttcctttgcaattttagatcacatggtagccttttgatactcagaagcaatatgctcaccctctgtgctaatcacagcatttaaaattccaaacttttaggaaattgaaaaataggagttgaaaacaaaacattttcctggaaatagtattttaacattcatcctattgtgcattctttgtatgctgctggctacttcctcccagtcctactacaggggactagatttctaatagagagcactggcacagtgactgaagcccacccctgtacaagccatacttgggcttcatactgaatactggaagactgaggaatcagatgaatttgacttccaagagagccaaacttttcaactgtaattttacaaataacactacactgatatagccaattaggtttaaaatgtcttcaaaattactttattttatttaaagcatctgtttaattcaacttttaatcagattttgcaaagggtatgtatgtattttaatatagcctgacctgaatttatatgtttttagctttagtatttaatgttttataacaaataaaccattttttaaaaa

SEQ ID NO: 666 - DNA, 2688 bp, Cricetulus griseus
tgtattgtgcacattcacacaccaggcaggggctgcggtctctgcaatgaaatgtgggctcttgcctatctccccggaggtcactttcccttggagatgttgcttatcatgactatcatggcattttggttgatgaagaggaaaaaattttgattcagaaaatcttggtcctaaaagcaaggttctcattctccggaatcatgggcttgtgtcagttggagagagtgtggaggaggccttttattacatccataaccttgtggttgcatgtgagatccaggttcgaactctggccagtgctggaggaccagacaacttagtcctactggatcctgggaagtacaaagccaagtcccgttctccagggactccagcaagaggagagcactggatcacctcccacatggcagattggggagcaggaatttgaagctcttatgcggatgctcgataatctgggctacagaactggctacccttatcgataccctgctctgagggagaggtctaaaaagtcagtgatgtggaagtccctgccagtgtcacaggccactcctttgtcttagttgacggtcgtattcgggcacttgttcgcctctcagacacagttttcagaagcagcagcgagagaagacaagatggctgaactctggccggggtgatgaagcttctgaggaggggcagaatggaagcagtcccaagtcgaagactaagtggactaaagaggatggacatagaacttccacctctgctgtccctaacctgtttgttccattgaacactaacccaaaagaggtccaggagatgaggaacaagattcgagagcagaacttacaggacattaagacagcaggacctcagtcccaggttttgtgtggtgtagtgatggacagaagcctcgttcagggggagctggtgactgcctccaaagccatcattgagaaagaataccagccccatgtaattgtgagcaccacaggccccaaccccttcaacacgctcacagaccgtgaactagaggaataccgtcgagaggtggaacggaaacagaagggctctgaagataatctggacgagacaagggagcagaaagaaaagtgtcccccaggccagtcagctgtccccagcactcctcccagcactcctgtcaagctggaagaagaccctccccaggaaccgacatctggggatgacagtgatgccaccaccttcaagccaactctccctgacctctcccctgatgagccttcagaagcacttggcttcccagcagtggaggaggaagcccatggttccccagagcccactcagccccttgctgaggctgaccctgagccagcctcagcttcagctccaggggctgaagaggtagcctcccctgccactgaggaggggtctcctatggatgctggcagcgatgggtctccaggcaagtccccatccaaaaagaagaagaagttccgcaccccttccttcctgaagaagagcaagaagaagagtgactcctgaagacccaccctgcacactgtcatgtctaatgacctggctctgccaggattccctttctcatcatatattctgtcctcttgtgtaatggaatgcaaaaagccaagacctccatgtaacttgagcctcctcccatgtgtggtcatccccttcaccagtgatgagtgtgtgctcaacccccctaccctgggccttgggttctgtggggaaatgggcttagcctgcacctctgagttgtgccccccctgcaggagggggacactgaatcctggtcctggctggaaggcatcagaggcttctgccagctctggttacagcgtcaccctcctgagccttgccgctctctctccttctgttgtgaatattgaattgtctgcttggtttccctccaccctgtggagtctcaggtggctgatttggcttctgctggcatcctctgctcggtgatgtcagttatccccatacacagggaatccagcatccagcatggtctgagaaaacactctcatgcccatcagcagcccagggcactgtggctgccttaaagtttgagcctgctgctctagcagtgagcgaccctgtgtacacccagcacaatgctatgcatggtctaactggtgaccccatgaccaaaaccagattcaggcgttcatagtttatcttactggagtcttggattcccatcatagggaacagataccaggagggggaagagtcctttctagaactttctttcagtgggtttgcaatttagcctatattttgactgtgaatttgaacaggccactttttgctttagtttttgttgtagagcctgtgacagactgcagaacacttgacttgtgtgggaaggttttataaaaggtcactcatggtagaagcctgccttggaggtgccaacttattaacgttttgcatcattcatggagcccatgactttcttgatccatcctattgtgaatttttactttcatccctggaaaagggcttctcatcctccctcctgctccttcttttatcccacatatgcaatgacctcccacttttctagtctaattctttgtattacacatggaataccattgcatatatggatagacttggaggacgggtcctgtgtgtcctttcctcattgtaacaggttttactcacaaataaaagtctttaagcagtttccttgtc

SEQ ID NO: 667 - DNA, 2687 bp, Cricetulus griseus
  modified_base (2439)..(2439): a, c, t, g, unknown or other
cgccggcagcagctcggcgccccggcggtccatggaccggaaccccgggcggaccggcaggaacccgggccgcgaccgccgcctcccggccccaggctcctccccctcgctccccgccgccccctgcggacgcccgccggccgcgcaccgccgcggcgggcctcacggagccgcgccgggaggctgtgtggcggggccgcggacgccgcgggactgaggcctactccgccgcctctcagtgctattgtccccgggcctggccctgagcggagctgcgggcgagggccgagctcgccggctccgcggaagatgccggaccaagcccttcaacagatgctggacagaagttgctgggtgtgttttgccaccgatgaagatgatagaacagctgagtgggtgagaccatgcagatgcagaggatctactaagtgggttcatcaggcttgtctacaacgctgggtggatgaaaagcagagaggaaacagcacagccagagtggcatgtcctcagtgcaatgctgaatacctaatagtttttccaaagttgggtccagtcgtttatgtcttggatcttgcagatagactgatctcaaaagcttgcccttttgctgcagcaggaataatggttggatctatctattggacagctgtgacttatggagcagtgacagtgatgcaggtggtaggccataaagaagggctggatgttatggagcgagctgaccctttattccttttgattggacttcctactattcctgtcatgctgatactgggcaaaatgattcgctgggaggactatgtgctcagactatggcgtaaatactcaaataaactacaaattttgaacagtatatttccagggattggttgtcctgttcctcgaattccagctgaagctaatcctttagctgatcatgtctcagctaccagaattttgtgtggagcccttgtctttcctactattgcgacaatagttggtaaactgatgttcagtagtgttaactcaaatttacaaaggacaatcttgggtggaattgcttttgttgccataaaaggagcatttaaggtttacttcaaacagcagcaatatttacgtcaggcacaccgcaaaatcctaaattatccagagcaagaagaagcataaaactgacttctggttgttctgaggcctctcatcctgacaagtctgttgtgttgttgtgactccatcattaatgcactagtggagacttgtgaagctactgctcctatcttttaaagaaatgtaataaagcacgcagggcaggggatcctctcagtaatcacagaactaaggatacgattcaacctggttatttgtatgcactgctttgacagccgttggctaaaccattatcttagcatggtaaacctgggtttgttcatatttttccagacaaaaatgtaaagctaaaactgtacaaatattaaaatggacatgctgttttattctgatgcctcttttgtatatactcatgttcagtgttttcttaggaataccaactcaaatgaaggtactgtgaggacttttctcactggcataatttgattacttgctaaacaggagcctgtgttaatatgaggaaatgtaaatttataggatagccaatactgatgtttttatggtgttttgtttttgagtcagggtctcttacataggctagcctcaaacttcctgtgtatctgaagatgaccttgaactcctgatcctcccaatcacaggcgagcaccatcgcacctgctgttttatgcaatgcttatgattgaatccagggccttctgcatgctaggtaaacactaccaattgagctaaggcaccagccctctttagattctaattgtcatattcagggggctagctccttaatagtctttatttaactagttttatattcattgttcaacaatgaatttaggtcatgtttaatagtgacttattttaatgttcagcaatctgagttcacagtatctgatgcatgataataaatggtccctcttactgagaagtggatactttcttttggagtgtaacaaatatagattgagctatgttagattgtaaataaaacataattttagtaaagactgatatctttctgtaggttggatatctgagttttatggtgtcaatgtgaatgactatgaacatccagagttgtaattatctagggtataagggacaatttgactgagttaaccctaacactgctgttgttctgaagagaaattatgagctctgattatacataaaaataacttagatgtctagctgtaattatgaaatatactggcttctataattcccagtgtgaaaagatatattagaaatttccttgataaatttgttaaattgagcagcattttcacagttatgcaagcactcagttccctatgtactacattaatgtccctttttttnttttccttccttccttccttccttcctaattcaatgattagtacaattctgttgaagcagttaactccatctaagtggctgaaaatattgttcattacatacttaccaaatgatcgaagaatatataattaaatctagtgacttcattagtcactgccttgctaattctgctgtaatttttttaatatcttgttttaatatagaaaactcaatactagctggattaggttgaataaagaatttttatg

SEQ ID NO: 668 - DNA, 2687 bp, Cricetulus griseus
tcccgcagactgctctgggccgccacctgcctggccgcgctctgcgtggcgacagtgcagcagcagaacagcaccgtaaccccaactcccaacgtgaccgagccctcgaccgtaaccagccagccaccccgacgacgctcacgcccaccacgctgccagaaacctgtgagaaccgcaacagctgtgtttcctgtgtggatgtcaccattaataatactacctgcttttggattgaatgcaaagaagctaatcagacgtattgttcaagtgattccttgagcaactgtactgtggtgaacaggactaactcctgttctgtagtgcctactgtcactccagtgccaaccaactctacagctaaacccacaattcggccttcgtctcctacacctacttcctcagttgtcacatcagcaggtacaaccaataccaccctgaccccaacctcacaacctgagcggaagtcgactttcgacgcagccagcttcattggaggaattgtccttgtcttgggcgtgcaggctgtaattttctttctctataaattctgcaaatctaaagaacgaaactaccacactctgtaaacagacccgttaaatgaatgcggactggcagttaatgtgtaattcactgaaaccaaaatattatctttcatgatgtcccacatggaagtcactgttccaggacctttacatttccaaaggatgcatacaggatattgtggagcatcgtccttgaaggaaagtcagttaaaccattttgctcaacaggaatatttaaaaaatattctgcatgaatccatgtggctgtcttttgtttaaagtggctgctgctgtgagattgtttttttctttgacatgccaaatgtaactttctgtaagttgtggaaagtggtatcctgtgcaggcaacctctgactggcagtttaaatgtggccatttaaaaacctaaaggttgtgttcttttcctcctaattccaggtatgacttagtggccagaattgagaagagtgccaaatgggcaccagtcaggtagactgagggcttgacttcaaaagtagactaaattcacttagtactaagctacctttagagtgttgtgcttgatgagtaatagtttatacattagaaataagatgccgttcagggaatcacattccagatttagagaaagggaagttgcaaaccattaccgtgtaacaggttttgttcatactcataaagcaccgtgttaagaaaacagaacagtgccttaagacagactgagatggtggcaggacaaaaatatgttcatgttgtggaaggtcaagcttggtctgagaatgtaattgttgatgtgagcagcagtgaacctgcttgtagataacatactgttaatatttaatttaaacattgatttctccagagctgagaaatagaagttaaagaataattctaagctgaaaggcttcctgtatcaaaccatctaacatttttcatagggctgttgaatagacataaaattgatttgattatctttccctctgtacacagagtatccaaatattactgtaccttaaggattcctacgaggtttccctgaaaagtaacttttcatgaggcaggaaggaagtagttgtagaatcattttctagttgttaaaatgagacaatcactttgttttctaacagatgtgaccggtgtaacttaaaaccctgaggtttggggggagattgcagtaggtttctaatgatgatgccctggctgataggctgttctctctcttttttggtctttaatccttttcttcctccttggtttcagttcccactgaagtgctgtaatcatgcatacttttatttctttagctttagggaaagcataatttgtttagttttagagttcctgcttccttgtctctcacacatggactagtccaagaggctctaattggaaatgggcttttggtttcctgtgtcatttaaggttttctttgtcacttgctggtccagctcaagtttgttttacttgcacatttgtgcgtacgcctaatgtttcaagtgccttacttgtttaaaatctctggcttcaaagggtttttgggaaagataggtttacctcatagttttgtttccattataatattctaggtacctcacaaaatttattacagtgctgtggctgttagttttaagtaagtgctaaagttcttttgaaaatacacagaatttccattccttacaaggtggtaaaattggtataattgtcattttcctctatgtgatgtctttgccccatataaatgtcagcacatgtagcaagttctgtgagaatgtaaattaatttgaagctcctgtggttttgagcattgctctaacatggtaggaagttagtgacattttgcaagtctctccataagctctgctacagaattcacagctgccctcactcttcccatcttcgtttagcaaggtagtattttgaaccattaatgatttttgggtttccttttaatccagaaggtatatagaaaccttttcagagttttcatctgatttgtcctgaagatctagttctatcaaataccttattttacctttcctgtacttgctgcacaagcagacactgctgtacttagaaatttctatttgagttcaataaaaactacaaaactaatctgtttgtgtaccaaactgatttaaaataaat

SEQ ID NO: 669 - DNA, 2686 bp, Cricetulus griseus
  modified_base (18)..(18): a, c, t, g, unknown or other
  modified_base (86)..(86): a, c, t, g, unknown or other
gagttgagaaagggagangttttggtatttgagcgttgccaggatggctggtcaaagggacatcgatgcacaccagcaagataggngttttccccggcaactatgtggctccagtcacaagagccgtgacaaatgcctcccaagctaaaatctctatgtctactgcgggtcaggcaagtaggggggtggactatggtcagcccttcgacttcaggagggcctacccagaagctccaaggaaacggtgtggctgggaatcccagcatggttcccacggctgtggtgtcagcagctcacatccagacaagtcctcaggctaaggtcctgctgcacatgactgggcagatgacagtcaaccaggcccgcaatgctgtgaggacagttacagcacataaccaggaacggcccacagcagcagtgacacccatccaggtccagaatgccgcctgcctcggtcctgcatctgtgggcctgccccatcattcactggcctcccaacctctgcctccaatggcaggtcctgctgcccatgttgctgctatcagcatcaatcgaaccaatgctcccctggcctgcgctgcaggtacttctctggccaacccaaacatgaccactgccactttggagactgaacccagtcggtcgaacagtgaccatccctccctggactccccacgtctcctgacagtgggggaggtgcccttgcaaggagcaatgggtcctgaattgccgctaggggcggccacgggcgggcgggctcctgctccacagatggagatggcccagtggtctctgggacagcatccttagctcaggatgctttccatcgcaaggcaagctccctggactccgcagtgcccatcgctccaccacctcggcaggcctgctcctccctgggtcctgtcatgaatgaggccaggcctgttgtttgtgaaaggcacagggtggtggtttcctatcctcctcagagcgaggcagaacttgaactcaaagaaggcgatatcgtgtttgttcataaaaagcgcgaggatggctggttcaaaggcacgttacaaagaaatgggaagacaggcctttttcccgggggagctttgtggaaaacatctgaggagacgccacaccgagcaagggtaacatcgcatcacatgactaaagagcacaaaagcagcgtcataggaagagcacatctgtggacttccagatcttcaggagctgagcaaggatgggcacctgactccagattcccggtgggctaccccagcgggcagagtgaaggcggcacctgtgtgggtcccgccccctcggggcttctgatgtgtaaagtgtgccttgtactgtctaaatgggctatacagagaaatgtttctttctttttttaagatgtataactaaaatggacaattgtttacaaggcttaactaatttatttgctttttaaaaaaacttgaactttcttgtaatagcaaattctttggattatgatttttaaaaaatattaatttatgaaatgatggtgaagctggattctctcccattgagagcaaagagattctttttgacatagaatgcatgggaagtaggagaaagttgtagttgctgtgtgtgaatgactttgaaatgtaatttccctgttaccctcaagtgatctgcatgcccaagacacagtaaaaatttgtgagacagtggtggtaagagatgcactcgtgttgaagtcaaaggctgtaagaaacgctgtgaaagttcccattgatccattgtgattcctccgccatcttgcatgtgttaccggattcccacagtgatatggactgtgcatggtgtgtatatgtcatcccagttttcactcagaattgacctatacaggaaggtttaaggagaccactggctcctgtgactgttgaagctctgcaaggcttgctgggagtggctgtgcccacaccttacaattgtggcagggtccagccgagcccatctttttttttttttttttgtttttttttaactttaagagaaaagaagctgggaaatattgacatgaactgaagaatcaagtaatggcaagagattttattgtcttaaaaagatatgtaatgtggttggaagtggaatcattcctgttaaccatttttttttatatatatataaaacactgtatattatgttcctttgtgttgaattttttttaaaaaaatactttacttggatattcatgtaatatataaaggtttggggaaatgaactttagttaggaaaaagctgacatcaatcagctttcatctgtgtgagttgacaccaatgtgtcataatattctttattttgggaaattagtgtattttatagaaattttaaaaaagcaaaaagactactacaagttaagatgatttttttttaacctgtcttttctccatattttcagctatgtgactgaaatatccctggtaatagtttcctggtataaagttggttaaaatttcatctgttggtagatcattaggtgatataatgtgtgggctttctgttgggtttttttggcgacagtagatggatgttgtaacaagggcttgttacacagtggtggtaatgataaaattacaatttatcattccttttatgttaattttgaggactggataaaaggtttcattattaaaacttgatgttcaacccttataaaaaaaaaaaaaa

SEQ ID NO: 670 - DNA, 2686 bp, Cricetulus griseus
tatctacaagcagaaggtggaggagaccggcagctcacagacagggagaaggagatcatccgccaggcagctctgcagcagacgaaggagatggacttgagtgtggtgcgcctcatgttcacagcctttcttcctgacagcaccggcagcttcacccggagactggagcccgtggtgggaagtccagaggaaacgccagaagctcatgcccaacttctcggacagtttcggcggtggcagtggagccggagcgggcggtggaggcatgttcggtagtggcggtggtggagggagtaccggaagtcctggcccagggtatggcttctcgcactacggatttcctccttacagtgggatcactttccaccctggagccactaaatccaactctgggatcacccatggaaccataaacacagaatcaaaaaataaccctaaagactgtgacaagagtggcgacagagaggctctgaatctctctgagaaggaaacagcaggacaggataaggaagtctggcgtgtccagcaccaagagtgatacagttgcactgtcattccccatggaagacaaggaatggggcgctggctttcgggataacctctttcttgagaaggctctacagcttgccaagaggcatgccaatgcccttttcgactacgcgatgacaggagacgtgaagatgttgctggctgtgcagcgccatctcaccacggtgcaggatgagaatggggacagtgtcttacacttagccatcatccaccttcatgctcagcttgtgagggatctgctagaagtcacatctggtttgatctgtgctgacatcatcaacatgaggaatgatctgtatcagacacctttgcacttggccgtaatcaccaagcaggaagatgtggtggaggacttgctgagggttggggctgacctgagccttctggaccgctggggtaactctgctctgcacctggctgccagagaagggcacgacaagatcctcagtgtcctgctcaagaacagaaaggcgacactccttatagaccaccccaatggggaaggtctaaatgccattcacatagctgtgatgagcaatagcctgccatgtctactgctgcttgtggctgctggggcagaagtcaatgctcaggagcagaagtctgggcgcacagcactgcacctggccgtggagtacgacaacatctcgttggctggctgcctgcttctggagggcgatgcccacgtggacagtaccacctatgatgggactacaccgctacatatagcagctggcagaggctccaccagactggcagctcttctgaaagcagcaggagcagaccccctggtggagaactttgagcctctctatgacctggacgactcttgggagaaggctggagaggatgagggagtggtgccaggtaccacacccctggacatggctgccaactctcaggtctttgacatactgaatgggaaaccatatgagcctgtgttcacatctgatgatgtactaccacaaggagacatgaagcagctgacagaagacacaaggctgcagctctacaagctgctggagatccctgatccagacaaaaactgggccactctggcacagaagttaggtctggggatcctaaataatgctttccggctgagtcctgccccttctaaaactctgatggacaactacgaggtctctgggggcaccatcaaagagctgatggaggccctgcgacagatgggctacacagaggccattgaagtgatccaggcagacttctgcaccccggaaaccacagcctccagccccgtgaccactgctcaggcccacatgctgcctctctcatcttcttccacaaggcagcacttagatgagctccgggacagtgacagcatctgtgacagtggtgtggagacatccttccacaaactcagctttacagagtctctgcctggagacagctcactgctatctctgaacaaaatgccccacaattatgggcaggaaggacctatagaaggcaaaatttagcctgctggccatttcccacactgtgtaaaccaaagcctgaaattccattgcatcaatccagaggaggaaggcagagtgaatccaaaggtgctggaggattaccggcccaccgggtcattcttgatttcattcaaggccttccgaatttggcttcctttctgggttctaaaatgaactttagttgtcacattcagatggtatctagcaatcagtggcttgagcttttccagctgctcctggattacacttgctttgtgttgttgctgctgtccctctgctgggtccctgctgtcattaaaaggtatcactgtccccacctggtgttctttctagccatctacagtacagttgtgcattcaaattaaggttaaggaaaagatatttttaaatgagtaccttgatgagtaataaaaaaagattgctttttctaatgtggtttatctgtgattttagaaaaacacatgaacttaacaatatttaaaagatgctacaatccatgctgagaatattatttccccccttctgcattttactattgtaaatatgttttctaaatcaaatactttaaaagaaaaatgttggatttataaatgctattttttattttacttttataataaaaggacaagcacattgttgacctcaaaaaaaaaaaa

SEQ ID NO: 671 - DNA, 2685 bp, Cricetulus griseus
tgtcttcgttctattatgagaagagtgaaccataaagaccctcatgttgctatgcaagctttaactcttctaggagcatgtgtatcaaactgtggcaaaatttttcacttagaagtatgttcaagagattttgctagtgaagtaagcaacgtattaaataagggtcatcctaaagtatgtgaaaaattaaaggctcttatggttgaatggacagatgaatttaagaatgatccgcagcttagtctgatatcggcaatgattaagaaccttaaggaacaaggtgttacattcccagctattggttctcaggctgcagaacaagcgaaagcaagtccagctctggtagccaaagacccaggcactgtggctaacaaaaaggaagaagaagatttagcaaaagctattgagttgtccctcaaggagcaaagacagcagtcaactaccctttctactttgtatccaagcacatctaatctcctaactaaccaccaacatgaaggcagaaaagttcgtgctatatatgactttgaagcggctgaggataatgaacttactttcaaagctggagaagttattacagttcttgacgacagtgatcccaactggtggaaaggtgaaacccatcaaggcatagggctttttccttctaattttgtgactgcagatctcactgctgaaccagaaatgattaaaacagagaagaagacggtacaattcagtgatgatgttcagaaagaaacaatagagccagaaccagaaccagccttcattgatgaggataaaatggaccagttgttacagatgctgcaaagtacagatcccagtgataatcagccagacttaccagagctacttcatctcgaagcgatgtgtcaccagatgggacctctcattgatgagaagctggaagatattgatagaaagcattcagaactctcagaactaaatgtgaaggtgatggaagctctttcattgtatacgaagttaatgaatgaagatccaatgtattctatgtatgcaaaattacagaatcagcagtattatatgcagtcgtctggtgtttctggttcccaggtatatccaggacctgctcaaagtggtacctacttggttacagggagtgcacagatgagccatctccagagctacagtctgcccccagagcagctgtcttccatcagccaaggagcagttccaccctctgcaaactccgctctccctagtcagcagacccaggcttcttacccaaatgcaatggttagttctgttcaaggcaactcctatcccagtcaagcttcaatatatagttctgctgctgctgctgccgctgctgtacctgttcctgtacctgtacctgtgcctgctgatgtcaccatataccagaatgcaggacctaatatgtcccaggtgccaagctatactttaacatcatcatccctgcctcaagcaggaggcacccaacagccacctcagccacagcaagcatattctcagaaggctctgctataggacccgatgttcctcttggtggcatgtttctgctaaatgccattgacaatggtaggagattcattaacatcttaagatttgttttcctcagcttataggaatctgtcttggtcaacaagttcaaatactcaagagggtagaactgttttcgatttgcactgactctttagaggtctgcccctccccagaggaatgaaactacttacaacatttatttcctttcataatatgaagaattgttacaagatgattgtcttgtgaaattacctggtctgcaacactcaaaagttcaaaaactgctgtggcaaatgttatgtacatatatcgaaatgtaacttcattagtgaccatttgaattacaatggtgatcatgtgaatatatttaacactgtgttaaattaatttgcattgctgttttattttaatcatgaacaactaccatgtttgctaatgttttgtgtaaattaagataagtacactatctttgaagctgcaagagaaccaagttgtagcacattgacccgaaggcattgttgtcctgttgtgtcacattaaattgaaccttgtgttactaattgtgagcaaaatctacgtatatcatgtctttttgtagttcctacccactactggctgtcatcacaccagcatacagtagccacatttttttggtgcagttagagtagaataatgttccctttaaacttttgtattttggcattatgctccaggtattgtggaccatgagacaaaaattagtctttatatctatcttacttttaaagaagaaatgttgatttccttttctctagttgaaggtggtcattaggttgtaaagctgtatactgtgtttaattagtagcagtgacaccaaagatagaggcaatgcatagaaacttttcaactggaaaaaaaaaggaactaacactacattttcagagactctctggaaattttaaaaaatataaaaaaaattgaatcacacgtctctaaccctaaaaaagtttttttaaatgtctttgacacattgtatctttcaatgctcattaaaatggctataagtaggtgtttgaaagttaatttatattcctgatgattttaatagtttatttattgttaagtttcaaacttttaattttatttattcatgtgaaaaaaaaaaaaaaaaaaaaaaaaaaa

SEQ ID NO: 672 - DNA, 2685 bp, Cricetulus griseus
gttgttcccgtctgagtaccagctccttatcacccctgagggcgggcgggcctgtagccgaggcaagaaggaggcggaaaagaaattgtcccggatccctgcagtctttccgtaggttgtggtaccacgccaggcaagagaagaggaaggaaattaaccagatcggtgaaggtcgatttgagggtctgctgtagcaggtggcacctcttgaagcaagggaggaactttccccggatcagtagagatcagaaagattgttgggcgtggcaatacctcacaggaaaggaagaagggggcaaactgctggttccaggaggtttgtctccagaaccagttacactggccttgaagtgactgaagaagaccattctccacaggcctgcacttaggcccgaagccctcttcccctattttgagtgactactctatttctttgtccctgctgtcgtcagggacgattgcatgggctacgccaggaaagtaggctgggtgactgcaggcctggtgattggggctggagcctgctattgcatttacagattggcccgaggaagaaggcagagcaaggagaaaatggctgagggtggctctgctgatgtggatgatgctggggactgttctggggccaggtataatgactggtctgacgatgatgatgacagtaatgatagcaagagtatagtttggtacccaccttgggcccggattggcactgaagcagggaccagagctagagccagggccagagccagggctacgagggctcggagagctgtccagaaaagggcttctcctaattcagatgatactgttttgtcccctcaagagttacagaaagtactttgtttggttgagatgtctgaaaagccttatattcttgaagcagctttaatcgctttaggtaataatgctgcttatgcgtttaacagagatattattcgtgatttgggtggtctcccaattgtggcaaagattctcaatactcgggatcccattgttaaggaaaaggctttaattgtcctaaataacctgagtgtgaatgctgaaaatcagcgcaggcttaagatatacatgaatcaagtgtgtgatgacacaatcacttctcgattgaactcatctgtgcagctggctggcctcagattgcttacgaatatgactgttactaatgagtatcagcacatacttgctaattccatttcagactttttccgcttatttttagcaggaaatgaagaaaccaaacttcaggttttgaaactccttttgaatctggctgaaaacccagccatgactagagaacttctcagggctcaggtgccatctgcactgggctccctctttaataagaaggagaacaaagaggttattcttaaacttatgatagttcttgagaacatcaatgacaatttcaaatgggaagaaaatgagcccgctcagaatcactttagtgggggctcactttttttctttttaaaagaatttcaagtgtgtgctgataaggttctgggaatagaaagccaccatgattttctagtgaaagtaaaagttgggaaattcgcagccaaacttactgagcggatgttcccaaaaagccaggaataactcggtggctttgtagtagagcagcaacgcaccttgtaaactattccttttctccaccttgtttgtatggcaaaggaatcctttcagctgccaattttgaataatgagcatcgtactgtatcattgatactgatatatttaaccgagtttgtcttcaggtttaagttggatgaatgactatcactacttttcctgaaacctttttggtcatttgcatccattttatttgtgcatcatcaataaaagatttatgttaatgctggaaagaaacaacagaagcagaaatgtgtgccttcagagcatggaggaggcaaaggctttggtggctggctacaggagtcagttaaaaacttcagggaggagagagccattgaaagggagtccttattggagtagggaagtcagtgcattccatgagaccagacttgagggtagatgatgtgagaaaggcattaatttaggaacccttatgatagtcaaaacagctgtgctgatggaactcggtattgctagaaaaagattttcatcatacattggtaactgagcaagggaagttaaagagcagtattcagagtatggctacatattgcggggggggggttaaatcatgtttaaagacactaaaatctatggaattatatatacccagtagtactaagagttatatttggatgaaagataatgagcgatacttactttttgtacttattattcatctatgttttcttatttatcaaaaattaatattgattttaagaaagggttggaaaaagaaaagtacagggaatgcagcaggtgattaatttgaacatgtactggctgagtgggaaatatttaggccccaaaggaggtggtctaacgcttccacttcacaatgagagatgatggtgactataaggctggcagtgagattcgaataagagaatttatgcaaagtagcttcactattcttgcatatagcagcaattagaaatgtgagtacctttaagtacacagatgtagtattgatgggttttggttaccttttgttttgctggggcattcttccatgtttcagtgtcatttaataaataataataataa

SEQ ID NO: 673 - DNA, 2682 bp, Cricetulus griseus
  modified_base (182)..(182): a, c, t, g, unknown or other
agacccctatgttcggaaaacagcagcagtctgtgtggcaaaactccatgatattaatgcccagatggtggaagatcaggggtttctggattctctacgggatctcatagcagattcaaatccaatggtggtggctaatgctgttgcggcattgtctgagatcagtgaatctcacccaaacngcaacttacttgatttgaaccctcagaatatcaataagctgctcacagccctgaatgagtgtactgaatggggccagattttcatcctggactgcctgtctaattacaaccctaaagatgaccgggaagctcagagcatctgtgagcgagtaactcctcggctctcccatgccaactctgcagtggtgctttcagccgtgaaagtcctaatgaaattcctagaattgttgcctaaggactctgactactacaatatgctgctgaagaagctagcgcctccacttgtcactctgctgtctggggagccagaagtgcagtatgttgccctgagaaacatcaacctaattgtccagaaaaggcctgagatcctgaagcaggaaatcaaagtcttctttgtaaagtacaatgaccctatctatgttaaactggagaagctggacatcatgatccgtcttgcactcccaagccaacatcgctcaggtcctggcagagttgaaggaatacgccaccgaggttgacgtggactttgttcgcaaaagctgtgagggccattggacggtgtgccatcaaagtggagcaatcagcagaacgatgtgtaagcacattgcttgatttaatccagaccaaagtaaattatgtggtccaagaggcaattgttgtcatcagggacatcttccgcaaataccccaacaagtatgaaagtatcattgccactctctgtgagaatttggactccctggatgagcccgatgctcgagcagccatgatttggattgtaggagaatatgccgaaagaatcgataatgcagatgagttactagagagcttcctggagggttttcatgatgaaagcacccaggtgcagctcactctgcttactgccatagtgaagctatttctcaagaagccatcagaaacacaggagctgtaggacagtccttccatcccgtccatcagtgcctgcaaccttcgctccttcacctactcctgccgtggtcagcagcggtctgaatgacctgtttgagctttccacgggtataggcatggcgcctggcggatacgtggctcctaaggccgtctggctacctgcagtaaaggctaaaggcttagagatctcgggcacattcactcaccgccaagggcacatctatatggaaatgaacttcaccaacaaagctctgcagcatatgacggactttgccatccagttcaacaagaatagctttggtgtcatcccgagcactcccttggccatccacactccactgatgccaaaccagagcattgatgtctctctgcctctcaacaccttgggcccagtcatgaagatggaacctctgaataacttgcaggtggctagttaaaaacaatattgatgtcttctacttcagctgcctcatcccactcaatgtgtctttttgtagaagatggcaaaatggagcgccaggtcttccttgcgacatggaaggatattcccaatgaaaatgaacttcagtttcagattaaggagtgtcatttaaatgctgacacagtttccagcaagctgcagaacaacaatgtttacactattgccaagaggaatgtggaagggcaagacatgctgtaccagtccctgaaactcactaatggtatttggattttggccgagctacggatccaaccaggaaaccccaattatacgctgtcgctgaagtgtagagcccctgaagtctctcagtacatctatcaggtctacgacagcattttagaaaaactaataaatgggtcccttccgtcattccccacctctgccacctgctgctgctctcagtccttccttgtgagcttctccatgctgtgccaatggctagttttttctataccctcttctgagtgtagtttgatattttgtaatcaaaagctcatttcacaggcagaaaaaggtacaaattaattaaagcaaaggaaaagtgtcactgaaacataaactgcaccttattgttttatatttttgtacagatgagaaattgagtagaataatgagtagaaaggttaactgaccatcatcaccccccgctccctcccccctcccttctctctggtcctcagggccaagtcacatcaaagtcagggttttagagttagaatagaccttaatggcttatccaaccttgtttttctacaaagaaaggtaacaggcaaaaagtttactactgccggggcctggctcttgagtagcagagctaaggctggttccctgaagcttcatcggcttcccggtatggctggctcatggttgttcttttcctcaaagtcctctgcctttcctgtactgcctgtggctctttccatactccatgctgagtttggtgctccaccattcactggtgtcaggtggcagctgacatcttctcagttacctgaatgtacatccaggtaacaagagtgaaatggagctaacatttgccaggcctctcctagagccttgaccttgtgtattcatcaataaactcatttacac

SEQ ID NO: 674 - DNA, 2681 bp, Cricetulus griseus
  modified_base (866)..(866): a, c, t, g, unknown or other
gtttctaaacaatacagccactcaactgacataccatggattgtgtgaactgacttcaacggttcaggaaggagaactctgtgtgttctttcggaataaccattttagcaccatgacaaaacacaagggtcaactgtatttgttggtaacagaccaggggtttcttactgaagaaaaggttgtctgggaaagcctgcacaatgtagatggtgatggaaatttttgtgactcagaattccatcttcgacctccttcagatcctgagactgtgtacaaaggtcaacaagaccaaatagatcaggactaccttatggcactgtcactgcaacaagaacagcagagccaagagatcaactgggagcaaatcccaagaaggaatcagtgacctggagctggcaaagaaactccaagaggaggaggacagacgagcctctcagtactatcaggagcgaggagcaggcgcaggtggccggtggctgcctaccaccacttccacacagatccagcagagccagccagcacaacaagcttctccatcaagtgtaaaacagcctggaaatattgaacggaaacgcaaggaacctcgggaaaaagagaaagagtctgtgggaaccacctatgcagatgacgatgacggaaaggaagacccagtacctaccgtctgtgcctgatctcccaatggattttgctcttgttttccaggttactttgttacaatcaactttttttaagttacacaatatactctttatgagctggagttttatgttacaagttggaactgttgtgtgttgtcacttgtagccaaataagtatatcacttctattttgtgtttagtgacttatttgtcaaatagaaaaaaaanaaaaaaatatactgtatatatatatatatatatatatatatatatacacatataaataaatacacacacacatatatacatataatcattgttgcagtccgtttactctatgtgagggtgcttctcttccaccactccccaatgcttggttctcctgagtaaatgccacactttgagcaccaagacttactgagatcatcacagacactgtacatcctctatttttgaatgtgctgactttcatgacttaaatcagtgtttttttcatgctgttagaatttgtagaattatttcgaatgtggcatcatggctttcaaaaatatattttgtggttgcttttgtattcggtagactagtgtcaagactaggaatatttggtgtataaaatgcactttacagacctgttctccagatagcttttagagatctaagcgtttaaagccccttggcctttccctccagaggaaagcagcatcaggaactgactgttctctctctgctgctgtcagtgtagactatttgtttgtggtttagtgtgaaaatggactctgatggtgtgcaagtcagctttaggcagagagaaatcataaaggaatgtttgaatcttaagagtctttggttctctgataatttagcctctttgttactgatgccaacactttttaaaatgttaaggggaaaagttatgaagaactttacttttctcaggtaacagctgaaaataacttttaaaattaaaagctccctgaaggaaattatagagaagataaaacaggagggtaccttgcagaatgctggaaaaattactttgaaaatctatctaaaatgtaattcatgcatgtctttacttaatcctggtatctctgctattagggaatagagcttaacaaattgatatatgcatatatttttttacatgtaggattctagtttctatcttctgaactcaagaaaactaaactgaataaacagggtaaaaaatcttcaactcttgcctcaaattcaatgttcctttgtcctgacaaaggtcagttagacttgtctagtaagctggtatcttttagggcatgacaccctcccattaactagttgaaataccatggcagagataggaaacccaagctttgcccctggtaggatgcacagtgcagagccccttggtaggcagtccgagctcctttggctctagtagtcatttcccagctttatgtggaaagtcagggagctgaaatgcccattataaatcatgaaccactgaagacatcctaacagaaatgccctaggaagcagctataactcatggaatgagttttaagataagagattggtgtttaatctttgaaaatgtctgatctgtcagaatgtttgttgctgttctttcccacccattatttgtatgacataatcactgtgaaaggaagcagtgtctcttcacttcccagaaaaaagaacacctaacatgcgcctacccatcacagggctgaactgatttctatgaaataatcttagtgttttaaatgctaattatgctaaaaacacctctaaaacttgtcttaaatttcaagtttcacttttggaaactattcctgaaaagacattgaatataggtgggaaagttaaaatgtttctgacacaatgattcagtattatttagtgtttaatctcaagttcgttgctgtaccacaagtgtagtgtcatcgttggattaaaatgttggatgtttttgttaatatacttaaaactgtaaccagtgaataacatcgtagcatttttattatagattatattttatttcaataaactttgatatttaga

SEQ ID NO: 675 - DNA, 2681 bp, Cricetulus griseus
  modified_base (2670)..(2670): a, c, t, g, unknown or other
  modified_base (2674)..(2674): a, c, t, g, unknown or other
ggagctgctgctgctgctgctgctgctgctaccgcgcccaggtgaggagaaaccacagtgagggcgttcacccacgactggatggtgttcgtgcgcggcccggagcacagtaacattcagcactttgtggagaaaagtcgtcttccacttgcacgaaagcttccctaggccaaaaagaagtgtgcaaagatccaccttacaaagtagaagagtctgggtatgctggtttcatattgccaattgaggtttattttaaaaacaaggaagaacctaagaaagtccgctttgattatgacttattcctgcatcttgaaggccacccaccagtgaatcacctccgctgtgagaagctaactttcaataaccccacagaggattttagaagaaagttgctgaaggcaggaggggaccctaacaggagcattcataccagcagcagcagcagcagcagtagcagcagcagcagtagcagcagcagcagcagcagcagcagcagtagcagcagcagtagcagcagcagcagcagcagtagcagcagcagcagcagcagcagcagtaccagtttttcaaagcctcacaaattaatgaaggagcacaaggaaaaaccttctaaagactccagagaacataaaagtgccttcaaagaaccttccagggatcacaacaaatcttccaaagactcctcctccaagaaacccaaagaaaacaaaccactgaaagaagaaaaaatagttcctaagatggccttcaaggaacctaaacccatgtcaaaagagccaaaagcagacagtaacttactcaccatcaccagtggacagcaggataagaaggctcccagtaaaaggccccccgtttctgactctgaagaactctacagaccaaaaaaggaaaaagagtagttcagaggctttatttaaagtttttctagtgcgccaccgctgatactcacttgttctgctgacaaaaaacagataaaagataaatctcatgtcaagatgggaaaggtcaaaattgagagtgagacatcagagaagaagaagtcgacgttgccaccgtttgatgatatcgtggatcccaacgattcagacgtggaggagaatatgtcctccaaatccgactcagagcaaccgagtcctgccagctccagctccagctccagctccagcttcacaccatcccagaccaggcaacaaggtcctttaaggtctatcatgaaagatctgcattctgatgacaatgaggaggagtctgatgaggcagaggataatgacaatgactctgagatggaaagacctgtaaatagaggtggaagtcgaagtcgcagggtcagcttgagtgacggcagtgacagtgaaagcagctctgcctcttcacctctccatcatgaacccccaccgccattattgaaaactaacaacaaccagattcttgaagtgaaaagtccaataaagcaaagcaaatcagataagcagataaagaatggtgaatgtgacaaggcatacctagatgagttggtagaactccacagaaggttaatgacactgagggaaagacacattctgcagcagatcgtgaaccttatagaagaaactggacactttcatattacaaataccacatttgattttgatctttgctcgctggacaaaactacagtgcgtaaattacagagttacctggaaacatctggaacatcctgaggatacaacaactggatacatcaaaaactatatttttttttggttgtgatttttttttgttgttgttgtttatatgaaaacattcagaatgatacaaaccaaaagggaaaaaaataaaaatcaaacaaccttcacctctccaaggaatcccaggaagagttagcctggctagccttgaaaacacgcagacgcaacacaagcaaacctaaagaatgtgtatggtaccatggatctttctgtggtggttcattccacaggacgaatgcatattcaacacactgccttattacataactgatctatttattaccacatacaaataaaaattgtgagggaatgacaccaccagacattataagtacttggtcccgtggatgctctttcaatgcagcgcccttgccgtcccaagcccagtgaccttacttgtataccgtgccactttccaccaactttttccaagtcctttaaacttgttgcagtctatgtttttccacctttgtttttccagtttccaggacacagttatcaactggggggaccaaatagccaccttgattttcttccttgtggtcttttttcctaaaaagttgaggcccagtccttggctgtatccatgtaatgatcttggacatggtagatgtaccaaataggatcatttgaattgctgtctagccttagtcaataaacctgtaggacttaacaaaagtgtacctgtaatgtccacagtccagcactgttgagctgttaccaacactcttacatctattttactgttgcaatattaggtgaatatgaaagtaaaggcattccacagagtcatcattttatgaggaattctggtcctgtttctaaaacaacagtgtagacattcttaattttgatctatttattagtgagcatttcacctgtcttcagctgccagtgtggtgtactcatttcttcttaaatatatattaattaataaataaanaaanaaaaaaa

SEQ ID NO: 676 - DNA, 2680 bp, Cricetulus griseus
agaccgaggttcaagcaataacacctatctctgcaataccgtgtggctttcttcaatgtcttacatcctaaggaaaggaagcatgtagagcccaggaagcacaggacaagaaagctgcctccttgtatcaccaggaagatctttttgtaagagtcatcacagtataccagagagactaattttgtctgaagcatcatgtgttgaaacaacagaaacttattttcctgtgtggctaactagaaccagagtacaatgtttccaattctttgagctccgagaagacagaagggagttgaaactctgaaaatagcgggcatggactggttcctggcgttggattatgctcattctttttgcctggggaccttattgttttatataggtggtcatttggttcgagataatgaccacctgaccattctagcagagaactctccaagattcttgcaaagctgaagacttgaggagaatggctgagtctctccgaataccagaaggccctattgatcaggggacagctacaggaagagtccgtgttttagaagaacagcttgttaaggccaaagaacagattgaaaattacaagaaacaagctaggaatgatctgggaaaggatcatgaaatcttaaggaggaggattgaaaatggagctaaagagctctggttttttctacaaagtgaattgaagaaattaaagaaattagaaggaaacgaactccaaagacatgcagatgaaattcttttggatttaggacatcatgaaaggtctatcatgacagatctatactacctcagtcaaacagatggagcaggtgagtggcgggaaaaagaagccaaagatctgacagagctggtccagcggagaataacatatctgcagaatcccaaggactgcagcaaagccagaaagctggtatgtaatatcaacaaaggctgtggctatggatgtcaactccatcatgtggtttactgcttcatgattgcttatggcacccagcgaacactcatcttggaatctcagaattggcgctatgctactggaggatgggagactgtgtttagacctgtaagtgagacatgcacagacaggtctggcctctccactggacactggtcaggtgaagtgaaggacaaaaatgttcaagtggtcgagctccccattgtagacagcctccatcctcgtcctccttacttacccttggctgtaccagaagaccttgcagatcgactcctgagagtccatggtgatcctgcagtgtggtgggtatcccagtttgtcaaatacttgatccgtccacaaccttggctggaaagggaaatagaagaaaccaccaagaagcttggcttcaaacatccagttattggagtccatgtcagacgcactgacaaagtgggaacagaagcagccttccatcccattgaggaatacatggtacacgttgaagaacattttcagcttctcgaacgcagaatgaaagtggataaaaaaagagtgtatctggccactgatgacccttctttgttaaaggaggcaaagacaaagtactccaattatgaatttattagtgataactctatttcttggtcagctggactacacaaccgatacacagaaaattcacttcggggcgtgatcctggatatacactttctctcccaggctgacttccttgtgtgtactttttcatcccaggtctgtagggttgcttatgaaatcatgcaaacactgcatcctgatgcctctgcaaacttccattctttagatgacatctactattttggaggccaaaatgcccacaaccagattgcagtttatcctcaccaacctcgaactaaagaggaaatccccatggaacctggagatatcattggtgtggctggaaaccattggaatggttactctaaaggtgtcaacagaaaactaggaaaaacaggcctgtacccttcctacaaagtccgagagaagatagaaacagtcaaataccctacatatcctgaagctgaaaaatagagatggagtgtaagagattaacaacagaatttagttcagaccatctcagccaagcagaagacccagactaacatatggttcattgacagacatgctccgcaccaagagcaagtgggaaccctcagatgctgcactggtggaacgcctctttgtgaagggctgctgtgccctcaagcccatgcacagtaaaataatgtactcacacataacatacaaatggattattttctactttgccctttaaatattctgtccccatgaaacaaacactgccacattatgtaatttaagtgacacagacgttttgtgtgagacttcaaacatggtgcctatatctgagagacctctgtgatttactgagaagatgagaacagctcccttctgtggggaagttggtggtggactggccactgaattcactgcaatcaacagattcagaatgagaatggatgtttttcctttatatggttgtctggattttttttaaagtaatttcatcagttcagttcatccacctcattaataaatgaaggaatataccaataaaatcaaatgaaatattcactgtccattaggaagttttataaaacaatgccatgaacaaaaaattctttagtactcaatgtttctggacattctctttgataacaaaaataaattttaaaaagg

SEQ ID NO: 677 - DNA, 2678 bp, Cricetulus griseus
cgccctgaggagaaggctgaagagccagaagaaaggaaagaaattggtccacctctgaagcccctgcttccccctgactatggggatggctacttgatccccaactatgacgacatggactattacttcccccatcctccaccacagaagccagatgttggacaagaggtggatgaagaaaaggaggaaatgaagaaacccaaaaaggagggcagtagccccaaggaggagacagaggacaagtgggctgtggagaaaaacaaggaccacaaagggtcccggaagggagaggacctggaagaggagtgggctccggtggagaaaatcaagtgcccacccattgggatggaatcacaccgcattgaggacaaccagatccgtgcctcctccatgctgcgccacggcctgggagctcagcggggccggctcaacatgcaggctggtgctaatgaagatgactactatgatggggcgtggtgtgctgaggacgactcccaaacgcagtggatcgaggtggacaccagaaggacaactcggttcacaggcatcattacgcagggccgagattccagcatccatgacgactttgtgactaccttcttcgtgggcttcagcaatgacagccagacctgggtgatgtataccaatggctatgaggaaatgaccttccatgggaatgtggacaaggacacacctgtgttgagtgagctccctgatccagttgtagctcgtttcatccgaatctatccgctcacctggaacggtagcctgtgcatgcgcctggaggtgctaggctgccctgtgacgcctgtccacagctactatgcacagaatgaggtggtaatcactgacaacctggacttccgccaccacagttacaaggacatgcgccagctgatgaaggtggtgaatgaggagtgccccacaattacccgcacatacagcctgggcaagagttcacgggggctcaagatctatgcgatggagatctcggataaccctggggagcacgagctgggggagcccgagttccgctacacagctgggatccacggcaatgaggtgctaggcagagagctcctgttacttctcatgcagtacctgtgccgagagtaccgtgatgggaaccccagagtgcgcagcctggtccaggacacgcggatccacctggtgccgtcactgaaccctgatggctacgaggtggccgcgcagatgggctcagagtttggcaactgggcactggggttgtggagtgaagagggctttgacatctttgaggacttcccagacctcaactctgtgctctgggcagctgaggagaagaaatgggttccctacagggtgcccaacaataacctaccaatccctgaacgctacctgtccccagatgccacggtatccacagaagtccgggccatcattgcctggatggagaagaaccccttcgtgctgggtgcaaatctgaatggtggtgagaggtttgtgtcttacccctatgacatggctcggacaccgagccaggagcagctgttggcagcagcaatggcagctgcccgtggagaagatgatgaggagtcatccgaagcccaggagactccagatcatgctattttccgctggctggctatttcttttgcttctgcccatctcaccatgactgagccctaccggggagggtgccaggcccaggactacaccaacggcatgggcattgtcaatggagccaagtggaatcctcggtctgggactatcaatgactttagctacctgcatactaattgcctggagctctctatttacctgggctgtgacaagttccctcatgagagtgagctgccccgtgagtgggagaacaacaaggaggcgctgcttaccttcatggagcaggtgcaccgtggcattaagggtgtggtgacagatgagcaaggcattcccattgccaatgctaccatctcggtgaatggcatcaaccatggtgttaagacagcaagtggaggtgactactggcgcatcctcaacccgggtgagtaccgtgtgacggcccatgcagagggctacacttcaagtgccaagacctgcaacgtggactatgatattggggctacacagtgcaacttcatcctggctcgctccaactggaagcgcattcgggagatcttggctatgaatgggaaccggcccattctccgcattgacccctcacgacccatgaccccccagcagcggcgcatgcagcagcgccgtctacagtaccggctccggatgagggaacaaatgcggcttcgacgcctcaatgctaccacagaccctgtcacaagccccacccctccccccactcctcctccttcccctacaccaggcattaccacgaggccctgggaaattccacctacaaccactacaggctgggaggagtcagaaactgagacctacacagaaatagtgacagagtttgggacagattatgggactgagcttgaggaggaggaaatggaagaggaggaggaagaggaggaggagacagtcacaggccccacatttccattcacaacagtggagacatacacagtgaacttcggggatttctgaaactgggatcccaacattctggcccaattcaaactaagacagcacttcccaagcctgtgctggctgccacatagccatcagaggttccc

SEQ ID NO: 678 - DNA, 2677 bp, Cricetulus griseus
gtcagctcaaacagttaatggagttggatgtcagctgcaacgagatcacagccttgccccagcagataggccagctgaagtctctacgagaactgaacgtccgaagaaattaccttaaggttttaccaccagaactagtagatctccccttggtaaagtttgatttttcctgcaacaaagtcctggtgatccccatctgcttcagagagatgaagcagctacaagtgctccttctggagaacaaccctctgcagtcccctccagctcagatttgcacaaaaggcaaagtgcacatatttaagtatctgagtatacaagcatgtcagattaagacgactgaccccctctacctccacgccatggagaggcctcatttacaccagcatgtagaagatagtaagaaggattctgattcgggagttggaagtgacaatggagataagcggttatctgagagaggagtattttgagcctgtaccccatgggctcagcagaaggcttagaattacctgaccctacgttcaatggtcagatgcagctggagacgtctccagagtgtgaggtgcaaaatgatctaatgatacagagtaacgggagccagtattctccaaatgagatgagagacagcctccccttcagtgtctcctactgcaaacatcacagctcctttggcttgaagcctcggtgtttgtaagaccgcagagaaatttggaatctatagacccacagtttacgattcggaggaaaatggagcagatgagagaagaaaaagagctggtggaacagctccgagagagcatcgaaatgaggttgaaagtgaccctgcatgaagacctaggagcagcactcatggatggtgttgtgctctgccacttggccaaccacatccgccctcggtctgttgccagcatccatgttccctcacctgcagttccaaaactcagcatggccaagtgcaggaggaatgtggaaaacttcttggaagcgtgcagaaaacttggcgttcccgaggaaaagctctgtctgcctcatcacatccttgaagagaaaggcctggtcaaagtgggcacgactgttcaagcgctattggacgtcaccgtcacaaaagctctgttcacatgagaccaagccctctctgcttggtgggctcagactctacccagagcagggaccctggactctgctcctggcacctgtacctgctccccaactcacggcctgccaattccatgacaagcttcgttgacaaggtttcaacctaagggaggattcaggaccttttagagctggcctccagggttcaagttggacaggtattgtctgacagccagtgagggagctggcagagaactgagtagcacaccattgccttttcaaccgccttcatcccttccacactcaccaactgccattaccaaatgccaagcacaaaccgtttcacagtgagtcacgtctgttttatcaaaaccaaactccttgcagaatcagtggggggagggggatgcaatcaggttttcttttgccaccaaattttttcaagatgtttcttgagaccattgccttttttgagaaactattttcaacatacaaaatatttatataaatattatttattagcgagtcgttattcatcctttggatgcaaattgtaaattaggaaactattttattactgcttttttgtggttaaacaatttattttaatattataaatactgagttattttcaagcctcttgggcatgtaggagttccaggtctcagtgttcctacttcctggtgtatatgattcagaaaagaaaaaaattaagcaagaaacacgtgcttctttttgatttgcaggacattgttcttatttatacttctgcattccatccagttccctacattccagcagccctcttgtccctgttacagtgaactgactgaaatcaagagcgcaccccagagttatttgtaaatagctatgtggaaaaaaatattaaacttgaagatgaaatgtgaacaggttttttttttttgattcttgtttcttttgctatgcacaaagtagacacattttaacacaagagaagtgggaagtattgagcatatgtcttgaagtataattttgcactgtattttgggtaactaagtagcatctagcaccaaaggtaaatgttgaggaaagggattcagaccggcagctagtaaattacttcctatcaaatgtactgtgcactttaacataaatatattttaatacttttcttgtactgcacaaatacctgttttgtcaaatggcataacaatgtaaaagatgagagggttttaacggtgtgtgtttagctggagcggcattcagaccgtagcgacacaaggatttcagggtcctgaaatatatttttacatgtatctttgatgacatgaagctcaataaccattactttgggatattttttccaaaattaaagtatttcttttgatatttttcactattttcttgaaattggctgtatcatacaaatggcttcaatattttgtaaaatgttttttttttaaatgtagattcttgtatggataagatgtcttcaagatccttgtacactgtttatatgtgcaatgaaatgtgcatggctggctgacagtataagtagagtgtatatagtgctaaacctttttattatttaacagccatt

SEQ ID NO: 679 - DNA, 2677 bp, Cricetulus griseus
ggagaaagggtgaagctggagcagacggtgaggccgggagaccagggagctcagggccacctggagatgagggtgatccaggagagcctggtccccccggagagaaaggagaggctggtgatgaggggaatgctggcccagatggtcccccaggagagaggggcggccctggtgaaagagggacctcgggggacccctggtgtgaggggcccaaggggagacccgggtgaatctggaccacaaggtgaccaaggaagagaaggccccatcggcatccctggagatccgggtgaggctggccccattggacctaaaggatacagaggtgacgagggtcctccaggccctgagggtctcagaggagctccaggacccgctggaccccctggagacccgggactgatgggtgaaaggggtgaagatggcccaccaggaaatggcacagaaggtttccccggcttccctggttatccaggcaacagaggccccctgggataaatggcacaaaagatgagggtgaagttggagacccgggagaggataacaacgacatttcaccccgtggggccaaaggggccaaggggtaccgaggcccagaaggacctcagggacctccaggacatgtggggccacctgggccagatgagtgcgagattttggatatcatcatgaaaatgtgtctcctgctgcgagtgcacatgcggccccattgacatcctcttcgtgcttggacagctctgagagcattggccttcagaacttcgagattgccaaggacttcatcatcaaggtcattgaccggctgagcaaggatgagctggtcaagtttgagccagggcagtcgcatgcaggcgtggtacagtacagccacaaccagatgcaagagcacgtggacatgcggagtcccaacatccgaaatgcccaggacttcaaagaagccgtcaagaagctgcagtggatggccggaggcacgtttacaggagaggcgctgcagtacacccgggaccggctgcttccacccacccagaacaaccgaatcgctctggtcatcacagatggacgctctgacactcagcgggacaccacacccctcagtgtgctttgtggcccagacattcaggtagtttctgtaggcatcaaggatgtgtttggctttgtggcgggctccgaccaactcaacgtcatttcctgccaaggcctgttgtcgcaaggccggccaggtatctccctggtgaaggagaactatgcagagcttctagacgatggctttctgaagaacatcacggcccagatctgcatagataagaagtgtccggattatacctgcccaatcacattctcctccccggctgacatcaccatcctgctcgatggctcagccagtgttggtagccacaacttcgaaaccaccaaggtctttgccaagcgcctagctgagcgcttcctgtcagcaggcaggacggatccctcccaggaggtgcgggtagccgtggtacagtatagtggcctcggccagcaacagccagggcgggcagctctgcagttcatgcagaactacacagtgctggccagctctgtggacagcatggatttcatcaacgatgctacggatgtcaatgatgccctgagctatgtaactcgcttctaccgggaaacctcaccaggtgccgccaagaagagagtcctattgttttcagatggcaactcacagggggccacagcggaggccattgagaaggctgtgcaggaggcccagcgtgcaggcattgagatctttgtggtggtagtgggaccccaggtgaatgagccccacatccgtgtgctcgtcactggcaagaccgcggagtatgatgtggcctttggtgagcgccacctattccgagttccaaactaccaggccctgcttcgtggtgtgttttaccagacagtctccaggaaggtggcactgggctagaggaccacacacatggctgtgcgcatggggacacactttgacaggccttcctgcccttcccaccactgaccatacaggaacaggaaatgtgacccaaatgttcctgaacattgtcccactgtcttagagggaatgcggagatgcacactgttggctttgtgttatgtcctctgtggctcacccgagttcctgtctatatccctctcttgatttgtccagcatggcggccatcttgctgacctctctctgcatctcggctgcatccagccatctcatcttcctcctcgctgcccttaacctgttcctggtatcttcacaccatccctgcagtttctgtctgtgttgagtcttccacactcacagtgaagcaaatccttgcatgagctcagcttgctgggttgcggcttttagaagagtaaagaccaagagcattttccaactcaaacttggaggaggccactcctcttcatcaggtgcttgtcagtgaccgatgtggaccttggtcctggcccttagtggctagaggcttcgtctggacagttcacactcaggtgttctgtcagaaccaatccagagatcctttgccttaaaatagtgactggtccttctttgtcaagacctcctttagttagctttgtcatggttcccccatgctcccctaatctggtctaagccagctatctctgctaataaaggtttaccatttttcaaaaaaaaaaaaaa

SEQ ID NO: 680 - DNA, 2676 bp, Cricetulus griseus
tgaacgtggatggtgcctgcgctgatgagactagcacatattcctcgaagctaatggacaagcagaccttctgctcctcccagaccaccagcaacacggcccgatatgcagctgcactctacaggcaaggtgaactccacctgacacctttacatggcatcctacagcttcggcccagcttctcctacctggataaggcagatgccaagcaccgtgagagagaggcagccaatgaggcaggggattcttctcaggacgaggcagaagaggacgttaagcagatcacggtgcgattctctcgaccagagtcagagcaggcccgccagcgccgtgtgcagtcctatgagttccttcagaagaagcatgcagaggaaccttgggtccacctgcactattatggcgtgaaggatagccgttcagagcatgagcgccagtacctgctgtgccagggatccagtggggtggagaacacagagcttgtcaaatcacccagtgaatacctcatgatgctcatgccacccagcccggaggaagagaaagacaagccagtagctcccagcaatgtcctgtccatggcccagctgcgcacattgcccctggctgatcagattaaggtcctgatgaagaatgtgaaagtcatgccttttgccaatctcatgagcctccttggcccctccgtggactctgtggctgttctgcgtggaatccagaaggtggcgatgttagttcaaggaaactgggtggtgaaaagtgacatcctttatcccaaggattcttccagccctcacagtggtatgccagcggaagtgctctgcaggggccgagactttgttatgtggaagttcacacagagccggtgggtggtgaggaaggaggtggcagcagtgaccaaactttgcgctgaagatgtgaaggactttctggagcacatggctgtagtgaggatcaacaaaggctgggagttcttactgccttacgacctggagtttatcaagaagcatccagatgtggtccagcggcagcacatgctgtggtcgggcatccaggctaaattagaaaaagtctataatctcgtaaaagaaaccatgccaaagaagccggatggacaatcagggcctgctgggctggtctctggggaacagcgggtccaaacagccaaaaccaaggcccagcagaaccatgccttcctggagcgagagctgcagcgacggaaggaacagatgcgggcagctacagtccttcccagtgtgcagattaaggaagaacctctgagtgaggaggaagcagatggggaagagctggaggctgaggaggaggagcccatggacactgcacccagtagctgcctcagcaccaagttggccaacgggctgcctgctgggcgggcagtgggtggggatagcctaaatgggcacccaataccaggctgtgccagcaacccggtggcccaggaactgaaggcgttcgtggaagccacttttcagagacagtttgtgctcacgctgagcgaactcaagcgcctctttaacttgcacctggcaggcctgcccccgggccacacactcttcagcggcatctctgaccgcatgctacaggatacggtgctggccgctggctgcaagcagatactggtgccttttcccccacagactgctgcttctccggatgagcagaaggtatttgccctctgggagtctggagacatgagtgaccagcatcgacaggttttgcttgaaatattttccaaaaattaccgagtacgtcggaacatgatacagtctcggctgactcaggaatgtggagaagagctaagcaaacaggaggtggataaagtgctaaaggactgttgtgtaagctatggtggcatgtggtaccttaagggaacagtacaatcttgacaatagtagcaaaccactaactcaacgaatccaagcccagggaaggatggcagagccagaagtagtctcaacttgcctcaagacagagcaagaggatctgcctgcggcactgcctggcccagaggacagaggggctcatactcggccagtggcagggtcagcgtaagtgagatcgctcccagcagagaccaaccgggccttctttacagtacaatttgaaatccctgatgtattttgcttatttggtttcattctcataataaagagagtgtatactgacatgggcaggattatgaaaatcatggtttagtattttccttttttaaatgaatgccaacaaagttaaaattatgtttacacgatgaagagaaccttaaggtttttaatatttaaaatgcctagaagccaataattagtcttagagtatctctgctaagacttctgccaattttactaaaccaaattgaattattttactgttgggtttctgaggccactttaccttttacaacagcctactttctatagtggtctcaactgtttacacaaccatagcaaaacattagatcaaactcctccatcttctcctaatgttcgaataaaggtgcaaactgaaccaggtaagtgtggaacagtgtgtaagcgaggttatcaaaaataaatgctaacactaaaatggcatcatggtgctactgtcctcacatagttgcaggaagagaatgtcatctgtgctctcaaagcgttaagtactaaaagcgttcaatgcaaaaaagaaaag

SEQ ID NO: 681 - DNA, 2676 bp, Cricetulus griseus
tgaaaacaatacggcaaggggaactttagcaaaaagtgaaattaggcaagacacatcctcacaggcagagaggttgcaataaaaataaattagacaaaactcaagttgaatccaacaagtctacaaaagctcttcagagaagtaagaataatgaagattttaaatcatccaaacatagtgaagttgtttgaggtcattgaaacagaaaaaaccctctacttaatcatggaatatgccagtggaggagaagtctttgactatttggttgcacatggaagaatgaaggaaaaagaagcaagagctaaatttagacagattgtgtctgcagtacagtattgccaccaaaaacggattgttcacagagacctcaaggctgaaaatctgttattagatgcggatatgaacattaaaatagcagattttggttttagcaatgaatttactgttggcagtaaactagacacgttttgtggtagtcctccatatgcagcccctgagctcttccagggcaagaagtatgacgggcccgaagtggacgtgtggagtctcggcgttattctgtacaccctcgtcagtgggtcacttccctttgacggtcagaacctgaaggaattgagagagagagtactacgagggaaatatagaattcctttctacatgtccacagactgtgaaaaccttctcaaacgcttcctggtgctgaacccagttaaacgtggcactctcgagcaaatcatgaaggacaggtggatcaatgcagggcatgaggaagacgagcttaagccatttgttgaaccagaactagacatctcagaccagaaaagaatagatattatggtgggaatgggatattcacaagaagaaattcaagaatctcttagtaaaatgaaatatgatgaaatcacagctacatacctattattggggagaaaatcttcagagctggacgctagtgactccagttctagcagcaacctttcacttgctaaggtgcggccaagcagtgacctcagcaacagcactggccagtctcctcatcacaaagtgcagagaagtgtttcttcaagtcagaagcagagacggtacagtgaccatgctggaccagctattccttcagttgtggcatatccaaagaggagtcagacgagcactgcagatagcgacctcaaagaagatggaattccctcccgaaagtcaagcggcacagctgtaggaggaaaggggatcgcccctgccagtcccatgcttgggaatgcaagcaatcccaataaagcagatattcctgagcgcaagaaaagtcctgccatccccagtagtaatgcagcatctggtggaatgacacggcggaacacttacgtctgcagtgagagatctgcagccgacagacactcagtgattcagaatggcaaagaaaacagcactattccagaccagagaactccagttgcttccacccacagtattagcagtgccaccaccccagatcggattcgcttcccaagaggcacggccagccgcagcactttccacggccaacctcgagagcggcgaaccgcaacgtataatggcccacctgcctcacccagcttgtcccacgaagccacaccattgtcccagactcgaagccgaggttccactaatctttttagtaaattaacttcaaaactcacaagaagacttccaactgaatatgagaggaacgggagatatgagggctcaagtcgcaatgtatcttcggaacaaaaggatgaaaacaaagaggcaaaacctcgttcactgcgcttcacctggagcatgaaaaccactagttccatggatcccagtgacatgatgcgggagatccgcaaagtgctggacgccaataactgcgactatgaacagagggagcgcttcctgctcttgtgtgtccatggcgacgggcacgcagagaacctggtgcagtgggaaatggaagtctgtaagctgccaagactgtctctgaatggagtccggtttaaacggatatcagggacatccatagctttcaaaaatattgcttccaaaattgccaatgagctaaagctgtaacccagtaattatggtgtaaattaagtagcaatttaaggtgttttccagaacactgatggaaatgtatagagtaatatttaggcaataacgtctgcatcttctaaatcatgacattaaagtctgaggatgagagcacgcctgggagcgaaggctggccttttctacgaatgcactacattaaagtctgtgaccccgtgcctctgtctcgtttccattgcccggggagtcagagtgtaacccatctgcacgtgactcctgtgtgtggtgtgagtggatggtgggtgtggggagcactgtattggaagcatctcctgacactggcagccagcattactagtacctctgtgggggatcatttggtgctaaaacattgcaattgccaagaaggaaaatactgaataactgctaagaattaaccttaagactagttgataattaatacaggtttacagttcatgcctgtggttttgtgtttgttttgtggttttggtttttgttttgttttttagtgcaaaaggtttaaatttatagttgtgaacattgcttgtgtgtgtttttcttaagtagattcacaagacaattaaaaattacactttttcttcagtaaaa

SEQ ID NO: 682 - DNA, 2676 bp, Cricetulus griseus
  modified_base (763)..(763): a, c, t, g, unknown or other
agctcctgcccaggcttcctccagctcttcaacaccaacaaggattagaagcaggacatcttcatttacagagcagcttgatgacgtgacaccaaacagagagaatgtatcaacacaagctacaaaatctccagatggtgttaatagaagtgaagcatcccctcctcagtcgggcgacacacagacctttgcacagaagctccagctccgagtgccttcagtggagtctctgtttcggagtcccataaaggaatctctgttctggtcttctaaagagtctttagtgcgaacatcttccagagagtccctgagccagcttgacctggactgtcccgctgccacctttgacccaccttctgatatggagagcgaggctgaagacgcaccaggcagctctgacagcctcaacagagagcagttgcttcagcggttgcgaagaatggaacgaagcttaagtagttatcgagggaaatattcagagctcgtcacggcatatcagactcttcagagggagaagaaaagttacaaggtatattgagtcagagtcaagataagtcactgcggaggatctcagaattgagagagtgaagaaagagctagaacatgtgagttcaagtgtgaaaagcagagacggggagttaaaagctttagaggacaagctcgagttagaaagtgcctcaaaagtggagctgaagaggaaggcggagcaaaaaatcgctgccatcaggaagcagttactgtctcagatggaagagaaaaaacngcagtatgaaaaagatacagaaagccagttgagtgagctgaatgcaaaattacaagacagagaaaagcaagatgaactgtccttcattgcatcccagcccatggaagaagaaactggtaaaacaatacaggaatgaagcaaaactagggcaagtgtggttgacagtgtccagaaaaccctaccaggaaaaggagcgaacctgccagaccctggaacagaaggtaaaagaactggagtcagacttagtaagagagagggactcacatagacttgaattggagacgttgaccttaaaatacgagaaatcgcaagcctcacagcaagaaatggatgggaaaaataaatctgtggaaattttggaagatagttctgaggaaaattccaaattgcaggtgatccaaccgaaattggggaataacatggacacccagcgtaatgacctggagttaaagttagcaggggcagagcgggagaagcagaagctgagcagggaggtggctaggctccagaaagatcttcgtgtgctgagaaaggagcaccagcaggagctggacatcctgaagagagagtgcacgcaggaagcggaggagaagctcaaacaggagcaagaggatcttgagttgaaacacacttccatcctgaagcagctgatgagggagtttaatacccagctggcacagaaggagcaggaactagaaaggaccattcaggagaccatccataaggcccaggaggtggaagctgagcttctggagagccaccaggaagagacgcaacagttgcacagaaagattgcggagaaagacgatgacctgaaaagaacagccaggagatacgaggagatccttgatgcccgtgaagaagaaatgacttcaaaagtaaatgacctgcagactcagcttgaggagctacagaagaaatacgagcacagactagaccaggaggagagtgcggaggacaatgaaacaattatggagctacagacacagctagcccagaagaccactctgatcagtgattccaagttgaaggagcaggagttgagagagcaggtccataatttagaagaccgtttgaaaagatatgaaaagactgtgtgttcgccacctgtggggacgcctctcaaaggtggcaatttgtaccacactgatgtctcactcttcggagaacctactgagtttgaatatttgcgaaaagtgctgtttgaatatatgatgggtcgtgagaccaagaccatggcaaaagttataaccactgtcttgaaattccctgatgatcaggctcagaaaattttggaaagagaagatgcccggctgatgtcatggctccgaacgtcatcttgaagaaatggggagaatgagtctgggcaactgctgcttggcaaactgtcccagatgcactgcttttgaagcaggtgttgttggtggagaaatggtgatggttttgttctttttccttgtgttttttcttgggaagttttctgtggtttagaggctgttctgactggcctggcctggtcactcggcgtccctttcttttgttctttccctctttctaaagaactgcctgtcttccttatttattttagatgtgatttttttttcttcttaaagacttgtgcaatatattttgaggtgaaacttagtgaaattttttctgataaattagaggatttaatggactatttcccagattaattttttgaatatttgctaaagcctaattctttaagctatgatgaatcccagatggcagcacctcatatttacctagcttttatactgatgttatttttcagaggaaaaaatactactgtaaattgtaaatagtcaatacatagccctattgtatgcagacctgtgactgttggccatgtcatctcagaggatcagataaataaaatttatttccta

SEQ ID NO: 683 - DNA, 2675 bp, Cricetulus griseus
gggatggcggggtccagaaggaagggtacgcaggctggagcgcggccgttcatttgcgccctgctgctgtctttcagccgattcgtcgggagtgacggcatgggaggcgacgctgcggcccccggcgccgcgagcaccccagccgagttgccgcaccgccgtttcgagtacaagtacagctttaaggggccgcatctggtgcagagcgatgggaccgtgcccttctgggcccacgcggggaatgccattccaagttcagatcaaattcgaatagcaccatcattaaaaagccagagaggttcagtgtggacaaaaacaaaagcagcctttgagaactgggaagtagaagtaacatttcgagtgactggaagaggtcgaattggagctgatggcctagcaatttggtatacagaaaatcaaggcttggacggccctgtgtttggatcagctgatatgtggaatggtgttggaatattttttgattcttttgacaatgatggaaagaaaaataatcctgctatagtaattataggcaacaatggacaaattaattatgaccatcagaatgatggtaccactcaagctttagcaagttgtcagagggactttcgtaataaaccctatcctgtccgagcaaagattacctattaccagaaaacactgacagtcatgatcaataatggctttacacctgataaaaatgattatgaattttgtgccaaagtggaaaatatgattatccccacacaagggcattttgggatatctgctgcaacaggaggtcttgcagatgaccacgatgttctttctttcctgactttccaattaactgagcccggaaaagagccacctacactagaaaaagacatttcagaaaaagaaaaggaaaaatatcaagaagagtttgagcacttccaacaagaattggacaagaagaaggaggaattccagaaaggccaccctgacctccagggacagccagcggatgacgtattcgagagtgtaggcgatcgcgagctaagacaagtctttgaaggacagaatcgtattcatctggaaatcaagcaacttaacaggcagctagatatgatccttgatgaacagaggaggtacgtctcttccctgacagaagagatctccaggagaggagcggggaccccagggcagcctgggcaggtctctcaacaggaactagatacagttgtgaaaacccagcatgagattttgcgacaagtgaatgagatgaagaactccatgagtgaaacagtccggctggtgagtggcatacagcaccccggctctgcaggcgtctatgagacaactcagcacttcatggacatcaaagagcacctgcatgtcgtgaagagagatattgacaaccttgctcagcgcaacatgccatctaatgaaaaacccaaatgcccagaactaccaccctttccatcatgtttatccaccatccactttgtcatctttgtagtggtacagacagtgttgttcattggctatatcatgtacaggactcagcaagaagcagctgccaaaaaattcttttgaccttcattttcctatatgtacatcatactgggctagactttcgctggcttcaagacaatttacctcttattaaagtaatggtctcgttgctatgggatccagaccaccactgtttaataagatatgcaactaaattgttctaagccttcgtaagttctctcttgactatcatttgcagattgggctaacaacctaaaatctctatgaagactttacgaagagcactctatgctgtggcactacctaactagcaccacgtgtgcagccccgcctcgccattttacactggcattcatcctagatctcaaacacagtgcactcacagtggcttcacggaactctctgagcaaaaccctacgctgtgggaacttagcgctgccagcgtccctctattctgtagtgtcctgtgtaactgcagtaattcacttctcacaccagcaactattttacaggtgccttggatcaaaacaaaattattttaacactttaatgtaattttatgatgccactcttaaaagaaattgcaattatgtaattgctgataggcttgtgtaatatgccatttgcgttataattatttgaatgctttatttagcataaaacttcaccatggaatcacaaacaataaccagtgttttgtcacatattgaaggcacgtcagtgtttttcagagtatggcccatggaccagccattcagttcatggagtgcttattaggaatacagattccaagaccccattccaagccagccgcatcactggggggcttcagagtgtccatcccacagacacagcgcccacatgctggttggagaaaggcgatgaacaaatcaagtcatttggaattttgtaagatttagggtgagatcatctcttgcaactttttagatctgtatgttgctcgttttaagatatttcttttatgatgttagagtttaaaagggtttctatccactgtcaatttcaataataatataacattttgtcaagggtttttgttttttgttttgcttttgtgattgttacttgatgctagctggaattcaagaaatgtcaaatgaccttattcaaataaaagaaatattttagtaaaaaaaaaaaaaaaaaaaaaaaaaaaa

SEQ ID NO: 684 - DNA, 2675 bp, Cricetulus griseus
cgcggcgacgacacaccgagcgagctcctgggcctgaggggagcgatgctgtggttccagggcgccattccggcggccatcgcgtctgctaagaggagcggcgctgtcttcgtggtgttcgtggcaggtgatgatgagcagtctacacagatggctgcaagctgggaagatgagaaagtgacagaagcttcttcaaacaattttgtggctattaaaattgataccaaaagtgaagcctgtctgcagttttcacaaatttatcctgtagtgtgtattccatctagtttctttataggagacaacggaatccctttggaagtcatagcagggagtgtttctgcagatgaacttgttacaagaattcacaaagtccaacaaatgcactcatcaaaaggtgaaacagtgacaaatgacaaccagtcagaaagttcagtatctactccatctgcctcatttgaacctaatgacatatgtgaaaatactgagtccaggaatccagagctttgtgagacacctgctgctgctgacacaaagtcggatactgcaacaggaggagaatgctcaagtcatgacaacccctcccaggaacctcatggatgttcaaaccagagaccagcagaggacctcactgtaagagtagaaagattaacaaagaaacttgaagaaaggagagaagagaaaaggaaggaagaagaacagagagagattaagaaggaaattgaaaggagaaaaactggaaaggaaatgttggattataaaaggaaacaagaagaggaattaacaaaaagaatgttagaagaaagaagcagagaaaaggcagaagacagagcggctcgagagcgcatcaagcagcagatagcattggatcgtgcagagagagctgctcgttttgcaaagacaaaggaagtagaggccgccaaagctgctgcgttgctggccagacaggcagaagcagaagtcagaagggagtcttctgctcgagacagaagcaccgttgcaagaattcagttccggctgcctgatggctcttcctttacaaatcagtttccttccgatgctctgttagaagaagcaaggcagtttgctgcacagactgttggcaacacctatggtaatttttcactagcaaccatgtttcccaggagggagttcaccagagaagactataagaggaagctactggatctagagctcgcccccagtgcctccgtggtgcttctgccagcaggacggccaaccacatccattgtccatccttccagtggagacatctggacattactggggacggtgctctatccattcctggccatatggagactaattagcaattttttatttagtaatcctcctcctgcacagacttcagtaagagccacatcttcagagccttcaaaccctgcatcatccaacaagtcagagaaaagggaaccagtccgaaaaagagtgctggaaaaacgaggggaggactttaaaaaggaagggaaaatatacagactgaggactcaggatgatggcgaagacgagaacaacacttggaatggaaactctacgcagcagatgtagtatagtgagcacagtgtgtacagtcatcactgtttcccttagggttccactccgctagacttctgctggagaagtgggtctgcttatgttttcagaacatgtatacagtctttatttctgcttagaggttatgagttaaagttgtttaacctgaaaagtcaaacatgaaacagctggatgctgggtccttgaatagggtaaccagctgcccagccacctaccagttcctacgcaaactttacagctctctagcctgatgtttcatttagactactttttgctgcaagacttttaagccacacaacgtaattggtatgtcactgggtaatctgaccctagagcacttcaactagctaatcaggtgataaccgatgtttagcatttctctttgcactcagcagcaaacaaaattctttgttagtttttgattcttaacttaaacattaaataaaaaaagttttccaaaaatgagaataatcttatttttgctgtaactttctgttgtacagggctgtatcaaggtcactttgtctgacttttctcctcccagtgctgccctgaagatgtcagcaaaataactgactcccttcccttaaaaaagaaaaatctagtgtgagatgatagtactggcaggaaacagaggagctgctgagctgctggggtacagaacctttctgaaaacatgcccagagctttaaatatttccctactttgacacaataactttttctaagtagtgatcatcattgcaaaagtttagttatgtatagagctaattagtagctaacttcaaaactgaaaacaactaaacaccctctgtggacataatttctgttgagaaacggtacatactaatgcaacacttggcatgtttactgaatgcctgctgtgtgttagtgaaaagaaggtaggagacatagcataggcataggatgagtccagctttgtaagttttgtatgtagaggacagtgtgttaacatatatgtaaagaaaagaacccaagataacctctattaataatttctaatgtaattttcagaaaaattttatgcatataagcaaatatgtaatcttatttttaaataaatgggatcatattgtatgtact

SEQ ID NO: 685 - DNA, 2672 bp, Cricetulus griseus
gaaaacgaccaattgatgtagaatttcagaaaggagatcagggagttcctggtgatagagggcctcctggacctccaggaatacctggtcctccaggtcctccaggtggtgtgaaaggtgaaaagggtgagccaggagaatcaggcaaaagaggtaaaccaggcaaagatggagagactggacaaccaggaatcccaggtttgcctggcgatcctggttaccctggtgaaccaggacgggatggggaaaagggccaaaagggtgatattgggccacctggacctcctggactagtaattcctactcctgggactggtgtgactgcaggccctccaggcccccaggatctccttttaggttgataaaggactccaaggagagcaaggagtaaaaggtgacaaaggtgatacatgcttcaactgtattggaactggaatttcaggtcctccaggccaacctggtttgccaggtcgcccacacctggacctttgggaattcctggcaggagtggtgctcctggtcttaaaggtgatgatggcatgcaaggtcagccaggtcttcctggccctgcaggagaaaagggtagtaaaggagaacctggccttccaggacctcctggaccaatagatccagagttcctgggatcaaaaggagagaagggtgagcctggcttaccaggtattcctggactttcaggaccaaaaggctaccagggtttgcctggagacccggggcaacctggactgagtggacaacctggatcaccaggactaccagtggccaacctggattaaaaggtccaccaggacttccaggccctcaaggcttaccaggtccaattggccctccaggagatccaggacgaaatggacttccaggctttgatggtgcaggagggcgcaaaggagacccaggtctgcctggacagccaggtacccgtggattggatggtcccccaggaccagacggaatgcaaggacctccaggtccccctggaaccacctcagttgcccatggattcctcatcacacgccacagccagacaacagatgcaccacaatgcccacaggggacagtccatatctatgaaggcttttctctcctatatgtacaaggaaataaaagggcccatggtcaagacttggggaccgctggcagctgccttcgtcgattcagtaccatgccttttatgttctgcaacattaacaatgtttgtaactttgcttcaagaaatgactattcttactggctgtccaccccagagcccatgccaatgagcatggaacccctgaagggccagagcatccagccattcattagtcgatgtgtagtgtgtgaggctccagctgtggtgatcgcagttcacagccaaactattcaaattccacattgtcctcaggggtgggactcactgtggattggttattccttcatgatgcatacaagtgcaggagcagaaggctcaggccaagccttagcctctccaggttcctgtttggaagaatttcgttcagctcccttcatcgaatgtcatgggcgggggacatgcaactactatgccaattcctatagcttttggctagccactgttgatatgtcagacatgttcagtaaacctcagtcagagacactgaaagctggagacttgagaacacgtatcagccgatgtcaagtatgcatgaagaggacataacatgctgaagaattccttgtgttttttttaatgtgattatatatatatatatatataattattatatgtgattcccaggatgcaatgtctcacttactctccccaacttcatcactgctgccaccaatggtgctactatactctatgaccaagagagcatactgactagtaaccacggagattcagatgtacctcagcaatgtgccagagcaaggccttaattcttatgaaagaaacaggaaagggactgtagttttggggtccagaataacattcttcaaggtttataagatgaagaagtttttatactttgcccaattactaaaacggcacattaaaaattcaatgaagggaaggatcatactgagtaaaattaaagactgctgtttggagaagaattctttttcatggtgctactaatcttactgtaccccaagtttttaatagaaaggtgttaatcttattttgctctgtaagtaaagaatgtgtatattctgtaaacaacatcttagctcaaaacgttgagtcatttagatgtgatctggtataaacccttctttactaaaaatgtatgaaatcttacactatagacagcaagattttacatgggagaggatttgcctttcattgacttactactgaaaacaaattaattgggactttttttatatcttgtttttgcttgttcccaacagttttgagaaacaaatttatccaaaattattttaaggattcttattatcctggtgctcatgtaagaattattctcctttgggctcacttgtgtaagaagacaatatttgattcatcgtgtctcttcaattgcagagagccaattggactttttaaaacctttttttattttaaacaattttattacaaatagtcataggataccttatttctttaactgccatcttctcactgaatgttttttaattccacaaataccaacttaattaaagttatatgttagtaa

SEQ ID NO: 686 - DNA, 2670 bp, Cricetulus griseus
tgaagtggaggatcaggcagcaagagacatgaagagacttgaagaaaaggaacaaggaaagaaaaaatgtaaagggtattcgagatgacattgaagaagaagatgaccaagaagcttattttcgatacatggcagaaacccaactgctggggtggttcaggaggaggaggaagacaatctggaatatgatagtgatggaaatccgattgcaccatcaaaaaaattattgatcctcttcctcccattgatcattcagagattgactatccaccatttgaaaaaaatttttacaatgaacatgaggagataaccagcctcactccacagcagttaatcgacctgcggcacaaactcaaccttcgggtctccggtgctgcacctcctaggccaggaagtagtttcgctcattttgggtttgatgaacaacttatgcaccaaattcggaagtctgagtacacacagccaactccaatacagtgtcagggtgtgcctgtagcattgagtggtagagacatgattggcattgctaaaacaggcagtgggaaaactgcagcctttatttggcccatgttgattcacataatggatcagaaggaattggaaccaggagatggaccaattgctgtgattgtgtgtcctactagggagctttgtcaacagatccatgccgaatgtaagcggtttgggaaagcatataatctccgctcggtggccgtatatggaggagggagcatgtgggagcaggccaaggcccttcaggaaggagcagagattgttgtgtgtaccccaggtcggctgattgatcatgtgaagaaaaaagctactaatcttcaaagagtctcttaccttgtgtttgatgaagccgatcggatgtttgacatgggatttgagtaccaggttcggtccatagcaagtcatgtccgtcctgacagacagactctcttattcagtgcaacttttacggaaaaaagtatttagaaaaattggccagagacatcttgattgaccctattcgagtggtgcagacattggagaggcaaatgaagatgtgacacagattgtggagatactccattctgggcctagtaaatggaactggcttacccggcgtctggtagagtttacttcttcagggagtgtcctcctgtttgttactaaaaaagccaatgctgaagagctagccaataaccttaagcaggagggtcataatcttggtctgctccatggggacatggaccaaagtgaaagaaacaaggtcatttcagattttaagaaaaaagacatccctgtcctggtggccactgatgttgcagcccgtggtctggacattccttcaattaagacagtcattaactatgatgtagcacgagatattgatacccatactcataggattggccgaacaggaagagcgggtgagaagggtgtggcctatacgttactgaaccccaaaggacagtaattttgctggggctatagagagcggcctgggctaggctccgagaattcggaccgaggaaataataacaatgtaatgagtaattatgaagcctacaagccctccacaggagccatgggagataggctgacagcaatgaaagcagcttttcagtcccagtacaagagtcactttgttgcagccagtttaagtaatcagaaggctggaacttcttctgctggggcaagtggatggactagtgcaggaagtttaaattctgttccagctaattcaacacagcagggccataatagcccagatagccctatcaccagtgctgccaagaacattccaggcttcagcagttctgggaatatcagcagtgccccagtgacctacccttctgttggaacccaaggagccaacaacacagctacagggagtaatagccgtgaagggattgggggtggcaatgggaagagagagagatatacggagaacaggggtggtggccgtcatagtcatggagatggtggcgaatcggcatggagatggtggtcgccatggagatggataccgctacccagaaagcagcagccgtcatactgatggccaccgacatggagagaacaggcatggaggaagtgctggcagacatggagagagccggggtgcaaatgatggtaggaatggagaaagcaggaaagaaggctttaatcgtgaaaacaggatggaccccaaggtggacagcagcaagacagacaaagtggacagcaagtcagataagacacctgatggttttgctgttccagagccacccaaacgtaagaaaagtcgatgggacagttagaggatctgtgaaaatcagcgtgaatcagttgtctttaattttatttttagaaaggttttggtaactaggtgtctcagggctgggttggggtccaagatgtatggaccccctgcccttggtggagaactggagcgtggaaaaattataccttcatctggtgttcatttcagatgttttcttgggaacttgcattggtcctggaaagcagagagcttggaagttttgtttgctctggttgagttataaggagggtaagtggaagatacttagggagaaagggccttatagggcacaaaactcactctaggtttataatagcttatattttttactaaatggtcaccttataaacatctataaattggatttttcttagctagtg

SEQ ID NO: 687 - DNA, 2670 bp, Cricetulus griseus
  modified_base (7)..(7): a, c, t, g, unknown or other
gaagcanaggggtcgtagcatcctcagctccttcttctgctgcttccgagactacaatgtgaggcgcctctgccagcagccccagtgtgcttcgcccctggtggaggagaacagcgggcttcagaagggtgaccagaggcaggtcattcccgtaccaagcccaccagctaaatccctccttccagaggtgacggtgctcgactatgggaagaaatgtgtggtcattgatctagacgaaaccctggtgcacagttcatttaagcccattagcaatgctgacttcatcgttccggttgaaatcgatggaaccatacaccaggtatacgtgctgaagcgcccacacgtggacgagttcctccagagaatggggcagctctttgaatgtgtgctttttactgccagtttggccaagtacgcagaccctgtggccgacctcctggaccgctggggcgtgttccgggcccgactcttcagggaatcctgtgttttccatcgtgggaactacgtgaaggacctgagccgcctgggacgggagctgagcaaagtgatcatcgtggacaattctcctgcctcctacatcttccatccggagaatgcagtgcctgtgcagtcctggtttgatgacatgacggacacggagctgctggacctcatcccgttcttcgagggcctgagcagggaggacgatgtatacagcatgctgcacagactctgcagcaggtagcccccaagaatgctgaagggcacaaaggttttttaaaaacgaaaaataaacaaagggccagagcaccgctcaggtgtggcattcccttctcaccgcagtcaacaccagagcctgtggcagagctctccagtctcgcttgagaacccgtggcctcaaccagcccaacaccactctggtgtggcccgagttcatctcagcctctttggaagcacagcctcttccagccaagggttagagaagcctgtctagatgggagactcactgctccaaaccggggagaagggctcctccctggagcccggctgggggcctctttcctggggttcccagtttggtgtttagcagtgctgtgtttcgtcctaagaatgaagagagtccttttgtgtcagcaccattgccttagtcctctgtgggttgggcctcagccggatttctgctgggagttgttggcactaacaagactcaaaaatcaggggtcaaactttaaaaagaaaaaaaaatttttttactttcacaaaataaatgaagccagctactacctggcctatcttcccacagtgctttggtctgggaaaccactgtgcattcagaacagacgtaggcagggatcatcagatctcctgactttctgagtgttccaaacccagtaatccctgtgccaatcacagtagaaactgcccctttgctaagcatggccacagatagcaacagtcacatggcagatccgcatacgccataaaccctcatggaaaccagtcattagccaatcccgctgccttaagtgtcttgggtgttgcagtgtctgctgtgtgttgattcccacacagaacaaggcctggatgagaacctcagatcatcgcctgtgcctcttgctctgccagtgtctcgggccttatttggaaagggggacagaatggactgaaattccagaatatttcagaggaagggagcctagaaatagtgcttcgcttcagatgtgttcgaggctgaccttgacctcagagttctggagctgcatgtgtttgtgctctcggagcacagcttccaggtggggagcctgttcttgccaccacaaacttggaatgtctcgggtgggcagcaggacctctgagggttctgaaatccacaccttatttgaccaaactccaaaatgccaatttttctttcttttttcttaaaaaaaaaaaagtctgctttatgtacataattgcaaaaaaaaatctatattttttaatcagttacttgtaaatgaagcaatagaattctaacaaggccaagaaaggagacgagtgtgtgaggtttattttcttaaggtgaatacgggtattgcttttattttagtttgttaaagtgtgggcttgaaaacttagcagccacttctgtgtgccatatttcttcccaccttaccaaaacactccatctccttagccaaaagaaacatctgacctcctgcgtcctgtggtcccctgggctccacgtcaggaccaccgtcctagacaagtgcttttgacgtgaaggtctgcaacaggacggcttggaaccgtgggctccagcctacactgtttgcatgacctcgagtgcgacttcctgggcaccccgaccctggtgatgttagtgctccgtcttccatttgctctggaacccttcatgttggtctgtggcttcctgcactagctgtttgtagacaatgtgtttgtgtcctaataacaccgcctgtcaccaatggcagttgacagggatccctttgagacggtgcagtgtggatggagagttgggggacagtgaggatgtccacatgacactagcgcgtcgtggtacagcatgtgcggctttctaataaaatctagaaacacacagccctgttggtcaaacactcgtgacgtttgtgcctctgcttctaatggtgctgtgctggacagctggcatgccaggggttgagaagagcg

SEQ ID NO: 688 - DNA, 2670 bp, Cricetulus griseus
ccattttgtacgaagcaaggtggcatccacgttccccgagcaacttctccgcttctgcctcaaccgccccttgactgcagctatgtctcgggatcggttccggagtcgcggcccgtcgtcccccaaggccccggctcggcgcctggagtgagccccgcgccgcctcccgccggctcggccccgcccgccaacgccccctcgacgccgagcagcggcgtctcgaccacccgccacagagcggcggccctccgccccaccggcaggcggcgccggcccgggccctaagcaaggccccggccccggcccgggcggtccgaaaggcggtaagatgcccggcgggcctaagccgggaggcggcccgggcatgggtgctcccgggggccacccgaagccacctcaccgaggtggcggggagccccgcgggggccgccagcaccacccgccctaccaccagcagcaccaccagggaccccctcccggcgggcccgcggctcgcacggaagagaagatctctgactcggagggatttaaagccaacttgtctctgttgcggaggcctggagaaaaaacttacacacagcgctgtcggttgtttgtggggaacctacctgctgatatcacagaggatgaattcaaaagactgtttgctaaatacggagagcccggagaagtttttatcaacaaaggcaaagggttcgggttcattaaacttgaatctagggccttggctgaaatagcgaaagccgagcttgatgacacccccatgagaggtagacagcttcgggttcgctttgccacacatgctgcagccctttctgttcggaatctgtcaccctatgtttctaacgaactgttggaagaggcctttagccaatttggtcctattgaaagggctgttgtaattgtggatgatcgtggcagatctacagggaaaggcattgttgaatttgcttcaaagccagcggcaagaaaggcatttgaacgatgcagtgaaggtgttttcctattgacaacgactcctcgcccagtcattgtggaacctcttgaacagttagatgatgaagatggtcttcctgaaaaactggcccagaagaatccaatgtatcaaaaggagagagaaacacctcctcgttttgctcagcacggcacatttgagtatgaatattctcaaagatggaagtccttggatgaaatggaaaaacagcaaagggagcaagttgagaaaaacatgaaggatgcgaaagataagctggaaagtgagatggaagacgcctaccatgagcatcaagcaaatcttttgcgccaagatctgatgagacgccaggaagaattgaggcgcatggaagaacttcacagtcaagaaatgcagaaacgtaaagaaatgcagttgaggcaagaggaggaacgacgcagaagagaggaagagatgatgattcgacagagagagatggaggagcaaatgagacgccagcgagaagaaagttacagcaggatgggctacatggacccgagagaaagagacatgagaatgggtggtggtggaacaatgaacatgggagatccctatggttcaggaggccagaaatttccacctctaggtggaggtggtggcataggttatgaagctaatcctggagttccaccagcaaccatgagtggttccatgatgggaagcgacatgcgtactgagcgctttgggcagggaggtgcgggtcctgtgggtggacagggtcctagaggaatggggcctggaactccagcaggatatggtagaggaagagaagagtatgaagggccaaacaaaaaaccccgattttagatatctaggctttcattccagtttgtttttgtcttttcttgtttagataccacttttaaattcttgcattttagtaagaaagctacctttttatggatgttagcagtttattgacctgatatttgtaaatggtctgtttgggcaggtaaaattatgtaacgcagtgtttgaaacaggagaaaaaaatttttttatttacctttttttttaactgtataatgtttctcaagttaatggcagtgtaccttgtgccactgaatttccaaagtgtaccattttttttactgtgcttcgaataaatagaaaaatagttataatactgatcttcaactttgccattcatgcttctatgcacattaggctaggtattccacttggaaagcatgagcgtgtctaggcctttgagtggcatatgccatttctgggaaatgtatctggaggctaagtattgcattctacaaatgacataccccccttggtttaaaaagaaatggatattgaagtagttaggatttatttggcattataggaagcaagctggtgctaagcatttttaaacggttatgttagaaaagtggaactgtaaatcttcattcaggaagatgtattgagattatggagtgggtataaactatgggtagtgagagaagggggtttggttaagcggatcctttatggccctatctatgatcctttccttgaaagcttttgaaaatggaaagatcatcttgttgcatttcccctattgttttgttttaaacgaataattcccaagccctacaatcggcttgttactgaactctttgcatttgaattaaagattgttaaacatgaaaaaaaaaaaaaaaaaa

SEQ ID NO: 689 - DNA, 2670 bp, Cricetulus griseus
cggcggctgagttccgtgtttcgccgccgtgcgcttcctctcgtcatggacagcctagaaaatgcctttcgcatgtttgaagcacatatgcaaagctaccagggtaatgacccgcttggagaatgggaaagctttaatgaagtgggtagaagagaattttcctgacaataaagatacttgatgacattattgcaaaatttaataaaggaatttttagataagaagaggtaccatgatgactcaaagattcatccattattgcttaaactttgcgaaaaggaaagaagcaaatgctttcgaagagcaactcttaaaacagaaaatggatgaacttcaacaagaaattgcatcaagtggtagagttgtcttacaagaaggacctgcctgcttcccagaacaagcctgacgttattccagtatgcatagaacgggatacgtgctccctgcaggaactgagggttccaaaccttccctccatcaatcagcagacctcagagaactcaggagagaaaccacaggagccaccttctgttcctcttatggtaaatgctgttacttcctattcttgtaagtggccagtcagagacagattctaggtatgtaaagtcaaagtattcatgaattcatgccacagagtggaccagaaacaaaagaagtgtatgaaacaaataaggttgccataattcttttcatacaactccaaacacatcattgggaatagtccaagcaacaccatccaaagtgcagccctcaccaactgtgcacaccaaggaagcattaggtttcatcatgaatatgtttcaagctccaacacttcctgacatttcggatgataacaatgattgctcttctctagatcaaaatgaagatgcatttgaagcccagtttcaaaaaaatgcagtatcttctggagcttggggagatcataagatcatgtctttgtcatctgctttttctatttttgaagatggaaacaaagaaaattatggcttaccacagcctaaaaataagcccacaggagccagaacctttggagaacgctctgtcagcaaatttccgtcaacaccaaatgaagtgcctcacactgatgagtgtgtggatgaatcaatagtatgtggtattcgatacaataaaaccctagctccctgttctaaaagtacaggagattttacatctgctgcccagctttcgtctacaccattccacaaatttccagcagattcagtgcagattccagaagataaagaaaacatggtagccacacagtatactcatgtggctttggattcttgtaaagaaaatatggtggacctctcaaaagacagaaagcttggtccaattcgagacaaattttcagcgtctttacactatcctagccagcctgccacaggtggtatactccaggaagcagtgttcggctttgaggcttataaatgcacaagcactgaccttgtgaccatggaggacataccagatgccagcgctggactccaagttgaatggatgcagactagttcacttgggaatgtcaatgctccaaactttactattgagaacccatgggatgatgaattgattgttaaacttctctctgggcttcctaaaccagtgagttcctattcaaatacttttgagtggcagtgtaaacttccagccatcaagcccaagacagaattccaactgggttctttgctggtctatgtgaatcaccttcttggagaaggggcttttgcccaagtctatgaagctattcatggtgatgtgaatgataccaaaagtaaacagaaatgtatattaaaggttcagagacctgccaattcttgggaattctacattgggacacagctgatggcgagactaaagccagcagtgcatcacatgatcatcaagttttattctgctcatttattccagaatgggagcatattagtaggggagctctacagctatgggacgatactaaatgccattaacctctataaaaatacccctgaaaaagtgatgccccaggctctcgtcatcatttttgctatcagaatgctttacataattgaacaagtccacagctgtgaaatcattcatggagacattaagccagataacttcatactaggccacaggtttttggaacaggatggtgaagatttagctactggcttggcactgattgacctgggtcagagtatagatatgaaacttttccctaaaggaactgcatttacaggaaaatgtgaaacatctggttttcagtgccctgagatgctcagtaacaagccatggaactaccagattgattactatggagttactgcaacaatatactgtatgctctttgggacttacatgaaagtaaaaaatgaaggaggagtctggaaacctgaaggtctttttagaaggcttcctcatttggatatgtgggaggaattctttcacatcatgttgaatatcccggattgtcatcatcttccatctttggatttgttgagacaaaaaatgaagacagtatttgaacaacagtattccaacaagattaagacccttcgtaataggctaattgtgctgctctcagaatataagcggatgagaaaataaaatatggatttggaccttataccaaaaaacactttagtaaatttaaactcgtgtgtgtgtgtgtgtgtgtgttgtttt

SEQ ID NO: 690 - DNA, 2669 bp, Cricetulus griseus
acaaacaagaacatgtccgaattaagagagaagatttagatgtgaggcatacactgacctataatcagagacaattgaaagaactgaaagatagtaaaactgatcgactaaaaagatttggtcctcatgttccagctcttctggaagcaatagatgatgcttatagacggagacaatttactcataaacctattggccctttaggtgcttgcattcatctgcgggacccagaacttgctttggccattgaatcttgcttgaaaggacttctgcaagcctattgttgccataatcacgctgatgagagagtacttcagtcattgatgaaaaaattttatccaccagggacctctcggccacagataatcgtttctgaatttcggaatgaggtatatgatgtgagactcagagctgcttatcatccagagtttccaactgttctgacagctttagaaatagacaatgctgttgttgcaaatagcctgattgacatgcggagcatcgagactgtgctgctgatcaaaaataattctgtagctcgtgcagtcatgcagtcccaaaagccacccaagaattgtagagaagcttttactgctgatggtgatcaggtttttgcaggacgttactattcatctgaaagcacaagacccaagtttctaagcagagatgtggattctgaaataagtgatttggagactgagattgaaaataaaaaggcccacataacaaatcttcagcaccatctgtctgccctcgagaaggatattaaaagaaatgaagaacttcttaaaaggtgccagatacattataaagaaataaagatgaaaataagaaaaaatatttctgaaattcgggaacttgagaatatagaagaacaccagtctgtagatattgcaaccttggaagatgaagctgaggaaaataaaataaaaatgcagatggttgagaaaaatatggagcaacaaaaagaaaacatggagaatcttaaaagtctaaaaattgaagcagaaaacaagtatgatacaattaaattgaaaattaatcagctgtcagagctggcagatccacttaaggatgaattaaatcttgctgactctgaagttgatagccagaaacgaggaaagcaacattatgaagataagcagaaagagcatttggatactttaaataaaaagagaagagaacttgacatgaaggaaaaggagctacaggagaaaatgtcacaagcaagacagatctgcccagaacggatagaagtaaaaaaatctgcatcaattctagacaaagaaattaatcgattaagacaaaaaatacaggcagagcatgctagtcatggagatcgggaagaaataatgaagcagtaccaggaagcaagagaaacctatcttgatctggataataaagtaaggactttaagaaggttcattaaattactagaagaaataatgactcataggtacaagacataccaacagtttagaaggtgtttgacattgcgctgcaaattatactttgacaacttattgtctcaacgggcttattgtggaaaaatgaatttcgaccacaagaatgaaactcttagtatatcagttcagcctggagagggaaataaagcttccttcaatgacatgcgtgctttgtccggcggtgaacgttctttctccacagtgtgcttcattctttccctgtggtccattgccgaatcacctttcagatgcctggatgagtttgatgtctacatggatatggtcaataggagaattgcaatggacatgatacttaagatggcagattcccagcgttttagacagtttatcttgcttacccctcaaagcatgagctcacttccttcaagtaaactgattagaattcttcgaatgtctgatcctgaaagagggcaaaccacattgcctttccgacctgtgactcaagaggaggatgacaacacaagttgacaacgtagtgccttgccctcatgctgaaaggttgtgaggggatttggactggcagatgaaatagaacgagactagagacattctgaaatggaagaggcaggctcctttaatctgacccatcgattgtgtaaagcctagaaaaccagctgttccttgtgaaaaccaatttcataataccgggttttaaatctttttaagtttgcttgctttggagtttctgtgttttatttgtttttaccatctacttttataaattttttcaggagtaaaattttgtacatatgtacatgtacatacctgttcagtttgggttcatttctatagtattttgtaagaattaaaataaaagtttgagcacctgattaagactagcatttaaaccttgaatagcagcaagaagcactccctatattaccagcaataagagtcagaatacatatttatgaacttgaaaagtattttgagaaagtgctttttttaaaagcaagcatgcttctatagttattgagaaaaactgatttttgttttggtgaggaagagaatatattctcagagtagttgccaaaaaatcccaaaacatttctagtctaagaatatagaaagacaaaactgctgaatgttttaaactttccctgccaaccataagcagtataaatcatttgtatcagaactattttaacatgcataattttaaaaaataaaataaaaattgaa

SEQ ID NO: 691 - DNA, 2669 bp, Cricetulus griseus
ctgtgagtcagtacaaagtccgggataccttctgttcctattcggtgatggagctttgcaccaaaggactgggctcacaaactgagtcccttaaggcacgaggactggacttgtcccgggtaagaacctgtgtggttgtggcagaagagcgtccccgaattgcccttacacagtctttctcaaagctctttaaggacttgggcctccacccacgggccgttagcacttctttcggctgtagagtgaacctggcaatttgcttacaggggacatcaggacctgaccccaccactgtctatgttgacatgagagccctgagacatgacagagtccggttggtagaaagaggatctcctcacagcttacctctgatggagtctggaaaaatacttcctggggtccggatcattattgccaatccagaaactaaaggcccactgggagactcccaccttggagagatatgggtccacagtgcccacaatgccagtggctattttaccatttatggagatgagtctctccagtctgatcatttcaattcccggttgagttttggagatacccagaccatctgggcccgaacaggctacctgggcttccttcggagaactgagctcacagatgcaaatggagagcgccatgatgctctctatgtagtgggggcactggatgaagccatggagctgcgaggcatgaggtaccacccaatagatatcgagacttcagtcatcagagcccacaaaagtgtcacagaatgtgctgtctttacatggacaaacctgttagtggttgtggttgaacttgatgggtcagagcaggaagcattggacttggttcccttggtgaccaatgtggtcctggaagagcattacctgattgtaggagtggtggtcgtggtggacatcggtgtcatccccatcaactcccggggagagaaacaacggatgcacctgcgagacgggttcttggcagaccagctggatcccatctacgtggcctataatatgtagtctcgtcactttggcttccacagacttttctacggatgaaatgtgaatttacgctggattttgctcagaaggactttggatcactgccttcagtttgcttttcttttctttatttctttttttaattattggataagaagtgctctcttcgtaaatgtggtattttgttaagccaaaatagcaattaaaaagaatattctaccctccaaatgggttcttttaaacaatttatgtagtgtgacaaagaattgttttctctgttttaatgtgtcatggaatcttaatgacatggatctgttactaatttaagccatcgatagatctcacccttctaggagagtttactgaggtacgagaaccttccaggtagcaccttccaattagattttagcagctttctttgtcagagatatgctgaagaagcagaggccagtttatggcctttgaagttaacatagaacaagaagcgattataaataaggtatttcggcaactatcttgcagatatctttgtactaaactaaaaagataaaaataagttaacttcctcaatatgtaattatgtacaaaatgtttaatttattttgatctctttagaagtataaaagagaaaaaacattcaagaatattaaagtcttgtaatgtttgctaatataaaaaagtgttgtattatcttgcgtggatagtatcacaacaaatatatatatatgaaatataaattcactaatgaacaaaggagattttaaagtttaaatgcagaacttgtcacttgcatggtgcgccctccactgtattcacacacacttttcaaatattgtttgctcattgctatgtgtttatacatgtttcaaatacacattcctacagtctgcaggttactaagggggaaaatctctgccacatacaggaaaacattttcttgaagggaacttggtttaacatttcagataggatactgatagataaaaatcattgcagtgtgcagaaaatcttccatctagctaatgtgaggaagcaaagcaaatttagatgtcactcaaaacacactctttcaccatatcagcttcacacccgaggagggcgaaggctgcagtactgttgcacaagccgttcacagcaggtctcttctgcatcctgtcttctgtgacattagactttaggtttgaaagagttggtggactgggttggaggcttcattgtgcaagaaaaaggaaaggagacgcttaagtaccaccagtttcagcaataaaggaggatcgttgtgtattagaaattgtactgtagataaatcattcatgagaatagtttttttaaaaaaaaaaatttttgtcttgtgaccatgtgcttttggagtcagccaaaaccgtgtaatcaacttgcacaaaaagagggtacacaatgaacattgagacacagatctaatcaaacaggagcagattcctcatggtgcttgtttattatatatatttaaccctgcttgacactttacccaaggggacggtccctttatcagttgaatgttagcagcgttatttcagagtgtggtgactggttagagagaactcatgtactcaaccaatcacagtttcaaactaaaatttttatgtgcaaaggatagcaacttcttgtatgttcaaccaccagtacgctttgtac

SEQ ID NO: 692 - DNA, 2669 bp, Cricetulus griseus
aggccaagctgtcactattgttgcacaatatcgacctgaagaatacagtcgttttgaagctaaaatacatgacttacgggagcagctgatgagcagtagcattagttcagggtccggttctcttcgaactagccaaaagcgatccctctatgtcagagccctttttgattatgacaagactaaagatagtggccttccgagtcaagggttgaacttcaaatttggagatattctccatgttatcaatgcttctgacgatgaatggtggcaagccaggcaggttacgccagatggtgaaagcgatgaagttggagtgattcctagtaaacgcagagtggagaagaaagaacgagacaacggttaaaaacagtacaagttcaattactaaaacaagaggacgaataaagggcagtcattcaatgaacaagcgtaaaaagaacctcttttcccgaaaatttcccttctacaagaacaaggaccagagtgagcaggaaacaagtgatgctgaccagcatgtaacttctaatgccagcgatagtgaaagtagttaccgtggtcaagaagaatatgttttatcgtatgagccagtgaatcaacaagaagttaattatactcgaccagtcattatattgggacccatgaaagaacagggtaaatgatgatttaatactcagaatttcccgacaaatttggatcctgcgtccctcatacaactagaccaaagcgtgactatgaggtggatggaagagattatcattttgtgacttcaagggaacagatggaaaaggacattcaggagcataagttcattgaagctggccagtataacaaccatctgtatggaacaagtgttcagtcggtgcgagcagtagcagagaagggtaaacactgtatccttgatgtgtcgggaaatgccataaagagattgcagattgcccaactttacccaatatctgtttttattaaacccaaatccatggaaaatatcatggaaatgaataagcgcctcacagaagaacaagccagaagaacgtttgagagagccatgaaattggagcaggaattcaccgaacatttcacagctattgtgcagggagacacgctggaggacatttacaaccaagtgaagcaggtcatagaagaacagtctggcccttatatttgggtcccagcaaaagaaaagttatgaagactggcttttctgtcttttttccactgtctcatttctctgccctgtcccggagtctgtcttcagtgctccctccacactagcccgatcccctcatggtcggcagttgtgcccattttgacatctagtgtctccttcatgttgcatcatctgtattattctgtgttactattggtttctggccatttttcagaactgaagatgaatggcctgaccagctatcaagggtttggggagatgcaaaattgtaaaattccttaatgtttaagggaaagttaactttaagagattttcagaaaagctttatatacattcttttccaatttcagtacaaatgaaagaaaggtggttttaatcagtgactcagtggaccttgagcaacaatgcacgcttaactctaatagcatggtttggccagtgtattagctctcaagttcttccctcaatgacttctggtattaaagtaattgtttcattaaagacaaataagaaaaataggggttttatctcaaaattaatgtctgagttaactcataatttcaggagggctgtttgttgttcatgagaggtcttcgttgtgtgagccctccctggtacacctcaccttcacagacaactgcggacaagaaagttctgtggcgatgtggtaatcatggcagtgagaaggtatccagttcatagcctgaaattttactgtatgcttagggaggggggcagattttaatgactattttacccacaataactgcctattttgttataataaaatatatataaatatatataaaactttctttaactaaactctgtaactatgggaattattttctttacatagttgcacacacacatatatatatatttaaaatatatttttcttttgccacctacttctaactttttgtttggtttttaaattaaatattaattgatgagacttatcttccttaatcatgtgaactgaaagcaagtgtatggtggtggtggtgaggaaaaacctctagagaaactagattgcaagtagacgtgtgagcatgttctcctctttcctatacaatttccagaaggttcctaagttttctgtcagtgttgtgttcttgtcatggagtttgatttaggtcctccaccttcccttttagttctcatttcattaatggaaaaacagagtccactttggaggcttcctccagacacttcatctcatgtagctgcactgtactgcaattgcacaggtctttacagcaagcttcttcagtcttagtgagaggccaaatgccttcagaaatcagtttctctagcccattattaatataatttgccttcccattgctctttgaaattgtttactcaatatgtggtttttggcaacgtcattaaaatttcttaaatgagtactggtttgtaaagaattatccattccacttatgagaaagaggagaacagctaataaactctgttgtaaaatacaaaaaaaaaaaaa

SEQ ID NO: 693 - DNA, 2669 bp, Cricetulus griseus
  modified_base (2663)..(2663): a, c, t, g, unknown or other
ccaatgactgcgactttgtgtttgaatgggagactccaatcgtctgtcccgatgaagtgaagacgcagggctgttctgtcacagatgaacagctactttacagcttcaacctgaccagcctctctacgagcactttcaaggttacccgggactctcacacgtacagtataggggtgtgcaccacagcagctggcttagaccagggaggctgggtcctgggactttgtccacgaaggaaccttcgtactttatcaatctgtgtcaaagagtatataaaggacccctggactgctcggaaagggccagcgtttgcaagaagagcgcatctggccaagtccaggttctggggcttgttcatacacagaagctggatgtcatagatgacaaggtcattgtcacttactcaaaaggctatccttgcggtggtaataagactgcatcctctgtaatcgagttgtcctgtgcgaagactgtgggcaggcctacattcaagaggtttgacagtgacagttgtacctactactttcgctgggattcaagggctgcctgtgccgtgaggcctcaggaagtgagcatggtgaatggaacgctcaccaaccctgtgaccggcaggagcttcagcctcggggaaaattactttaagctgttcagtgcctctggggacatgcgaaccaatggggacaactacctgtatgagatacagctctcctccatcaccagctctaccaaccctgcatgctctggtgccaacatctgccaggtgaagcccaatgatcagcacttcagcaggaaagtgggcacctctgacaggaccaagtactatgtccaagatggcgatctggatgtggtgtttgcctcatcctccaagtgcgggaaagataagaccaaatctgtctcatccaccatcttcttccactgtgaccctctggtgaaggatgggatcccagagttcagccacgagactgctgactgccagtacctgttctcctggtacactgcggctgtgtgtcctctgggtgtggcctttgatggtgagaatgctgggccagagtataaaggactctcagagaggagtcaggccgttggggcgatcctaagccttctcctggtggcactgacttgctgtttgctggccttgctgctctacaagaaggagagaagggaaacggtgataaacaagctgaccaattgctgcagaagaagctcaggcatatcctacaagtactcaaaggtcaacaaggaagaggagaccgatgagaatgaaacggaatggctgatggaagagatccagctgccaaccccaaaactaggcaaagagggacaggagaacggccacattaccaccaaggccgtgaaagcagatgctctcacttccctgcatggggatgaccaggacagtgaggatgaagtcctgaccatcccagaggtgaaagttcactcgggcagaggagccgaggtagaaagctcacagcccatgagaaacccacagcgcaaggtccttaaggaaagggaggacgacagggtggggctggtcccaggagagaaggccagaaaagggaagcccagacctggacagcataagtctccaacctctaccaagctggtgtccttccatgacgacagcgacgaggacctcttacacatctaactccgcggtgcctacaggagaacgtggagccatgggacagccaagcacctccaaccaaataagacttcaactcgatgatgcttctatcattttgcctttaacaaaaactgcttcaaagggaagagtttttgtgatgggggagagggtgaaggaggtaggcaccactccttcatgatcgtttacagtcagtggaacaagtgttgcttgaattggccaaagggcggtactttgtgccagggttttgccccaagtcctcacttaaagcatagctgcagtgtgcttccaacaggtgccaaggccacgtgcatctcaccccagagggctgtgtttgaaaaaaacccttgctgctttagaccctatagggtgtttgaccatttatatttttagcattgtaattctctccccctatttattgactttgacaattactactcaggtttgcgaaaaacgaaaaaccaaaacagaaagaagccagtttcttctgccacctagggtgtgaatgaagctggcagtgtgctggggccattgctgtgtgtggctcctgaactggtccttgacacacacattagtgagctgcagtattcctctttgctttccattttgtaagggcatacacctacaggtccccgagtgcctaggtttgggaaggcccgcctgctccatgcccctcatctcgtagctgcagctctttgcaagcatccccaatgggtgttgcttttgccagctggtgagtcccagcagctcacccagaggtggacatgtgactggagttgaggcgtcatggagagtagctgtacttcaggtttgggctgtaggtctcatctcttcaggttctcatgataccacctttactgtgctttttcttttttttttctttttttaaagggggaaaaagttgtttatcacgaatttgacctataagaagccttaatttgcacagggtgacttacagacatcgtgtgaaacacggtgggccagtgttgtgtgtagataatagtcttaactaggaaaaaanaaaaaa

SEQ ID NO: 694 - DNA, 2668 bp, Cricetulus griseus
gagactctacagcaacaggaaatgcaaacttactctacagccgaaaagaaggacagagacaagaaataaaacaaaaatagatacaaaatatcctgccttttgatcacactagggtcgtcctacacgatggggatcccaacgagcccgtttctgattacatcaatgcaaacatcatcatgcctgaattcgaaaccaagtgcaacaattcaaaacccaaaagagttacattgccactcaaggctgcctgcagaacacagtaaatgacttctggaggatggtgttccaggagaactctcgagtcatcgtcatgactacaaaggaggtggaaagagggaagagcaaatgcgtcaagtactggcctgatgagtatgcactcaaagaatatggggtctggcagtaccattttcggacctggccggatcatggtgtgcccagtgaccctggaggtgtgctggacttcctggaagaggtccaccacaagcaggagagcatcatggacgcaggccctgtcgtggttcactgcagattgacattcttattgacatcattagagagaaaggtgtggactgtgacattgatgttcctaaaaccattcagatggtgcggtcccagaggtcagggatggtccagacagaagcacagtacaggttcatgtacatggccgtccagcattatatcgagacgctgcagcgcaggattgaggaggagcagaaaagcaaaaggaaaggacatgagtataccaatattaagtattccctggtggaccagacaagcggcgatcaaagtcccctgccaccttgtaccccaacaccaccctgtgcagaaatgagggaggacagcgcacgagtgtacgagaatgtgggcctcatgcagcagcagaggagcttcagatgaggcccaccggtggcggcctgcagattcgaactttcaccccttcccttttttatgaccttaactgatctgactttcttttacccctgtctctttggggaatcatgggccccttgtaagaagaaaggatttggggaaattcaggaacaacctccccagcctgtgccatggaagcaagcggctgagttagcaagagcccaggctgcttatagtagttggtgtaaactgtgagtcagatgagaaatgtacagcacaccttctagaagcttctgagcccacctgaagacctggtgtggtaagggtgggtggtgtttggggacggtatggaagcttgttcctgaagcaccacagatgggtgaaggtgacgcttcattgggccttggctgagcatgaagagcggcagtcctgtccaggcctcctgtcaggtccagtcagccaattatgctttaaccaagcagcagggtttgctatgttctgccttaagtgccttctccacaaacaccccctctgcctgtgtgatgattgttgagagcatgtttcaccgaaagcatctggattgacactcatgaccaaacagtggcacagcctctgcttacattctttttgctttggttcctgaaaggaaggactggaccctgccctgcagtcgtcctttctgaggcctcccattccctggcagcttgagatagttggtgagcacaggggcaaccattttctcagagcatttgtgttgacccttgccccttctccgggaaggtggagactgctgtcttctcacaagcccatgatggagatcagttcagcattcacagccaggatctcaaatcctattctcatagcacattgtcacaatgaagcctgttggggatggcggtgatatctagactctggacttcggggacaaggtctctcaccagcacacagaggttggctgtctaactgatctactgagttaacgtctctgtcttcagctcaggatccagagaagaagacatgttcttagcccacggtattcagtacagcaagtggtttccttcaggttcccccctccgccattacagttggtgcctttctaatgttgccctggtttcagacgcctttcttagggtctgtgctagtccgccattttgttggatttactccctgcccccaatttggaaagataagctcctgagtagagttcattgaatttcccatctctagcagcttgccactttcagggtgggcaggacaagtgagagcagagagcaattgctgtcggtgctgtagaacttggctgtgcatcaaactaattttcacaagtgttcctcctaaacctcgaccatggaattaataatttgcctctttatttatgacctaattgtgactcttttttaataaagctgatgggaaaggcccctccctgaggctgatgactagactcacatttaacttccccacagtgtatgaagcatcaggcagagtattacagaaatatagtattttattgataaacctgtcctttaaaaggaacatgttttggggtgtcatcattttggtgtgaatcatgtaaatgttggctgtatgctgtttattatactctagtgtcaggacatgcactcagcggccgttctgcccacacataccgtgtagtctgcagtttttaaagtgacattaacagaatagatcatgtagggaaacctcagagtatacctgcatatactccatgtatcaccagaggcagtgtatttgtgagctgtctgcaaactaaaaattagaataaaaccattttcttgta

SEQ ID NO: 695 - DNA, 2667 bp, Cricetulus griseus
  modified_base (62)..(62): a, c, t, g, unknown or other
caacaacaccccctcccttctcccacccggcaccgggcacatcctagctctatttcctttcnctttctctcgctctctctccttctctacccccgatgtagacgtactcctctttcactatgagaccgcgcacgagtcccaagcatcggatgtcaaacaagaggccaaccatctgctaggatctgacgggcagcaggctgtcaaggaaagcaaagaacattcatgcaccaaatgcgattttattacccaggtggaagaagagatttctagacactacaggagagcacacagctgctacaaatgtcgccagtgcagtttcacagctgcggacactcagacactgttggagcacttcaacacggttcactgccaggaacaggaagccactactgctaatggcgaagaggatggccatgccataccccaccatcaaggaagagcccaaattgacctcaaggtctacagtctgctaaacccagactctaaaatgggagagacagttcccgagagcatcgtcaagatggcattgtctttcttggatgaagtgatgtatgctttgcatatgagttgccatggtgacagtggacctttccagtgcagcatatgccagcatctttgcacagacaaatatgacttcacaacacatatccagaggggcctgcacaggaacaatgcacaagtggaaaaaaaatggaaaaccgaaagagtaaaaaccttagcacttagcacaattaaatagaaataggttttcttgatgggaattcaatagcttgtaatgtcttatgaagacccattaaaaatacttcatagagttttttggtccagccctgcctgtacatacacacacactaccctcttttgatattttttgtcctttagatgttccagtacttggtagtcattttgttttgcagtttagactcattttgttcaaatatatcctttcttaagaacagtgtcctcaatgcttatgtagtaattttatttttagccagatatttctttcttgtttatgatgaaccggtttgaaatttttttaagcctcctgttggtcactattctcactttggcacattgtaacttaaggaatccccgcacttcaaaacacaaaatggatataaatgtcaggccatgggtttaatttgaaatgtagcaaagaaggttatgaagcaactatttctattgcagtaggtatctttagtgtgtatgtgtgtgtgcgtgtgtgtatgtgtgcattcaagttgtaaacggtaacatgaaacaaaggaagttctcaatgtaatggtgtggaaaacaagaaggaaatgaaaatattttatgcctacttaggatacaagggtagtactattcattccaagtacttcttttttctttaattttaagctcttaactcccattgttatgcttacgatgataaacatatatcctctttttattgctttgtctatgtttcagaggaatctctctacatgtcacattgagattttttgttgttgctgttgttctgttttgttttgttaaatccacttttaagatagtggtgttctgttctgaactcttctctttaagtaaaggtagtattttaagaaacgagcagtggggatttctttctaaggtaatagtgagaagaaggaaacggtgattatcttcacgagcttatttgtggaagcctgtggtagcacatcctgtttatgattgcacatgtgcacagaatctgttacgatttctcttgaaagaaaagtcagtgtggcaagcttacaccgcactgcaccagagggaagcaagagtagctaccataaaaagaatgtttaaccttcctcatacccagaagtcccaaaaactggatcctggttttaccccattatttcttcaacacaatgactgcaaaatatcactctttctttctgtgcctcaggtttcctcagttgtaagatggaaaagtatattaataataataatattaatattaaaaataataatggtaatgtagtacttgtttgtaaagcactttgagatcctcggttggagggcaccgtaggagtgtcaagtattattatgtggccaagggggttatttgaaactctggttcccaagggccaagaaagtttggcatcattttattaaagatgagctgtaaatatcttaactagacagcctatagtgttggctatgaagaggcaagactatatcaaggctgataagaccatagtttcttaatggctaccaataaggcacgtgtcacaataacaaatgctgaattctttagggtgtaatatttgacaacaaggttgatcttgggggggggggtgggggccagaaaccatctcaagatgccaatgtaaaactaacagcaatattcaccagcagaaaatgtctttcatatggaatgatttcatgttgataagaaaaagctttcaatttgtagtcctgatttgaacatcagactgtggggtataatagttctgttcttacaacacatggaattttttttcattttattttattttgttttcatagtgcatgttcatttctactcacaaaatgttgttggtgtatttcttatgcaaacaatcttcaggcagcaaagatgtctgttacatctaaacttgaataataaagttttaccaccaagttatccatgacggctttggtatggtttatatggat

SEQ ID NO: 696 - DNA, 2665 bp, Cricetulus griseus
  modified_base (1792)..(1792): a, c, t, g, unknown or other
actccgtccatctcctcctcattgcaggccacgttactttatcttcaactcacagaccgtgtatgccgtgccaatcctgacgttttcttttgtctgccatcctgctgtccttcccatctatgaagagctgaaaggccgcagccggaggaggatgatgaatgtgtccaagatttcgttcttcgccatgtttctgatgtatctgctcgctgctctctttggatacctgacattttatggacaggtcgagtccgaattgcttcatacctattctaaagtcgtgggaactgacattcttctccttgttgtccgcttggctgtgttgatggctgtcaccctcacagtaccagtggttattttcccaatccggagttccatcactcacttactatgtgctgcaaaagagttcagttggtggcgtcacagtgtcatcactgtggctatcttggcctttaccaatttgcttgtcatctttgtccctaccattagggatatcttcggtttcattggtgcatcggcagctgcaatgctgatttttattcttccatctgccttctacatcaagttagtgaagaaggaatctttgagatccgtgcagaagatcggggctctgctgtttctcgtaagcggcatagtggtgatgtttggaagcatagccttgattgttttggattgggtacactttttaaagaaacttatctgtgtgttagggaatggatattaacagcaaaaccacgagtcttgggttaagggaagtgactatttattccattccagagaatggacgaacttttaactttttatcaagccacatgcttggctgtgtcattgtttaacttggatattttatgattttacttgaatgtgcctaacggaaccattcgatgtgaaaaatacttaatttacagcaaagtattgaaataagcattgagaaaaacacttattttttgtaccaaaaaatactttaaaagacctcagaagcactattttacttttgaagaagttgcattttttgaactttatccagaaccagttgtcgataaactccgtaaagcaatttcatttatatttaaaatgaatattagtattatgaaattatttgcctttttttgtaggtcattataaagccaaatactttttttgtaccatgaattagctatagttttgttttgtttcattcaaatttcatttaaaggataattggtagctgctgcaccaaatcaggtgaacactgttcattgctttgtttgcctccagataattggttcattaaactaagatgtttatgtcttcaacctattaggctgaaaaacaatgcagatatttctgttggaaatgaaataactgacttttgaggtaccaaataggtttcccatgcagtaagctttttaaaaactcgcactggattgtcatctcattcttgtacaatgcagaattatttgtttacatcgaacaaatgattagttaggggaaatagtacaacatggttgtacttagtttctggtccaactgcatgcttacctttccatttcaattccagttaaaagtgaaaacattactttgaagcttggctttaggagcacatttattgtatgttaacggtgtatggtgaatatattaaaaaatgtggtactttgctcatcaggcataatgttaagatctaatataacataattccattaagtggttgagggaagcaagtggaatcatcaattggccatctgactcttgaaactaaatatttttagtttgaggcaccagggtcagaaatgtggcacacatggttttttgtacncagtcttgtatatgtggctaaattcatagtcaagatgtgtctgctattcaaggatcctgttcacagccaatcagtgtggagagactttccaaacctttttgtgagggagcacaatttaaggttcaaaacgaattttttaggccaaattccaacacttaaggctattttatcagccttgaggttcctaaactgaattcccatccatgagcagtcttcagtattaaaaccactgtcctgtcacctcattttgcattgctgtcttccatggacatttcagttataactgtactatttatagagcagcattaatccattaaagctaacctatttttcaatatttatgataaactgtacatacattgtccatatgtatttgtaaatagattgtatatactgttggaactgggtcttgggttcaaatgtatatattcccgtaagtttcttaactgcattttgatgaacttacattatatataagcccccaaagtacttgtatagagaatccaatattacaaattgacattgtgtataaatgctgaaattgaagatacttgtttaaattgtatttgcaataaactgatcggacatcaacttaagttcaagtcctatttaaattttaaatgaggtctaaattttcaaaatgcagtagctataacatgttacctgaaaacatgtcaaaatgtgatcacaatgaaagatgtgagagccttggttgtgtatatagtgtaaatgtctccactgtactgttagaggctaacatgccactgtggcttgttggcaaggagtgctacaccggtttcaatgaaacaatgtatgtttgttttaactgaactaaaataaatacatacttaatcctaaaaaaaaaaaaaaaaa

SEQ ID NO: 697 - DNA, 2665 bp, Cricetulus griseus
agcagaaagaaacagatgccattgatgacacactgagttccaaatttaaagtcaaagaactgtcagtgattgatggtcggagagctcagaattgcaacatccttctgtcgaggttgaaattatccaatgatgaaatcaagcgagcgatcctaacaatggatgaacaggaggatctgccccaaggacatgttagaacagcttttgaagtttgttcctgagaaaagtgacattgacctgctagaggaacataaacacgagctggaccggatggccaaggctgatcgcttcctgtttgagatgagcaggattaatcattaccagcaaagactgcagtcattgtacttcaagaagaagtttgcagagcgtgtggcagaagtgaagcccaaagtggaagcgattcgttctggctcagaggaggtgttcagaagcagcgccctcaagcagctcctagaggttggttttggcttttggaaattatatgaataaaggacaaagaggcaacgcgtatggattcaaaatctccagcctcaacaagatcgccgacacaaaatccagtattgacaagaacattacccttttgcactatctaataactattgtggagaataagtaccccaaagtcctcaatttacatgaagaattgcgggatattcctcaagcagccaaagtcaacatgactgagctggacaaagagataagcaccttgagggaagctcagctcaaaagaacaacgggaaagggagcgcaagatgaggaaggccaaggagaacagtgaagaaagcggagagtttgacgacctggtctcagctttacgctcaggagaagtgtttgacaaagacctttccaaactcaaacggaaccgcaaacgcatttccaaccaggtgacggatggtagccgggagcgaccaatcacaaaactgaatttttaattttcttgcatccttttctagaaagcgcagtagcagccctttggcctgactagaacttttcattacacttgccttgcaatcaaaacagtggcaatttcttctctcacctgtgagtgaaggtgtgaatgtgtgtgtgtaaatgtatgtgtatatatgtgaaaatgtatatagacgtctgagtgtttttttttttttttgtaaaacacggtttctaaataatgtcacctacatcctggttaaaggccaggatttccagaaccttgttgttgacctaacaatacagatttgtaaacctggacaatgaaatttcccaccgaagactcagtggaagaaagaactccctgaagattctttttaaaggcatatggggtgcttttggggtgtcttctgtttcctgtgtaggccatgctgcatatcttgggataaaggacactcacagtgacacaaaatgtcaacagtatctacagggatgctcagatctatttatctcaaaggatatttgaagcgattgctgttaagtgttgtcattttaaattgtgtgtcagtgaagctacctgtacgccaactcttagtatccttaaattatatggtatgtaaaaaggactgtttacttatttttttcttccttttgtctttatttatttgtacttgggtgtggggagggactagtgttttctgttttccatctaatccttttagtaggttagggtttacctagtggaaagagtagtttttcctattgcactagaatattatttactcactaaattgagtttttcagtcaagtatcaaatatttattaagcacttactatgtaccaggcatagtagagctatagtggtaagcaagacagagtccctgcccgccaaggagttcacactttaatagggttttcagggacaatagaatgccagtgtgcatagtatacaaggaatcatagctatttaaaaataatctgtatgaactataatgcttagtgcagatggcaagggatctgtgctgtgtaaaaactgtgaaacagtgctctaagaattgtcgagagctgtggtttttttaccctttgtttttcttcattgaaagcatagcgactttctacccattatatggaagtaaatggctctccaataaagcagccacaggtacaaagcagagctgactcgaggaggatgggatggaatgatggcttcctctgtccctgactaagtgcctctgtgtatattcttttctatttatagcaggaaaagtttggtcgagctcagttttggaactgtggaaagacactcacaccagagagcaagtgtgtgtagcatgtccccttgcccttttaaaaccatcctcaccttgatgtagccatcctggtaggcctcctttgccattcccaatattcgtttattttccaaaaaactgtgtgcaggtaattccatgtgccattgttacaaacaaacaaatgaaaaatctactttttagactggtgctggtgtaagtagccactcttatctcttgagtatgtattttaaagatttttttttaaataatgcgaaaaaaaaaaagcattataatttttaaacttaattaaatgtctcgtatcttattagcttggtagttggaaccacttagtctttaggtgcaagactgttgttacagaaccaagaaaaaaagatgttgtatatgtgtgttatgagactgtacatttttttaaatagcaatatgcaataaagatgacttcattgggtgta

SEQ ID NO: 698 - DNA, 2665 bp, Cricetulus griseus
cactcctcggcgattgcttgcttatggctgttgcagcaagaggccaagcaataagcatatgcgagctgcagggccctgctttgggggccagtgggctcaaagagaagggatgaagtcacctgtttgttctagtcattccagtggacattgtacaggcccgggaggaaagaacaaccggatgtggttatccagtcatccaaagcaagtctccagcacaaagccttctctcctgagctgcccttctcctgtgcctcctctctacctggatgacgatggactcccctttcccacggatgtgatccagcataggttacggcagatcgaagcagggtacaagcaagaggtagaacagctacgtcgacaggttcgagagcttcagatgaggttagacatccgtcactgctgtcgcccctcagcagaaccacccatggactatgaggatgactttacgtgccaccttaagctgcccattcctgatcagcaactctatgacccagttcttgtctgtaactcatgttacgaacacattcaagtgtctcgtgccagggaactcatgagccagcacctgaagaaacccatcgctacggcttccagctgaatgccagaggagatgacctgtccattcttagcaggtttgaagggaggaggatctgcttcaggtgtagtctggaaggttccttggtatggctcatgaacacagagctcaaagataccgtcttgagaaatcctccttggtaccatgtgactggagcagaggaatttgaatttggcaggagattttcttctggagagaccctcactttggggtaatggtcctgatccagacccagagtctggaagcttcacgctgagttggtgactccagcttctctcctggaggtcacaagatgatgatttcataaataactgcgtggtagcaaagtgacccaaaacagcaatagaaaggcatactcacaaccaaactccaaagtgataatgagacccatctctcctccaccttgaaaagagcagatcatagtatacaagataggaattcccatcctatttgagaagaactctcttctgtacctctgcgctctgtgtctgtgcatgaaggctccgtcttttagaggcgctccctctagttgcattagtactgtcctctgtggagtttgcttcaaagactggtttggcaaatggaggttttaatgtatttttcacctggctcattggccagcatcagtgaatattcagtttttagagggacagttctaaggattaagacatttttggaaacaggaaaactctggtgatgtttagtcttggcgaatatcagttattttgagctgtgaaggcagttgtcactctgttccgcagtggctgctcttgaggtgtgtgcgcactgtgaagaatgagaagggaaaagcaaaattatccttgtgaaattctgctgattgtaccctaccctttgcacctgacttttcctagttgtcctggtgctaacacgggagctacaccttgatcctcccctggcatgaaaataaagcaaaggattttgttgttccactgcccacttcccccatgttgtctttcccttggctgctgcctcctctgggtcacactgcttcttatcctgaacacttgacaccttgagggtagaatatagcatttggtttttacctcctagcgtatgctatttggtatgtgagggtttcagtacaaatgctgctgtctatttctgtgcacttaacaatggaacccaaacagaaagaagaaagccttgataccaaaattgggagtgatgatgtgtccatttggaccaaacattttgttttgttttattttgattttgtttttcatcttactatgtaccagtggcacttaaccaaaagatacagtaatatagccatgtactgtgtttgggacaggtacagtctccttggcttacagtgaaagcactaggactccctacccgtgttttccttaattcattcatgtagaaaagataaaatgcttactctgagttacaactgctactgtcatgttgctttctagaaaacacctttttcattccgactaaccagaacctgcatttagaacaggaatcactgtcctgaccttttctccagttctgcagcagagcatctgtgccccttgtatatgtgccatggatgtaacctaaaaagttttggcatatttaggtcagcctagcagatttttttttttttcatttaaatggagctgaataatggagatttttgtctgggaaattcctaagatcaatgaaagagtgacaaactattttgtctctgatacataaaaatattttaagcattttctcaatcattaaaattgactgccagtcacgagtggttttttaattaccgactttcattacacttcactctgttttcagggggatcggtaacattctgggagactgtatctgtccactttgtgtgactgttttgagggactgtcccatcagtgaacaaactgcatggcattggagagagactctgggcttctggcccagctgtgttcatcctttcagagctgttgtgggtgtaagtgacatgatgtggccaaaaatccaaactgtgcagttgcgttgtgacaaacatgcaatgtgctgtaaaaactcaatacagtttaaataaaatctctatattaagtaaaaaaaaaa

SEQ ID NO: 699 - DNA, 2664 bp, Cricetulus griseus
attcgttcttctacaacttccatgacttcagtacccaagcctctaaaatttcttcgtccacactatggcaaactgaaggaaatctatgagaacatggcccctggggagaataagtgttttgctgctgacatcatatctgttttggccatgaccatgagtggtgagcgtgaatgcctcaagtatcggctagtgggctcccaggaggaattggcatcatggggtcatgagtatgtcagacatctggcaggagaagtggctaaggagtggcaggagctggatgatgcagagaaagcgcagcgggaaccactgcttaccttggtgaaggagattgtcccctacaacatggctcataacgcggagcatgaggcttgtgacctgctcatggaaattgagcaagtagacatgctggagaaggacatagatgagaacgcgtactcaaaggtctgcctctatctcaccagttgtgtgaattatgtaccagaacctgagaactctgccctactgcgctgtgccttgggtgtgttccgaaagttcagccgtttccctgaagctctgagattggcattgatgctcaatgatatggaactggtggaagacattttcacctcctgcaaggatgtggtggtacagaagcagatggcattcatgctgggtcgccatggagtcttcctggagctgagtgaagatgtagaggagtatgaagacctcacagaaatcatgtccaatgtacagctcaacagcaacttcttggccttagctcgggagctggacattatggagcccaaggtacctgatgacatctacaaaacacacctagagaataacaggtttggtggcagtggctctcaggtggactctgcccgaatgaacctggcctcctcttttgtgaatggctttgtgaacgcagcctttggtcaagataaactgctgactgatgatggcaacaaatggctttacaagaacaaggaccatgggatgttaagtgctgctgcgtcccttggcatgattctgctgtgggatgtggatggtggcctcacccagattgacaagtacctgtactcctctgaggactatatcaagtcaggagctctccttgcctgtgggatcgtgaactctggggtccggaatgagtgtgaccctgccctggcactgctttcagattatgttctccataacagcaataccatgagacttggttccatctttggtctaggcttggcttatgctggctccaatcgggaagatgtcctaacactgctgctacctgtgatgggagattccaagtccagcatggaggtagcaggtgtgacggctctggcttgtggaatgatagcagtgggatcctgcaatggagatgttacttctaccatccttcagaccattatggagaaatctgagactgagctcaaggatacctatgctcgttggcttcctcttggcctgggcctcaatcatttggggaagggtgaagctatcgaggcaatcctagctgcactggaggttgtgtcagagccattccgaagttttgccaacactctggtggacgtgtgtgcttatgcaggctctgggaatgtgctgaaggtacagcagctcctccacatctgtagtgagcactttgactccaaggacaaggaggaggacaaggacaagaaggaaaagaaggacaaggacaagaaggaagcccctgctgacatgggagcacatcagggagtagctgttctagggattgcgcttattgccatgggggaagagattggtgcagagatggcactgcgaacctttggtcacttgctgaggtatggggagccgaccctcaggcgggctgtacccttagcactggcactaatctctgtttcaaatccacgactcaacatcctggatactctgagcaaattctctcatgatgctgatccagaagtttcctataactccatttttgccatgggcatggtgggcagtggtaccaataatgctcgtctggctgcaatgttacgtcagttagcccagtatcatgccaaggaccccaataacctcttcatggtgcgcttggcacagggccttacacatttagggaagggtaccctgaccctctgcccctaccacagtgatcggcagctcatgagtcaagtagcggtggctgggttgctcactgtgctcgtttccttcttggatgtccgaaacatcattctaggcaaatcacactatgtactgtatgggctggtggctgccatgcagccccgaatgctggttacatttgatgaggaactgcggccattgccagtttctgtccgtgtgggtcaggcagtggatgtggtgggccaggctgggaagcctaaaacgatcacagggttccagacacacacaactccagtgttgttggcccatggggaacgggcagaattagccactgaggagtttcttcctgttacccccattctggaaggttttgttatactccggaagaaccccaactatgacctttaagtggccactagagaccctgggctgcagctgattttttttttttagcaggccatactgtctgccaggggtggatactgttccagatctttgggggaattgttacctcctattgttttgttactaagtaagataactttgttgaataaagacctttatccccaaaaaaaaaaaaaaaaaaaa

SEQ ID NO: 700 - DNA, 2664 bp, Cricetulus griseus
  modified_base (2654)..(2654): a, c, t, g, unknown or other
aacccagccgattatgcagagccagccaatactgatgattcctatggcaatagtagtggcagtacatggaacaacactggccactttgaaccagatgatggaacaagacttgatttcattggggttgaggggtcaaattatccccgaaaatttgagactgctcctggtgcatggagaactgcaacagaagagtggggaactgaagattggaatgaagatctttctgagaccaagatctttaccgcctctaatgtgtcttcagtgcctctgcctgcggagaatgtgacaatcactgctggtcagagaattgaccttgctgttcttttggggaaaacaccatcttctatggagaatgattcatctaatctggatccatctcaggctccttccttggcccagcctctggtgttcagtaattccaagcagaatgccatatcacagcctgcttcagggaatacattttctcatcatagcatggtgagcatgttggggaaaggattttggtgatgttggggaaagctaaaggtggtagtacaacaggctcccagttcttggagcaattcaaaactgcacaggccctggctcagctggcagctcaacattctcaatctggaagcaccaccacctcctcttgggatatgggctcaacaacacaatcgccatcactggtgcagtatgatttgaagagtgcaaatgattcaacagtgcacagtccttttacaaagcgccaggcattcaccccatcttcaaccatgatggaggtgttccttcaggaaaagccacctgcagtggctacctcgacagctgcacctcccccaccctcttctcctctgccaagcaaatccacctcggctccacagatgtctccggggtcttcagacaaccaatcctccagccctcagccggctcagcagaaactgaaacagcaaaagaagaaaacctccttgacatctaagattcctgctctggctgtggagatgcctggctcagcagatatctcagggctaaatctgcagtttggggcattgcagtttgggtcagagcctgtcctttctgattatgagtccacccccaccacgagcgcctcttcaagccaggctcctagtagcctgtataccagcacggccagtgagtcttcatctacagtttcatctaaccagagtcaggagtctggttatcagagtggcccaattcagtcgacaacttatacctcccaaaataatgctcagggccctctatatgaacagagatccacacagacgcggcggtatcccagctccatctcttcatcaccccaaaaggacctgactcaggctaagaatggtttcagttctgtgcaggccacgcagttgcagaccacgcaatctgttgaaggtgctacaggctctgcagtgaaatctgactcaccttccacttctagtataccctctctcaatgaaacagtacctgcagcttccttactgacgacagccaatcagcattcatcctctttaagtggcttgagccacagtgaggagattccaaacaccaccaccacacaacacagcagtgcgttatctacacagcagaataccctttcttcatcaacatcttctgggcgtacttcgacatccactcttttacacacaagtgtggagagtgaagcgaatctccattcttcctccagcactttctctaccacggccagcactgtctctgcacctcccccagtggtcagtgtctcctccagtctgaatagtggcagtagtctaggccttagcctgggcagcaactctactgtcacagcctcaactcgaagctcagttgctacaacttcaggaaaagctccgcccaaccttcctcctggagtcccgccattgttgcctaatccatatattatggctccagggctgttacatgcctacccgccacaagtatatggttatgatgatttacagatgctccagacaagatttccattggattactacagtatcccgtttcccacacccaccactccacttactgggagggatggtagcctggccagcaacccttattctggtgacctcaccaagttcggccgtggggatgcctcctccccagccccagccacaaccttggcccaaccccaacagaaccagacgcagactcaccacaccacgcagcagacattcctgaacccggcgctgcctcctggctacagttacaccagcctgccatactacacaggggtcccgggcctccccagcaccttccagtatgggcctgctgtattccctgtggctcctacctcttccaagcagcatggtgtgaatgtcagtgtgaatgcctcggccacccctttccaacagccaagtggatatgggtctcacggatacaacactggtgtatcagtcacctccagtaacacgggcgtgccagatatctcgggttctgtgtactccaaaacccagcagtcctttgagaaacaagggtttcattccggtactcctgctgcctccttcaacttgccttcagccctaggaagtggagggcccatcaatccagccacagctgctgcctacccacctgccccctttatgcatattctgaccccccatcagcagccacattctcagatccttcatcatcacctgcagcaggatggccagtctttccctttaaaaaaaaanaaaaaaaaaa

SEQ ID NO: 701 - DNA, 2664 bp, Cricetulus griseus
tgtcaattgtgcttatacatcaaaaatattgccaccagagaaagagggtggattaccacgtcatgtgggtaataaaacagaatgtgccttgttggggatttctcttggattttaaagcgagattatcaagatgttagaaatgaaataaccagaagaagcattgtacaaaagtttataaccttcaattctgttaggaagtccatgagtacagtcctgaaaaattcagatggaagtttccggatcttcagcaagggtgcatctgagataattctgaaaaaagtgtttcaaaatcttgagtgctaatggtgaagcaaaagtattcagacccagggaccgtgatgatattgtgaaaactgtgattgagccaatggcatcagaaggcctgagaaccatatgtctggccttcagagattttccagcgggagaaccagaaccagagtgggataacgagaatgatgtcgtcactggccttacttgcattgctgttgtggggattgaagatcctgtgaggcctgaggtaccagaggcaataaagaaatgtcagagagctggaattactgtgcgcatggtcactggtgataatattaatacagctcgggccattgctaccaaatgtggtattttacacccaggggaagatttcctttgcttagaaggtaaagattttaaccgaagaatacgaaatgaaaagggagagattgagcaagaaagaatagacaagatttggccaaagcttcgagtacttgcaagatcatctcccactgacaaacatacactggttaaaggtataattgacagcactgtctcagagcaacgccaagttgtagctgtaactggcgatggcttcagttccagcttactgttaatgtagtagcagtgattgttgctttcacgggcgcttgtattactcaagactcaccacttaaggcggtgcagatgctgtgggtaaacctcatcatggacacgctggcttccctggccctggcaacagaaccacccaccgagtcacttttgcttcggaagccttatggtagaaataagcctctcatctcacgtacaatgatgaagaatattttgggtcatgcattctatcaactcgtagtggtttttacgctcttatttgctggagagaagttttttgatatcgacagtggaaggaatgcccctctgcatgctcccccctcggaacattacactattgtgtttaatacctttgtgctgatgcagcttttcaatgaaataaatgcccggaaaatccacggtgaaagaaatgtgtttgaaggaatctttaataatgccatcttctgcacaattgttttaggcacctttgtggtacagataataattgtgcagtttggtgggaaacctttcagctgctcagaactttcaatagaacagtggctgtggtcaatattcctgggaatggggaccttactctggggccagcttatctcaacaattccaactagccgtttaaaattcctaaaagaagctggtcatggaacacaaaaggaagaaatacctgaggaggagttagcagaggatgttgaagagattgatcatgccgaaagggagttgcggcgtggccagatcttgtggtttagaggtctgaacagaatccaaacacagattcgagtggtgaatgcatttcgtagttctttatatgaagggttagaaaagccagaatcaagaagttcaatccacaactttatgacacaccctgagtttaggatagaagattcagagcctcacatcccccttattgatgacactgatgctgaagatgatgctcctacaaaacgcaaccccagccctccaccctctcctaacaaaaataacaatgctgttgacagcggaattcaccttacaatagaaatgaacaagtctgctacctcttcatccccaggaagcccactacatagtttggaaacatcactctgattgtaagctgaatgttaacacactagctgcattgtaaagaaacaaattgaaactgagtcttttcacatattgtgacggacaagatagtattcttgtctttggacttcaacagaagacacacttgtacgaatgtagatttatttttttaaaaaaaaagcaaagctttctgccagactgagggtgctttttggggggtgggagaaatgaactgacagataaacaacggtaactcggcataagtgacccgtggatcatctgtggtacctagagtggtcctgaaggtgtattagcagagctgtggtttatctcggtccttgatgggagagagggaggagtgaagctgggcaagacggagagccctggatcattgaatgaatactttaatttctgctgttggctgttaataatttggattatttatgtttataaatgatacagatctgtttacaaggtttgtagatactttttttgttcttcatagatgggaagcttccttataactaatgcagagaaaaattagtccttcaaatactgctgtattttcaggaaataaaaaaggggtgtttctattgaaactgtactaaatttttgcctacaatttatcttgttaaatattgtagataaattgctaatactaatagccaaatagataacactaatgctttgtttaaaaaacaaaaaagaaaacaagacaaaaaagaacaaaaaaaaaaaaaaaaaaaa

SEQ ID NO: 702 - DNA, 2663 bp, Cricetulus griseus
gggttttgacccaccgcatcaaagtgacacaagaactatttacatagccaacagattccctcagaatggcctatatacacctcagaaatttatagataatcggatcatttcatccaagtatactgtgtggaattttgtcccaaaaaatttatttgaacaattcagaagagtggcaaacttttatttcttattatatttttggttcagcttatgattgatacacctaccagtccaattaccagtggacttccattattctttgtgataacagtaactgccataaaacagggctatgaagactggttgcgccataactcagataatgaagtaaatggagctcctgtttatgttgttagaagtggtggacttgtaaagactagatcaaaaaacattacgtgtgggtgatattgttcgtatagccaaagatgaaatttttcctgcagatttggtgcttctgtcctcaggtggatgtgcagaacaattgaggcaacttgccaggagaattacagaagaccatgtgattcagcatgggctggtagtagatgggaccagcttatctcttgcactcagggagcatgaaaagctatttatggaagtctgcagaaactgttcagctgtattatgttgtcgtatggcacctttacagaaggcaaaagtaataagactgataaaaatctcacctgagaaaccgatcacattggctgttggtgacggtgctaatgatgtaagcatgatacaagtaagcacatgttggcataggaatcatgggtaaagaaggaagacaagctgcaagaaacagtgactatgcagtagctagatttaaatttctctccaaattactttttgttcatggtcatttttatttacattagaatagctacccttgtacagttattttttttttttatttaagaatgtgtgctttatcacaccccagtttttatatcagttctactgtttgttttctcaacaaacactgtatgacagcgtgtacctgactttatacaatatctgttttacttccctacctgttctcatatatagtcttttggaacaacatatagaccctcatgtattacagagcaagcctaccctctatcgggacattagtaaaaaccgtctcttgagcattaaagcatttctgtactggaccaccctgggtttcagccacgccttcattttcttttttggatcctattttcttgtggggaaagatacatctctgcttggaaatggccagatgtttggaaactggacgtttggtactttggtcttcacagtcatggttattacagtcacggtaaagatggctttggaaactcatttctggacttggatcaaccatcttgttacctggggatctattatattttattttatattttctttgttttatggtgggattctctggccatttttgggatcccagaatatgtactttgtatttattcagctcctgtcaagtgggccggtgtggtttgccatattcctcatggttgttacttgtctatttcttgatgttgtgaagaaagtatttgatcgacagcttcatccaacaagtacagaaaaggcacagcttactgaagcacattcaagtgtcaagtgcttggactccatgtgctgtttcccaggagagaccccatgcacatctgttggaagaatgctggagcgagtcataggaaggtgtagtcccaaccatatcagcaggttgtggagtgcatcggatcctttgtataccaatgacaggagcatcttgactctctcgccaatggactcatctacttgttaaagggacagtaggactctgaggacaagttcaccttcctcagatttggggtcttcatcctataaaaggccagttactgtctgaaatgtggaggagttgagaccgtcttggagttccacaggaaacagacagttacatgaaccctctccattctctttaatttgaatgcaaccatactaaaatttgggaataaagagatacttccaatctctttgtctggtttgtcccttctgctcatgggactcctggtggcatcacagcctttgctggggccactatactttaatataaaggtagaagaaaggggtaatttctgggtatatgtatttttaggattagtgtggttcgggactcttctatttaaatatgcttctgtaaattatgctaaagatttgccttgagaactctattttttttattagattatatttgaagcttttcgtggggaaagttaatgtgaatattaaggagttttggtccttcagtgacctgtgttaattcattagtgctttttaagtaacagagcaaatgaagagagcaagtttctaaccattttctttttcagtgtgggtagtaagcttttatgacaccagagtcctttattgatacagtaatacagccagtgaagctaatgctgcaagtgcaaagatagttttacgtctcttgtccaagtcagaggtagaaccattcactagacttcaaattggtgtttgctattatttttgtgaccaagtatgtaaaatctttagtgggtaaattacataccattgtcacattaatttactgaacttgtcttatcttttgcatgcctcaacctggctaatatatttaaaccaccaataaagacttggtattaagaaaaaaaaaaaaaaaaaaa

SEQ ID NO: 703 - DNA, 2663 bp, Cricetulus griseus
gtatgagtgaccaattgtgtggcattgctgcctgccagacggatgacatatacaatcgcaactgccttattgagctggtgaactgccagatggttcttcgtggagcagagacagaaggctgtgtcattgtgtcagctgccaaagcccagttactgcagtgccaacatcatccagcatggtatggtgacacactgaaacaaaagacatcctggacttgcctgttagatggcatgcagtattttgctaccactgaaagcagccctactgaacaggatggccgacagctctggcttgaggtgaagaatattgaggagcaccgggaacgcagtctggactctgttcaggagctgatggaaagtggacaggcagtgggaggcatggttaccacaaccacagattggaaccagcccgctgaagctcagcaagcccagcaggtccagcggatcatttcacgctgtaattgccgaatgtactatattagttacagtcatgacatcgaccctgagctggcaactcaaattaagccacctgaggttcatgagaaccaggaaaaggaggatctcttaaagaagcaggaaggggctgtggatactttcactctcatccaccacgaattggaaatttctaccaacccagctcagtatgctatgattctggacatcgtcaacaacctgcttctccatgtagaacccaagcggaaggagcatagtgaaaagaaacagcgtgtcaggttccagcttgagatctctagcaatcctgaggagcagcgcagtagcatattgcacctgcaggaggctgtgcggcaacacgtggcccagatacggcacttagagaaacagatgtactctatcatgaagtctttacaggatgacagcaagaatgagaacttgcttgacctgaaccaaaaacttcagttacagctaaaccaggaaaaggccaacctgcagctggaaagtgaagaactcaacatcctcatcagatgttttaaggatttccaactgcagcgggccaacaaaatggagctgcgaaaacaacaggaagatgtgagtgtggtccgtcgaactgagttttactttgcccaggcacgttggcgcctgacagaggaagatggacagctgggaatagctgagctggagctacagaggttcctctacagcaaggtgaataagtctgatgacacagcagaacatctcctggagttgggctggttcactatgaacaaccttctccccaatgctatctataaggtggttctgcggccccagagttcctgccagtcagggagacagcttgccctccgccttttcagcaaagtccggccacctgttgggggtatctctgtgaaggaacactttgaggtgaatgtggtgcctctcaccattcaactgtcacatcagttcttccataggatgatgggctttttctttcctggtcgaaatgtggaagatgatgacgttggtgatgaagaggataagtctaaactggtgacaactggaataccagtagtgaagcctcggcagctgatagcaacagacgatgcagccccactaggtcctgggaagggtgtgacacagggcttgacccggagttccggggtcagaagatcatttcgcaaattacctgagcacccagttgatgatattgacaagatgaaagagcgagctgcaatgaacaactccttcatatacataaaaatcccacaagttccactgtgtgtcagttataagggtgagaagaacagtgtggactggggtgaccttaatttggtgctaccctgtctggagtaccacaacaacacgtggacatggctggactttgccatggctgtcaaaagggacagccgaaaagctctggttgcccaggtaatcaaagaaaagctaaggttgaaacctgcaacagggtctgaggtacggggaaagctagaaacaaaatcggacctgaacttgcaacagcaggaagaggagaaagctcggctccttatcggtttaagtgtgggtgacaggaaccctggcaagaagtccctcttcagcaggcgcaagtgatctggagatccacgtgactgcagtctaggatctgactctggctcaggatctggggacttgggtgtgggcagagcttcccttcatgccacgggatttgggggctttggagctcatagggaactgagacccgttcaaccgctggcctgtccctgcagggcatggtggacaaaagtgctaaatttcctcatgcttattaggcccagggccagaaaggcaagagaatcagaaggcctgtggagtgtgtccaagcctagtatcctgcgcaacagaaagggtgggggatagttttgatcaagtatgataaatttttataaatagacatatatatatataatatatatatatatatttctaagtgtaattgctctccctttgtgccagtaagctgaggggaggggtctgatcctctgtgcctcactccactgccttgttgtatgaaatgtgttagtattggggggaggggtcagcttcccagtctgtgtgctcactcgggaggatggcattaggagccagggctggccatggataccttcctttcccccctggggtatgccctagagaatggagaaaaaaaaatgatttaaagaaaaacatattttaaatttgatgctggcctttttt

SEQ ID NO: 704 - DNA, 2662 bp, Cricetulus griseus
aagagccaatcaaaggctcctttgaaaactccaggatgaagatgacttcagtgctaatttgcctcaccctgggcctggttctggtctttgggaaagggtctgctttacatcttcaagagtcccacacagcccatcaggccactgacttcggagtaaaagtgtttaagcatgtggtccaggcctccaaggatcggaacgtggtttttctccctatggggtgtcctcagtgatggccatgctgcagctgaccacagcagggaaaacccagcggcagatccaagacgctatgggattcaaaatcaacgagaagagcacagctcctgccctcgtaagctgtccaaggagctcatggggccgtggaacaagaatgaaattagcaccgccgacgccatcttcgtccagcgggacctggagctggtccagggcttcatgcccaacttctccaagctcttccggaccacagtgaagcaggtggacttctcagaggtggagagagccagattcatcatcaatgactgggtggagaggcacaccagaggtatgatcagtgacttacttgccaaaagggctgtggatcagctgacacgcctcattctggtgaatgccctctacttcaacggccagtggaagacccccttctcagagtccagcacccaccaccgcctcttccacaagtctgatggcagcaccgtctctgtgcccatgatggctcagaccaacaagttcaactacactgaattcaccactcctgatggccactactacgacatcctggaactgccctatcatggagaaacccttagcatgttcatcgcagcgcccttcaaaaaggaagtgcctctctctgccctcaccaacattctggatgctgaactcattcgacaatggaaagggaacatgaccagacttccccgacttctcatcctgcctaagttctctctggagactgaagtggacctcagagggcctctggagaatttgggcatgactgacatgtttagcccaacccaggctgacttcacgagtctttctgagcaagagcagctctctgtagctcaggccctgcaaaaagtcaagatcgaggtgaacgagagtggtacggtggcgtcttcctccacagccattctagtctcagcccgcatggcccctcaggaggtgatcatggaccgacccttcctctttgtggttcggcacaatccaacagagacaatcctcttcatgggccaattgatggaaccttgacagcaggaagagaagccttcactcgggacaaaactggagctgttataagcagaaactctgaagaaaagactcatttcaagtactctttcgggagaaggagaaggcatttcccttcactcccacagtgggaaatcttccaaccagcctcccagacctcggactctcgaaggaaaaagagtctaactcactctggccacctcttgcaccttttgcagttgctgaggtgggtgccacaagctaaagggagaaacactgccttctcccaaggtacaccgcgggaatgaccgccttgcccggctcccaggggcagcaggtggacagatcaagtgtttgcccagtattgagccctgtcccagctccttttgtgccctcccctgacaccgcataggttatttcagagtgtaggtgacttgtttacatagcttttttcaacccacaaccctttttcttttgggaacagggaaagaaaggtcagatgtgtgtgtgcctggctcatcatccccaatctccctgtcggggtgcaggggagatgccaggggtgtgcttgaatatttatcacattcttcctcttgtgtgcttgttggagagaaaaatatattgttaaggaaaaatcattttatttaagtcatggcacacggtgtcccatttggggtctatatccctgtatctcaggggtacggcactctacaagcctgcccctccgggtggccctagtgatgggagttcacactgccgcctagtggcagcctaacacccttatcccaatactccccctctccagtcccccctcccactcccttccgctcccgtggcttttttccttagggaccttgccaaggtgatgcttggcagcccacgttaaaggaagagaagaaaaaaagattgggtggaagagagatttgagggagggcaaagtggtttcaaatttttccaatgcattcaagagcagaatggcaataggggctgtgtgacctaacaggacagaactttctccaattactgggtgactcagagccgcactggtgactcacttcaatgtgtcatttccggctgctgtatgtgagcagtggacacgtgggggatgggggtgggatgaaagagacagccagctcccggtcaaccaccttagttagataatcatttttgaaagcctccttagctggggtatgatcagaaaaccaatttactgaaaaactgcacaagaaggtagcgtgaatgcaatctcatagcaggccactctgcatccattatgtctccaccggaagaaaaaacaaacaacccattctctttggttttgtttctctctcttcctctcccctctcttcttcctctactcattatgcactggacagccatacaccgtgtacccacagaggccccaatgtgggggtcaaatgttcttgaattttgttggtaacat

SEQ ID NO: 705 - DNA, 2662 bp, Cricetulus griseus
tgactaatgatgagaaaaatgtgattaccaacctaagcaaatgcgacttcacacagatgagccagtatttcaaagaccaatcagaggctcggaagcagatgagcaaaggaagaaaaaattgaaaattaaagaagaaaatgaaaaattattgaaagaatatgggttttgtgtcatggataatcatagagagcggattgccaacttcaagatagagcctccagggcttttccgtggccgaggtaaccacccgaagatgggtatgttgaagagaaggatcatgcctgaggacatcattatcaactgtagcaaagatgccaaggttccttctcctcctccaggacataaatggaaagaagttcgacacgataacaaggttacttggctagtctcctggacagagaacatccaaggttctattaaatacatcatgctgaatcccagttctcgaatcaaaggtgagaaagactggcaaaaatacgagactgctcggcggctgaagaagtgtgtggacaagatccgaaatatcgggaagactggaagtccaaagagatgaaaagttcggcagagagctgtagctctgtacttcattgataagcttgctctgagagcaggcaatgagaaggaggaaggagaaacggcagacactgtgggttgctgttctcttagagtggaacatatcaatctacacccagaattggatggtcaggagtatgtcgtggaatttgactttcctggaaaggactcaatcagatactataataaagtcccagttgagaaacgggtttttaagaacttacaactatttatggagaacaagcagccggaggatgatctttttgatcggctgaatactggcattctaaataaacatcttcaggatctcatggagggattaactgccaaggtgttccgtacgtacaatgcctccatcacgctacagcagcagcttaaagagctcacagcccctgatgagaatgtaccagcaaagattctgtcttacaatcgggccaatcgagctgttgcaattctatgtaaccaccagagggcaccaccaaagacctttgagaagtcaatgatgaacttgcagtctaagattgatgccaagaaagaccagctagcagatgctcgaagggacctgaaaagtgctaaggctgatgccaaagtcatgaaggatgcaaagaccaagaaggtagtagaatcaaaaaagaaggctgtacagagactagaagagcagctgatgaagctggaagttcaagctacagatcgagaggaaaataaacaaatagccttgggaacctctaaacttaattatctggaccctaggatcacagtggcttggtgtaagaagtggggggtcccaattgagaagatttacaacaaaacccagagggagaagtttgcttgggccattgatatgaccgacgaggactacgagttttgaccagtcttgccaggggttctatgaaaagggacagtgtggtttgaggaagatggataaactgagcctcacttgccctcacacctgagggagaggccacaagtcttaacaaaccaacatctttgcaaaaagatagacctggagatgttataagggagagctgagccagttgtcctatggacaacttatttaaaaatatttcagatatcaaaattctagctgtatgatttgttttgaattttgtttttattttcaagagagcaagtggatgggaatttgtcagcatcctgccaggcaaattcagttttgctgcaatgtttggattctctcagctactgtatgcaaagtctgattatattggtgcgtttttacagttagggttttgcaataacttctatattttaatagaaacgaattcctaaactccctcctctccccatttcaggaatttaaaattaagtagaacaaaagaaaaacccagcgcacctatttagagttgtcactctatcgtcacgggaatcagttttcattaaacttgaagcagttatgacatcggcagtgttttggttcagacacctattcacagaaaagcatgatgagaaaatatttcctgacttgagtgttcctttttaaatgtgaatttttatttctttttaattattttaaaatatttaagccttcttcttgatcttaaagatcgtgtagcttggggttggggagggatgaagggtgagtgagtctaaggataatgaaataatcagtgactgaaaccattttcccatcatcctttgttctaagcattcttgtaacctttaagagatccatctttttctttggaaaccccagtctttcatttgaaagattttattgtatcaaaacttccacaggtcagtaaatttagaggaaaatgagcatttggtccaagaaaaaaaccaaaaccccaaaaaacaaaaaaggaaaaataatcaagattttagggcttttatttttcttttgtaattgtgtaaaaaatgggaaaaaaaaacataaaaagcagaattttaatgtgaagacattttttgctataatcattagttttagaggcattgttagtttagtgtgtgtgcagagtccattccctcatctttcctcaagtatcttctatttttatcatgaattcccttttaatcaactgtaggttatttaaaataaactcctacaacttaacggaaaaaaaaaaaaaaa

SEQ ID NO: 706 - DNA, 2661 bp, Cricetulus griseus
aaaagtacagatgctacaggaagccctgatgacgctggggatatgaaagaggccatgaacaggatgatagatgaactcaataaacaggtaagcgagttatcacagctgtacaaggaagcccaggcagagctggaggattataggaaaaggaaaatctctagaagatgcagctgagtatatccacaaagcagaacacgagaggctgatgcacgtgacaaacctgtccagggcaaaagcggaagaagcgttgtccgaaatgaagtctcagtattccaaagttttgaacgagttgactcagctcaagcaactggtagacgaacacaaggagaactctgtgtccatcaccgaacatctgcaagtgataaccacactgcggacaactgccaaagagatggaagaaaaaatcggcaacctcaaagagcacctagcaagcaaggaagcagaagtcacgaagctggagaagcaactcctagaagagaaagctgccatgaccgacgcgatggtccccaagtcttcctatgaaaagctccaggcatccttagagagtgaagtaaatgccttagcaaccaagttaaaggattcagtaaaagagaaagagaaagcccattcggaggtcgcccaggttcgaagtgaggtctcccaagtgaaaagggaaaaggaagacatccagattctcttgaaatccaaagagcaggaagtaacggaacttctgcagaaattccagcgcgctcaggaagaacttgaagggatgagaagatcctccgagacctcttcaaagctggagggggataaagatgaaaagataaatgagatgtcgaaggaagtcatgaagttgaaggaggccctcaacagcctctcgcagctctcctactccacaagttcatccaagaggcaggcccagcagctggaagcgctgcagcagcaggtcaaacagctacagaaccagctgtctgaatgtaagaagcaacaccaggaggtcatatcggtttatagaatgcatcttctgtatgccgttcagggccaaatggatgaagatgtccagaaagtcctgaagcaaatacttaccatgtgtaaaaaccagtcccagaagaagtaaaactaggattccttggcaggacactgcccctttgttgcctatttttgtgttagatctggagttgtcgccgaccactaccattgttcttatccatggtgtgcactgtgacctagcatagcttcttttccagagttttctggggatgagtctcaggagatgatgccctcctcaaaactgcataggtacttcagaccagcagaggtgagggatccttgtcatctctttagaatctagagtgatctgctaagccagtgtgatgattagctcctgatctctgcctttgggctgtgccattcagcacagggggagcactttgccctccattccccaaacatgctttaatttctaagctaattagaataacattagaagtgagtgtttagcgtcctttatcctgtggattgaaaaacacaaattccatcttttccctccatctgccttatatgtccttgccctatttacaggtctcacggtttgatgagtactgttaactaaaatacaaagttttaatccaagggtgaactgtccttacaagtttttagtaaatcaacatattgcaaattttctatgcaaacttgcctcctgctgtcatccacgaagctcaggaaatccaaatatttgtatttcaacaaaggacagtaaactgtgtgtttacagccaaaagaaatgcctcatgattcttaacctcaaatttttaagtgtttttttttctctatgatatttttattggcttttaaagatgttttcatagctaaacccctatgtatgagattatattatattaacaatatttttagataaccgtgcttaagactgcttaaaaaaatctttttcctcagaagttttcagagggtagttatatattccaaactcaacatgagctgccaccagtacacctagaattttctgcagtctacttctgaatacagtgagtcctttctttgccagctgagtatctgtaaacaccccaaactctagcacccaaaattgattcctggaagaagttagttccaaccagtttctccatgttgaaagtttgtccaacatggtaacatggtgcctagcaaaagtcttggggaggaaggggaatatatgttgactttcaggttaaaaaatgtttaacttgcttgcagcctctcttatggccctgatcatgagggagacaaatggaataatctgtattaggtaaagattaatgccagcaaaataaaagtggctttacgtggtggtgttccttttcttaagttgtctaattacagtcaagcgtttctcaaaatgctccaaagaaatgtgaaagattttgtcccagaatttaagaaattacaaaaccacctccttcgtgcccccacgcagaactgctgcagaatgtaaaacttgagacattttgtaggatgcctgacaaagtgtagcctttttcttgtttcaggacacatatttattacaagtattctggttaaatattgaaaagatatatgctgtagtttagcatttttatctttgtaatttacagaaattattgcagaaaataaacttggttcattttgcaaaaaaaaaaaaaaaaaaaa

SEQ ID NO: 707 - DNA, 2661 bp, Cricetulus griseus
ggcagctggcagccgccgagccgcgaagcgacatggtgctgctcaaggagtatcgagtcatcctgcctgtgtctgtagatgagtatcaagtggggcagctgtattctgtggctgaagccagtaaaaatgaaactggtggtggggaaggtgtggaggtcttggtgaacgagccctatgagaaggatgacggcgagaaaggccagtacacacacaagatctaccacttacagagcaaagtacccggatttgttcgaatgctagccccagaaggagccctgaatatacatgagaaagcctggaatgcctacccttactgcagaaccgttattacaaatgaatacatgaaagaagactttctgattaaaattgaaacctggcacaagccggatcttggcacccaggagaatgtgcataaactggagcctgagacatggaaacatgtggaagctgtatatatagacattgctgatcgaagccaagtacttagcaaggattacaaggcagaagaagacccagcaaaatttaaatctgccaaaacaggacgaggacctttgggcccaaattggaagcaagaacttgtaaatcagaaagactgcccatatatgtgtgcatacaaactggttactgtcaagttcaagtggtggggcttgcagaacaaagtggaaaactttatacataagcaagagaagcgtctgtttacaaactttcacaggcagctgttctgttggctcgataaatgggttgatctgactatggatgacattcggaggatggaagaagagacaaagagacagctggatgagatgagacagaaggacccagtgaaaggaatgacagcagaagactaatgctactccacccctttctgcactttttgcaagacagtggtcaacaggaaggcccagcagctccaccctcctgagtggcaggccgtctttggatgcagcctttctgtgctcattcttcaggcaactttcaatcccttactgtagctatttctagatgccctttaacattgtgaacaaatagaccgtctggtattacaaagcctgtgtgtgcgggagactgatcctctaagatatatggtgtatgctgctgtatttacagctcacccctctctccattgtgtcctgacccatttctgtatgccctccccctttatttccaagtgacatttttagtctttcaaattagctgccttttgtgatgtgattatttaagctcacttacttcagccttgggataaactgagctattttgcttcctgggcagatctttggcaatgttgagtattcacttggggagagaggaggagttaaaaatacagagatacctgcccccagttctacacaataggaatgtagcttcataaacctgacctctgctcctagtaatctcttgtcaagtgctctaagcaccaagaaggtacccaaggcccagccagtctaaggaaatttagcaaataataaataacccctactcaagtcattgtatctctggttaatattcttagatatcttggcttctcagtcctcctgttgcccactctgtctgaatctctttgcagagcctacaagaaacccatcactccccacctggagagttgtccagtgtggcctgtaggagctctatatgtccatgctcctcttcccttttgggctggtgctgtcactcagcaataatcctatgtctgtgctttcgtaggtccctgtcctctttgaggctggttaggatgcaagagtcctggtcttttcatgctgcacaaaacaagcatgcaaaaagcttttttcccctagcaaaacacatcccttcctgtttccaatcactggaaaggagtttgcagatcaagaacttggcccatactgcccccatgctgagttctgtactggacaatcaaaagcaagcagtgactgtagcctagaattcttaccacagtagtctggagaagcccaggctctgagggagcagaagctactgagcattcttagttctctagattggcagaaactgcctcctgttgcctacatttgaaagcatccaaatgttaggaactagaatttcctgagattagtctgtattcagagctcctgcccatgtgaacaaacacaaaagagggatgtccttggtctgtcccatcccccatgggtgttgttgctgctgggcaagtgttggcttttaagtatcccctttcttaacctgtcccccaaaactgactctcactcaggaggcagtgcctctcacgaggcctgctggcctctggcctccttgtggagaagcgctggggagggataggtcgtggtcagtgttgtgggcatgtgcatatccaagttctccttttccaggccccctgggtccctgacttacttggggtggttcttagtgctgcttcttttaacaaaccacactttgtagaactgactagattaccgtgttgatttaatgtaagtttgtgcctttttgtctcaatcttccaatacaggtatattgggggggaaagcagtctaataaaatcctagacagagtatttagagttcagcttattagtgatgctctaatgtccattttccaatttagatatccttaaagctcctactgatgtgtctccccagtttaccagggtaggattatgataagaaatagtggtgtctctgaaaatttatg

SEQ ID NO: 708 - DNA, 2660 bp, Cricetulus griseus
gtgcccagacatgggtgactggagtgccttggggaagcttctggacaaggtccaagcctactccaccgctggcgggaaggtgtggctgtccgtgctcttcatttttagaatcctgctgctggggacagcggttgagtcagcatggggtgatgagcagtccgcctttcgctgtaacactcagcaacctggttgtgaaaatgtctgctacgacaagtccttccccatctctcacgtgcgcttctgggtccttcagatcatattcgtgtctgtgcccacgctcctgtatttggctcacgtgttctatgtgatgagaaaggaagagaagctgaacaagaaggaggaggagctcaaagtggcccagacggacggtgccaatgtggacatgcacctgaagcagattgaaatcaagaagttcaagtacgggattgaagagcacggcaaggtgaagatgagggggggcctgctgagaacctacatcatcagtatcctctttaagtctgtcttcgaggtggccttcctactcattcagtggtacatctacggcttcagcctgagtgccgtctacacctgcaaaagagatccctgcccccatcaggtggactgcttcctctcgcggcccacagagaaaaccatcttcatcatcttcatgttggtggtgtccttggtgtctctcgctttgaacatcattgagctcttctatgtcttcttcaagggcgttaaggatcgcgtgaagggaaggagcgatccttaccacgccaccaccggcccactgagcccctcaaaagactgtggctctccaaaatatgcctacttcaatggctgctcgtcaccaacagctcccctctcgcctatgtctcctcccgggtacaagctggttaccggtgacagaaacaattcctcctgccgcaattacaacaagcaagcgagcgagcaaaactgggctaattacagcgcggagcaaaatcgaatgggccaggccggcagcaccatctccaactcccacgcccagccttttgacttccccgatgacaaccagaatgccaaaaaaatggctgctggacatgaactccagcccctagccattgtggaccagcgcccttccagcagagccagcagccgcgccagcagcagacctcggccggatgacctggagatctagataccggcataaagacgccactcgattgtggaggaggagaggggtgcttacagaaagtgtacctggggtgttcattttgttcccatggaggtggtactcaacagcctcaactatgaggcttagaaaaaaagacattataatacctaggttccttgggggtgtttgggatagctgggtggagcaggtggggatatgggaggtacataaggataatttaatgtagttgattcaaagattcaaattctagtaagcgttgcattgggtgatcatagctaggtaagggctttctctttctgccccccaaccgaaccttaagaacggttctgtatatgtgagtgagtgggtgataacttttattttttagaagttcagacaaggctcgaagaaaaagattgcccatgtaattacatctcagcgggttctttttcccatctgtcccacctttgtgtcaccagcgcccatacattgtcctcaactattccttacattcacggaacagtttctctcaacatttctaacggtcgaataatgtcatttagtggttgctttttgagtccgcatcagggaagcaagccatgctcaatatttaacaatcacttctacgtgtgggtatgcgtgtgtgtaagagtgtgttttatttgtcattattggtacaagcagaggtagtataaactcacaaatcagatttgaatctaatgcacacagtgttcaaatttgaaccttcctcatgaatttttgtgttgtgggccaatatggtgtttacattctagaattcctgctgtgcgagtaaagcacacttttgccctaaaagttttttttctctatgtatcctattatggatactggttttgttaattatgtttttttcccctctttttagaatgtagcaataatgccattactgaaatgaatgatttcctttctctgaaatataatcattgatgcttgaatgatagaattttagtactgtaaacaggctttagtcattaatgtgagagacttagaaaaagaaatgcttagagtggactattaagtgtgcctaaaggaattttgtagtaactggtaattcgattttgtcctacttaactacatattaattcagaacttgtattctgagtttaacagtcttttagagtgacgagcaaccttgatgtttgcactaagattttatttgaaatacaagaggggttaaaggaggtttcagtagtgcacatgtgactaatttatttgaactatatgctaaagacatctaccagtttcttcgaatgccttttaaaaaaactcattacacatatgattgaaatgctgagttatcatttttcttattgcatgtcagctacataaatggttttgtacaatgaaaaactaatttgtttgacattccccatgttaaactaccgtcatgttcagcttcattgcatgtaatgtagacctagtccaagcaatcatgtgctcgggagagtgttctttattcaataaagttttaatttagtataaaaaa

SEQ ID NO: 709 - DNA, 2659 bp, Cricetulus griseus
agggtgcctgacctcacacagatgtaccagctgttcagccgggtgaaaggaggacagcatgctctactgcagcactggagtgaatacatcaagacctttgggacaaccattgtcatcaatcccgagaaagataaagacatggtccaagacctgctggactttaaggacaaagtagaccacgtggtagaggtgtgcttccagaggaatgagcgttttatcaacctgatgaaagaatccttcgagacgttcatcaacaaaagaccaaacaagccggcagagctcatcgctaaacacgtggattccaagttacgagcaggcaacaaagaggcgactgatgaagagctggagaggatcctggacaagatcatgatactgtttcgtttcatccatggcaaggatgtctttgaagcattttataagaaagatttagcaaaaaggctgctcgtggggaagagcgcatcggtggatgcagagaagtccatgctgtcgaagctcaagcacgaatgtggagctgccttcaccagcaagctggagggcatgttcaaggacatggagctttccaaagacatcatggttcacttcaagcaacatatgcagaaccaaagtgcaccaggccccattgacctcacggtgaacatactaaccatgggctactggcccacatacacgcccatggaagtgcacctccctccagagatggtcagacttcaggaagtattcaagactttctacctgggcaagcacagtggtcggaagctccagtggcagacaacactgggacatgctgtgttaaaggcggagtttaaggaggggaagaaggagttccaggtgtccctcttccagacactggtgctgctcatgttcaatgagggggacggattcagctttgaagaaataaaaatggccaccggcatagaggacagtgagttgagaagaacactgcagtctcttgcctgtggtaaagcacgggttctgattaaaagtcccaaaggcaaggaggtagaagatggagataagttcattttcaatggggacttcaaacacaagttgttcagaataaagatcaatcagatacagatgaaggaaaccgttgaagaacaagttagtaccacagagagagtattccaggacagacagtaccagatcgacgctgccatagtccgaataatgaaaatgagaaagactcttggtcacaaccttctagtttctgaattgtacaatcagctgaaatttccagtaaagcctggagatttgaaaaagaggattgaatcacttatagacagagactatatggagcgagacaaagacagtccaaatcagtaccactatgtggcgtgatgtgtcagcagactgccgtctcccaatgagacaaacactagaacgcacctgcagagtgaagctgctgtgctgtttccaggtccctgcagctgcaactgtgggcgcctggactcaaagcggagaacatggttctcaggtcatccttcccagggtgcaaggacttgagatgtcacacttctttcctctccattcttcctcccctcctttgtttctgtactctctggctttagattggacatgccgattttagttccttcacaagctcttgtacctctggcagaaagccacgggcgtggtgtgttgtgtgtgtgattgtgggacacagtggaaataccctagatgctgcattcttccccagatgaacactcagagagggaaccctgggctgggcactgggagaagccgcgtccagactgccactcagctctgcaccctaagcactgaccgctgttctgtgcgttttcagaaagttccaaactttggcttctgtaaatcaggtttctaagtgaggtccctgatgtgccaagaggacatcatgtctgtcactggagatacagagcccgtccagaaggctacttgtcatttctgtttaggggcttgggggcttcacatttgtttccatgctggctgagtgtggaggtcctggctttggcttggggtgactgctgtttgactgttgaggttgcagtttgtgtgatgaccataataaaattgggcctggtttcatagtcttgcatagggactgtcttggatctctgccctggcgctgtatggagcttagttatttttgtcaaaaggctaaggatttgttggtgcctggtgacatactatgtgttcacacgtgaggttgagcagtaagaacaaggctccaatggtggtgttggcatggtgatgatgacagacacttttgcaacatttaaaagtactttatattttacaaagtagcatgtttcattttgattaaaagctaccaaaggaattttgatcatgtataagtgtttaaagcaatattttctggaatataccaagtttatataactcgattttatgctaaattattaaaggattctccctttttgaaacatgcatgtttaaaattctgacatcttttgggttcccatattaaaatccttactctttaagtatcatttctatatttgtaaattttcatttatgagttctatgatatgtagtctctgaaagaccaaatagatttctatttctacttcttatattttaagttcattgtgtctacagattgttaatattgtaatttaatgtagacttactttgaataaaactagtttaattggcctttaaa

SEQ ID NO: 710 - DNA, 2658 bp, Cricetulus griseus
cacagaatttctttttcctaagatggagtcgagcaaaaagatggacgctgctgccgcactgcattccaacccaccactcaagctgcagcctgatcgcagtgcggggtcagtgctcgtgccagagcaaggaggctacaaggagaagtttgtgaagacagtggaagacaagtataagtgtgagaagtgccgcctggtgctgtgcaacccaaagcagactgagtgtggacaccggttgagagatcctggcccttcagatctgctgtcggaatgaaggcagaggctgtgcagagcagctgactctggggcatttgctgatgcacctaaaaagtgaatgccagtttgaagagctcccctgtcttcgtgcagactgcaaagaaaagtattgagaagagacttgcgggatcacgtggaaaaggcctgtaaataccgagaggccacatgcaatcactgcaagagccaagtccccatgatcacactgcagaaacacgaagatactgattgtccctgtgtggtggtatcctgcccccataagtgcagcgtccagactcttctgagaagtgagctgaaagaacttgacaaggagatccgtcccttccggcagaactgggaggaagcagacagtatgaagagcagtgtggagtccctccagaaccgtgtgactgagctggaaagtgtggacaaaagtgctgggcaggcagctcgtaacacaggcttgctggagtcccagctgagccggcatgaccagatgctgagtgttcatgacatccgcttggctgacatggacctgcggttccaggtccttgagaccgccagctacaatggtgtgctgatctggaagatccgtgattataagcgccggaagcaggaagccgtcatggggaagaccctgtctctctacagccagcctttctacacgggctattttggctataagatgtgtgccagggtctacctgaacggggacggaatgggaaaagggacacacctctcgctgttttttgtcattatgcgtggagaatatgatgctttgttgccatggccattcaagcagaaagtgacactcatgctgatggatcaggggtcctctcggcgtcatctgggagatgcattcaagcctgatcccaacagcagcagcttcaagaaacccactggagagatgaatatcgcttctggctgcccggtctttgtcgcccaaactgttctagagaatgggacgtatattaaagatgatacaatttttattaaagtcatagtggatacttcggatctgcctgacccctgacaagtaactggggaggtggattcagcagaaggtaactcctctggggctgaagccgtctgtcttcacgaagatcctcgacctcagagaggaccgtgtgggacagggcaagcagccagaggaggagggtgcgtggctggcaggaggagccacacgtgaaaacagaccccagcggatttcccaatagactagccacactcactctgaagaattatttatccttcaacaagataaatattgctgtcagagaaggttttcattttcatttttaaagatctagttaattaaggtggaaacatatatgctaaaaagaaacatgatttttcttccttaacttgaacaccaaaaagaaaacacgtggaggtagctggacgtgtcagcatgttaatttaaaaggagaacttatgaaatagtaatacaattctgatatattcatcctaaaattcaagagtgcaatcttgtttcaaatatagtatattgtctatttttaaggcctcatctggtctctgttttaattaatttgtttgttcagaaggcctgagtagacaaagtctctaaattcagaagtcattttaatttaaagttccacaccaaggcagccgtatggctaagcaggcccaagcagccaagtagagtgtgcgattcacttcccccgccacaccatgtctggagtctttcatgtgagttcactgtggagaggaggtgacaagtacagggtcactgtgccactccgtagtcagtaactggtctacacccttagtccccttaagtaagataaccttcaaaggcaaataaaatgacctaattgggaaacacaaaagccggccttcctcccgaggatttccccaagaatctgtaggcgctgactgaggaagtggggggtcaatgcagtgcagcctgttgtggggttgcgttcttttctctgagggcacgcctcttgtgttcagctctgttacccaaaacaaagaccaaagaaggccaatctctcattggactgtatttttaatctgcctgttttgacacttgccgtctgtagtaaccgctcgctgtgaggccccatcttgacagtccaagtgattgtgaccagtgattagcgtcctgtgttcttccgctcttctaagaaaccgagacagtgtgagttattgctcagcaataatcctgtcagtaggagttagcaacatgtctcatttcccgatagcattacgattgtttcgtattcctgtttatatgttatgtgtggtttcatttggtatttatttgtgttttgaggttcttgcgatgtttctgttctgctgctaataataaagtttgtaagactgtagaatgcaaaattttgcaatgctaagtgtctattagaggaaaataaagctgatttaaga

SEQ ID NO: 711 - DNA, 2658 bp, Cricetulus griseus
  modified_base (395)..(395): a, c, t, g, unknown or other
gtatctgcctcaagcagcagccctgtgtctgcctctccgtcttctggaggctgtctaggattggataagttcaaaaaacccgagggaagctgggactgtgaagtgtgtctagtgcaaaataaaccagactctaccaagtgcatagcatgtgaaagtggaaagccaggcacaaagtcagagtttaaaggctttgggacatcttcatctttaaatccagcaccctcaaccttcaaaattttggtattccatcgtcctcctctggactttctcagacttttgcaagcactggaaattttaaatttggagatcagggaggattcaagttaggagcttcatctgactctgggtctacaaacccaaaggtggattcacatttggtaaagtggagtctgccnctttgccatctgcctcagtgtttgctttgggaaggacagaggagaaacagcaagaacctgttacttctacttctctggttttggaaagaaagccgacaatgaggagtcaaagtctcaaccagtgttttcctttggaaattcagagcaaaccaaagatgagagttcttccaagccgacattcagtttcagtgtggcaaaaccatctgtgaaagagtctgatcagttagccaaggccacttttcgtttgggaatcaaaccaatactacaactgatcaaggtgcagccaagccagtttttagcttcttgaacagcagttcctctagttcaagtgcaccagcagccacttcatccagtggtggcatatttggtagttccacctcttcctccaaccctcctgtggcagcctttgtgtttggccaggccagcaatcctgtcagcagctctgcctttggtaactctgcagagtccagtacatctcagtccttgttacttccctcaagatagcaagccagccaccacatccagcactggctcagctgcccctccctttgtgtttggatcaggagccagcagcaacagcactgcatcatcggggttcagtttcggagctaccacatcaagctcttcaggatcctcctttgtatttggcactggacattcagcaccatctgccagtccagcatttggtgctaacccgaccccaacatttggacaaagtcaaggtgccagccaacctaaccctccaagctttggctctatatcatcttcaacatcgttgttttctgctggttcccagcctgcaccaccacctacttttggggcagtgtcaagcagcagccaacctcctgtgtttgggcagcagcctagtcagtctgcatttggctctgggacagctcctaattccagttctgttttccaatttggcagcagcaccacaaatttcaacttcacaaacaataatccgtcaggagtgttcacatttggtgcaaatcccagcacgccagcagcctcagcccaaccctcaggttcagggggctttcaattcagccagtctccagcatcatttacagtggggtcaaatgggaaaaatatgttctcttcttccggaacttcagtttctggtcgcaagataaagactgctgtcagacgcaggaaataaaggtcacgaaggtgttatacccaacagttttatcaacagctggtgcctgctttcagatactggactgtactacatgctgggcttatctgaagtcagatctgtctaaggacttctttaattttggaattgtcctcttttttttctttacggaaatcccatatcccattctcttttgaaaataatagctagactgttgactgactgattcttcagcagaaacattttatgatccagcacattattcactgattggcatagtctggctgtacccaggaatagagcctgcacggtgaatggctttgtatagatcctgtctgcactgctatgtgcgttgataaagcgttaatggaacgcattgaaattgtaattatatcttgggaaccctgtatagatatagattagaggactttgaaatgaatgatttctatgcggagtttgtggtggcatatgtgtgaagtgagttggatgtattgtgcacagaaaaactctgatagagaaagcctgattaaagaatggtccatactaaggacttgttagatctagttcattctccatttaataagtatatactatttctatattttcattctaccgactgtcttgcctttttcattattttattatgaaacttctgtaaatacaatattgtttctgtacttttggcataacataaatctgtgaacttgaaattttaattttgtgttagacatatttttgttgtttgtttagtcttgtctcagattttattatgtaaatcccattattcaaagttgcctaaatccatttggaaatctttaaaaaaaattggggattcttaaagttgaatttattggcttttctgatccagttttgtttggaccaaaaaccagtattgtacaaagtattaagcatatatttttatatttactgaaatggactgtggtgactttggataataaggaaaagtttaatattaaagccatgtttattacagtataattaacatgttaaaccatgggataaatgccatcaataaaactttatgaagcaaatttctttaacagttctcatagtgaaggcacacagtattaatgggaagggttgattagaaatcccaaagggtat

SEQ ID NO: 712 - DNA, 2658 bp, Cricetulus griseus
cgagcatcagactatcctgggcctctctctgtctccagccatagccgcccagaggcccctgggacaaaggaactgatgggcggggtgcacttagaaatgatgtcccccagtggggagggggacctgcacacacccatgctgaagctctcctatagtacctcacaggaatttagctcccgggaggagctgctgtcccacaaagaagaggataaaagccaaacatcttttgataatctgacaccaagtgggacgctggggaaagactaccacaaatcagtggagatttttcccttaaaagcaagaaaatctaatggaaagagaaggctacgagccccctggcaaggatgactacgagggtagttacaatgctatgctctcccagcctttatttgaaaagcgagatcaagaaggcctgccatcggcaggaagcaaactcaccattcagaacacatcgtaccccgcaccttcactcccctagaaaaacgagacaactgctaggaccgaagacctactagaagatcacctggagagacctactctttcccaaggccaggccagttgatctgctgtagttctgtggaccaagtaaatgacagtgtgtatcggaaagtgttgccagccttggtcatcccagctcattatatgaaacttccaggggaccattcctatgtgagccagcctctggtagtccctgctgaccagcagctggaaataggaaggctccaggctgagctgtccaacccccatgtgggaatcttcccacacccatcctctcagatgcagggccaacccttgtcttcccaggccatctctcagcagcacctgcaggacgcaggtacacgggaatggggctctcagaatgcatctatgtcagagtctctgtccatcccagcatccctgaatgatgcagctttggctcaaatgaacagcgaggtgcagctcctgactgaaaaggcgctgatggaacttgggggtggaagccacttccacaccctcgggcttggtttgtctccctagatggaaggtccaatgctcatgttagacattcatacattgatctccaaagagctggaaggaatggaagcaatgatgccagtttggactctggtgtggatatgaacgaaccaaaatctgcccgaaagggaaggggagaccctttgtctctccagcagagccacccacctgtacaggagcaccagcaaaaagaacccagagctcacgacagcacagcctacacacaactcgtgtacctggatgacatggaccagagcagcagcgagtgtgggaccacagtctgcactcccgaggacagtgctctgcgatgcttgttggaagggtcaggtcggaggagtgggggacagctgcccagcctgcaggaggagacaaccaaacgaacttcagatgttcctctggagccattagccagtcccaaccagagaaggtctgccaatgatgaagacgaagatgatgatgatgacgatgaccaaggagaagacaagaaaagcccctaggcaaaaacgagaggagagacccctgatggcctttaacattaaatgagccatctatgagcccctaaatgtgggatataaaattgccaaatatcctttcttatggaagtgcatacctgtgtgtggagaagctgaagaatgaaaaccatggaagtagatgtattgacatggctgtgtcgggtgcagaaaggaattaaggatgactgacagatgctgcccctacagggaggtggctgggaagcctatatgtcatcccatggacctgacttgtcccagtagggatgctgacaaaccacatgtggtattgctgtgctccaaggatcacctcagttctccctcaaattctggaaacagatgaaactctttttgcattgtttgaatcctccattttatcatgataatgctactgtgaagctcttactgggaaattgggtggcacgtagtttcccaaagtcagcattatctcaaagaaaagctatgcattgctgcttcgttgttgtcgttactttgcttacactttgctttggttaggcttctctctgtgtcgtctcttatcatctaagccttttaatgaaattgtactgaaatttttatcagctgagagtccttcaattctggtcccattaactccaagtgccttttttacagtgacaacagacagtccctcagttttatgttttttcttaacccttttaattgaactgcctggattttatataaagttactaaataataaccctttttctttgaactgcatgctgccaagtgccattcgtgctcagcatcctcatttcaacgcagtatactctctagttatcatgtgtaatgtgggttctgtttagctaagatagactagaggacactgtagagatgccctttcctattccatccctttggccactagccaccattctggttccactggctgtttgtatatagggttatgtattaactctggaatcctgtgtgcccatcttgctcaccaaagatgagagtatgggctgagcaaggggattgaatgtgactattcaagaacactctaatgtactatccaaaagtgccagaatggctcttctgtgcattctcctttaagagctgcttggttgtcccaaaatgaaaactcaaaataaacttggaagatggaaaaaaa

SEQ ID NO: 713 - DNA, 2657 bp, Cricetulus griseus
  modified_base (1606)..(1606): a, c, t, g, unknown or other
cgcgagtgcgggctcggggtcctccggggccggcggccgactgcccagccgggtgctggagttggtgttctcttacctggagctgtccgagctgcggagctgcgccctggtgtgcaagcactggtaccgctgcctccacggcgacgagaacagcgaggtgtggcggagcctgtgcgcccgcagcctggcagaagaggctctgcgcacggacatcctctgcaacctgcccagctacaaggccaaggtacgagctttccaacatgccttcagcacaaatgactgctccaggaatgtctatatcaagaagaatggctttactttgcatcggaacccatcgctcagagcaccgatggtgcaaggaccaagattggtttcagtgagggccgccacgcctgggaaggtatggtgggagggccctttgggcactgtggcagtgataggaattgctacgaaacgggctcctatgcagtgccaaggttatgtggcattgctggggagtgacgaccagagctggggctggaatctggtggacaataatctactacataatggggaagtcaatggcagttttccacagtgcaacaatgcaccaaaatatcagataggagagagaatccgagtcatcttggacatggaagataagactttagcttttgagcgtgggtatgagttcctgggggttgcctttcgaggacttccaaaggcctgcttatacccagcagtgtctgctgtatatggcaacacagaagtgactttggtttatcttggaaaacctttggatggatgacagtggctttctgggaagaaggacagtggagaagagatctactttggaaagtagagccatgaagtgatagtatcatgtgtgcatgcccaaggaacatcctgaaaacacgtggagttgagaactggagaagaaactgtacaacagcgatcatcttagtgtttcctctttccactgggccagaaaaatcctcagggttgcagttggttgagtgggcagttgacatgtgcatgttgccgcagattcttctctacattagcagtgtgttactccagctcaaagatgaggtgtagagatgcttagaagggagccgcaggattttggtagttttctgaagaaggtacagtcccatcttacaactgcctgttcttcctccagccctttacttctagccagcttgacttagaaagtatgaaactggctgggttttatttaatattttttaattatattgagaagcatggtctgcctggactgcacttctctagcaatgagaaataaaattgtgcagctattttaaaagttgtatatataatgtgtgtaaaaactgtaaaggaaaaaaaaaccaaaaggacaaagggattgctttgttctaattcagtttcttaaaaatcactacatggtacaaaactagagtgatatttggggacagtagggtaatacaaagaagaggagacatgttgtactaactcattttgtgtttgggcttatagtccatggctgtaacagaattatggtaaatgttctgagcactattagaataaaccctagaacacattggtcaactagttcttttattttcttaactttataatgctgtanatgttatgaagaattttaatttcatattgtttacattatacaacaatacaaagcctctgaatctccactggggctgtcaaacaaaaatgttttactcacccacttgaaacagcgccagccagaaccccgttaagagtgttcttgatcacctaggtattgacccatgggatttaatgctaaaaacttaggctggcaacaattggaaagtttcattggaaagggttaaacatggtctcctattttgacccataaaccttctcgttaatactctctgaaattaataattcaacacacatgagctgagggttttgttttttcttttgttacaacagtaacgtctttctgtatgacagtataattaatatggttcagatacataagaattgatgaaggcaagtaaaatctttgtactttttacatgattgctgtatgtatattttgttttaaatctaataaaattaggggcagtgagcagcttgctggggttcttggagtccttgagaattaaacttgtccatactgctatgaagcaggaggctccaaccataggacaggtctgtagttgcctcctgaaatggttactggtatttactgtgtatttgctatgttgcttgaaaaagagacatttgttaaagatccttttttacaatctgtatcaagaagaaaccttgtacaacatggaattatatgttaaacatgttaaggaagatagctggcccaggaactgatgttttgtttgtttttgtttttgtgatcaggaagacatgtaattgaatttgttgttgctgtggggagcttttgtgtgtttgtttgaggaagcatgcatgggtggaacaaaccttaattactatgactattcactatggtcctctgcctacttgagataggctgttataattatctggtttttcataggaaagaagaaatattaaggcttaattctgtaatgttcattggctcataattcattaaaaactcatacaaaggaaaaaaaaaaaaaaaaaaaaaaaaaaaaaaaaaaaaaaaaaaaaaaaaaaaaaaaaaaaaaaaa

SEQ ID NO: 714 - DNA, 2655 bp, Cricetulus griseus
ggagccccagcggcttcgcccagggatccgcgcgggagcctgcggtctggatcccatctcttctgtgctatcgcacccttgaagttttgcagcaccaggagaagaggacaaggaagaaggagaggggaagcgaaagcataatctaaaacatctacctaaaggagaaaagaagaggggcgcagaaatggctggggcaattatagaaaacatgagcaccaagaagctctgcattgttggagggattctgctggtttttcaaatcgttgcctttctggtggaggcttgatcgctccagcaccaaccacagcagtgccatacatgtcagtaaaatgtgtggatgtccgtaagaatcaccataaaacaagatggctggtgccttggggacccaacaagtgtgacaagatccgagacattgaagaagcaattccaagggaaattgaagccaacgacattgtgttttccgtacacattcccctcccttctatggagatgagcccatggttccagtttatgctgtttatcctgcagttagacattgctttcaagctgaacaaccaaatcagagaaaatgcagaagtttccatggatgtttccctgggttaccgtgatgatatgttttctgaatggactgaaatggcccatgaaagagtaccacgcaaactcaaaatgtacttttacatcacccaagactctagagcatgaaggtcgtcattatgaatgtgatgtccttcctttcatggaaattgggtcagtggctcataagtattatcttctaaatatccggctaccagtgaatgagaagaagaaaatcaatgttgggattggggagataaaggatattcgattggtgggaatccaccaaaatggaggcttcactaaagtgtggtttgctatgaagaccttcctcacacccagtatcttcatcattatggtgtggtattggaggaggatctccatgatgtccagacccccagtgctactggaaaaagtcatttttgcccttgggatttccatgacctttatcaatatccctgtggaatggttttccattggatttgactggacctggatgctgttatttggcgacatccgacagggcattttctatgcaatgcttctttctttctggatcatcttctgtggcgagcacatgatggatcaacatgaacgtaatcgcatttcagggtattggaagcaagttggaccaattgctgttggctctttctgcctcttcatatttgacatgtgtgaaagaggagtgcaactcacaaatcctttctacagtatttggactacagatgttggaacagaactggctatggctttcatcattgtggccgggatctgcctctgcctctattttctgtttctgtgcttcatggtatttcaggtatttcgaaacatcagtggaaagcaatctagtctcccagccatgagcaaagtccggaggctgcactatgagggtctgatttttaggttcaagttcctcatgcttatcaccttggcctgtgctgccatgactgttatcttcttcattgttagtcaggtgacagaaggccattggaaatggggtggtgtcacagttcaagtgaacagtgctttcttcactggcatctatggaatgtggaacctgtatgtctttgctttgatgttcttgtatgcgccatcccataagaactatggggaagaccagtctaatggtgatctgggtgtccacagcggggaagaactgcagctcaccaccacaatcacccatgtggatggaccaactgagatctacaagttgacccgtaaagaagcacaggaataagattctatggcactgcactgggctgcaattctctctctatccagcctcttccctagagtggggagctgacttatacagaaaacttagtgaaaggtgaatgcctagtgcttcttatatatggtttcttagaccaatggatgaacatttgtctaacctcagacagtggcttttgcaagacttctgccactaatatatcatgtatgataacaaaaactggtatgacatattttctgtgatcattgttagtgacatagcaacatctgtagcaagtgggttagtaaccctcacatggatggttatactctttgggatggtttgggccaatagggtctatattgagtagattgtgacttttttttctgttttagattctggaatatgtttaaacattgttttcagtccaacatttgcttatgtcatagacctttcaccctcctccatgggcactttttttatttataacacacaagtagccaactgagttattatttaagttgtcagtacaaatctgtccattttttttagtggcttactacaaaataaccaaatttcatgaaaaattatatcctgccagagggatttcagctttgaaaccaaatctgtgtatctgatactaatatgtctgttagatgtggattttgagaaatatttgctaaactacccaagtaggatttctgctattaaatggcctctgggtcctaaaagctttttttaaaaaaaaaaaaaaaaaaaaaaaaaaaaaaaaaaaaaaaaaaaaaaaaaaaaaaaaaaaaaaaaaaaaaaaaaaaaaaaaaaaaaaaaaaaaaaaaaaaaaaaaaaaaaaaaaaaaaaaaaaaaaaaaaaaa

SEQ ID NO: 715 - DNA, 2654 bp, Cricetulus griseus
  modified_base (196)..(196): a, c, t, g, unknown or other
tgaaccctgtgtttctgggtccattaactcctgttaaccctatccagatgaactctcaaagcagcgtgaagtcacttcccgtcaaccctgatgatctgtatgtgagtgtgcacggaatgcccttttctgcaatggaaaatgatgtcagagagtttttccatgggctccgtgttgatgcagtgcatttgttaaaagntcatgtaggtcgaaataatgggaatggattggttaagttctctcccctcaagatacatttgaagtctttaggaaaaccggaaacagaatgctgatgattcaacgctatgtggaagtcagtcctgccacagagagacagtgggtaggctgctggaggtcatatcactttcaaacaaagcatggggccgttctggacaagcccaccccccctccaccagacacttccaaggtcaaaatcgcccagtggggcagaaaaggtcacggtcaagatcaccacatgaggctggttattgtagtttacttaaaagggctaccatttgaagcagaaaacaaacacgtcattgatttttttaagaagttggatattgtggaagatagtatttatatagcttatggacccaatgggaaagcaactggtgaaggctttgtagaattcaggaatgatgctgactataaggctgctctgtgccgtcataaacaatacatgggcaatcgctttattcaagttcatccaattactaagaaaggtatgctagaaaagatagatatgattcgaaaacgacttcaaaacttcagctatgaccagagggaaatggtgttaaatccagagggggatgtcagttctgccaaagtctgtgcccatataacaaacattccattcagcattaccaagatggacgttcttcagttcctagaaggaatcccggtggatgagagtgctgtccatgttcttgttgataacaatgggcaaggtcttgggcaggcattggttcagtttaaaactgaagatgatgcacgtaaatctgaacacttacaccgtaaaaagctgaatgggagagaagcttttgtccatatagttaccctagaagatatgcgagagattgagaaaaatcccccagcccaaggaaaaagggcttaaagatacctgttccaggtaatcctgcagtaccagtgatgcctagtgcagggatgcctgctgctggaattcccgctgccggaattcccggttctgggatgcctggtgccgggatgccaggtgctggaatgcctagtgcggggatgcccgctgctggaatgcctggtgctgggatgcccagcgctggaatgcctggtgccggaatacctggtgctggaatgcctggtgccggaatacccggtgctggaatacctggtcccgcaatacctggtccagcaatacctggtcccgcaatgcctggccctgcaatacctggtgccgcaatacctggtcccgcaatacctggtcctgcactgcctggtgctggcatccccactgcaggaggagaggagcatgtcttcttgactgtaggatcgaaggaggccaataatgggccgccatttaatttccctggtaattttggcgggccgaatgcctttgggccaccacttccccctccaggattagggggggcttttggtgatgttaggcctgttatgccttcagttggaaacagtggtttgcctggcctaggactggaagttccaggttttggaggagcaccaaataatttaagtgggccgtcaggatttgggggcattcctcagaattttggaaatggccctggtagtttaaatgctcctcctggttttggaagtgggccccctagtcttggaagtgtccctgggcatttgagtgggcctccagcctttgggcctgggcctgggcctggcccaatacatattgcgggtccccctggctttggagctagctctggaaaaccaggacctacaataattaaggttcagaacatgccctttactgtatctattgatgaaattttagatttcttttatgggtatcaggtaatcccaggttcagtgtgtttaaaatacaatgaaaaaggtatgcctacaggtgaagccatggtggcctttgaatctcgggacgaagccacagctgctgtcattgacttaaatgatagacctataggttcaagaaaggtaaagctcgttttaggatagtggttcacattatagggtatatcttcatgttgctgtgattaatgcatccagattgttttcatagtatttccaggttagagcctgtggattgtttcaattgcagatagattggtttctataacacagagcattggttggctgtttacaactcacagaattaaacattgcaatttgtttcgtaaagctatctggagagaacacaaaaataatttttggcataccagtggaaaccatttctaaaactatgatcatataaagcttatcaaggaaatctagattggctttcttttataccacatgggatgaagaaaatagaaacataagtagagctcgaggagggtgctcttgccagttgctgacaattagaagttggctacttttgcaattcgatttaaagttggacatatttgctttgttatagggtcaaagctttgtctaaaacctacattttctttttaaattgaataaagtctctgtat

SEQ ID NO: 716 - DNA, 2651 bp, Cricetulus griseus
tcggccaaaaacaccgccatgaacaagaagaagaagccgttcctgggcatgcccgcgccgcttggctatgtacccgggctgggccggggtgccactggctttaccacccgaacattgggcctgcccgggatgcaaatgatcctgtggatgatcgacatgccccaccagggaagagaactgtgggggaccagatgaagaaaaatcaagctgctgatgacgatgatgaggatctgaatgataccaactatgatgagtttaatggctatgctgggagcctcttctcaagtgggccctatgagaaagatgatgaggaagcagatgctatttatgcagctctggataaacggatggatgaaagaaagaaaatggctgggcaaccctgaagttagactggagagaaccatacttctgttgatcctcgacaaactcaatttggaggtctgaacacaccctatcctggtggcctgaacactccgtaccctggtggaatgacaccaggattgatggacacctggtacaggggagctggacatgagaaagattggccaagcaagaaacaccctcatggacatgaggcttagccaggtgtctgactcagtgagtgggcaaactgttgtggaccccaaaggctatctgacagatctaaattctatgatcccaacccacggaggggacataaatgacattaagaaggcacggctacttctcaaatctgttagagaaacaaaccctcatcacccaccagcttggattgcatcagctcgcctggaagaagtcactggaaagctacaagtggctcggaatcttattatgaaggggacagagatgtgccccaagagtgaagatgtctggctagaagcagccaggttacagcctggggacacagccaaggctgtggtggcacaagctgtccgtcatctcccacagtctgttaggatttacattagagcagcagagctagaaacagacattcgagcaaagaagcgtgttcttcggaaagcccttgagcatgtcccaaactctgttcgattgtggaaagcagctgttgagcttgaagagcctgaagatgctagaatcatgttgagccgagcggtagagtgctgtcccaccagtgtggagctttggcttgctttggcaaggctggaaacttatgaaaatgctcgaaaggtcttaaataaagctcgtgagaacattcccacagaccggcacatctggatcaccgctgccaagcttgaggaggccaatgggaacactcagatggtggagaagatcattgaccgagccatcacctccctacgggccaatggtgtggagattaatcgggaacagtggatccaggatgctgaagagtgtgacagggcaggaagtgtggccacttgccaggcagtcatgcgtgccgtaatcggtattgggattgaggaggaagatcgcaaacacacctggatggaagatgctgacagttgtgtggcccacaatgctttggagtgtgcacgagccatctatgcctatgccctacaagtcttccccagcaagaagagtgtgtggttgcgagctgcatactttgagaagaaccatggtaccagggagtctctggaagcactcctgcagagggctgtggcccactgccccaaggcagaggtgctgtggctcatgggtgccaaatccaagtggctggcaggggatgtgcctgcagcaaggagcatcttggccctggccttccaggccaaccccaacagtgaagagatttggctggcggctgtaaagctggagtccgagaacaatgaatacgagcgagcccggaggctgctggccaaggcacggagcagcgcacccactgcccgtgtattcatgaaatctgtgaagctggagtgggtgttggggaacatcactgctgcccaggagttatgtgaggaggctctgaggcactatgaagacttccccaagctgtggatgatgaaggggcagattgaggagcagggggaactgatggagaaggcccgagaggcctataatcaagggctgaagaaatgtcctcactccacaccactgtggctcttactctcccggcttgaagaaaagattgggcagctgactcgtgctcgggccattttggaaaagtctcgtctaaaaaacccgaagaatcctgggctatggttggagtcagtgcgactggagtaccgtgcagggctgaagaacattgccaacacactcatggccaaggcactgcaggagtgccccaattctggtatcctgtggtctgaagctgtcttccttgaggcaaggccccagagaaagaccaagagtgtggatgctctgaagaaatgtgaacatgacccccatgtgcttttagcagtggctaagctgttctggagtgaacgaaagatcaccaaggcacgggagtggttccatcgcactgtgaaaattgactcagatctgggggatgcctgggccttcttctacaaatttgaactgcaacatggcactgaggagcaacaggaagaggtgaggaagcgctgtgagaatgcagagccccggcatggagagctatggtgtgctgtgtccaaggatatcaccaactggcagaggaagattggggaaatactagtgctggtagccgcccatattaaaaataccttctgatagctggggtg

SEQ ID NO: 717 - DNA, 2649 bp, Cricetulus griseus
atatgcacagtctctggaacagcctggggctttggatgatcctaacaggggcagtttggttaagagaaatgcagtcctacccccaaagccttcacaagacagggaggccacggacgataagccaggggtaagcagccagctacccaaggggaaagctatagagctggctctgaagagaccacggccacctgttctgtctcttcgtagctcatcagagactccatatctcttaaaagaaactagcaaaggaggcagtcagggggaggataggaacttgctctactactctaaactaggcctggtggttccatccagcggcctgcttctgcaaatcagagcattgacagaagtgtcccattagtgaaaagcctcctcaggcgttcactgtctatggacagccaggttcctgtcactgtcagacccaacacggcattagttgaagaacccatcgccagcctctagttcccatgcagttttggatgagaaattccaaagaaaactgattgacatagtgagagagagggagattaagaaggccctgatcattaagctgaggcgcagcaagcctggcttccagggacagagtagttccccagcacagcaagtcatcaagaggaacttgcgctcccgagccaaaggggcctacatttgtgcctactgtggcaaggcataccgcgtttctctctcagtttaagcagcacataaagatgcacccgggagagaggcccctcggagtgagcagagctgctaagccgaaagagcgggctcgtggcacgcgcggtagagagcaagggaggtttacccgtgccgcctctgtaatgctaagctctcttctcttctagagcaaggcaaccacgagcgcttgtgccggaacgccaccgtttgtccttactgcagcctcaggttcttctccccggcgctgaagcaggagcatgaggacaggtgtgagtacaaaaagctgacctgcctggagtgcatgcgcaccttcaagtcttccttcagcatctggcggcaccaggtggaagtgcacaaccagaacaacatggcttcagcagagaacctctccctgcccaccctggaccacaacggtgaagtggcagctgcttccaggcctcaggctgagcctagcaaggtaaaccacgtggttgctccaaaagaggacacagtgtttagtgactcttcagagcaagtgaacttcgattctgaggattcctcctgcctccctgaagacttgagtctttcaaagcaactgaaagtccaagtcaaagaggagcctgtggaggaggctgaggaggaggctcctgaggccagtgcagctcccagggaggctggtcccagcaaggaggctggtctgtggccctgcgagaaatgtggaaagatgttcacggcacacaagcagctggagcgacaccaggagctgctgtgttccgtgaagcccttcatctgccacgtgtgccacaaagccttccgtaccaacttccggctctggagtcatttccagtcccacatgtctcaggccacagatgagcctgcacagaaagaggctgaggtgtgtcctgtgcccacaaattccccctcaccaccacctctgccacctccaccacccttgcccaagatccagcccctggagcccgacagccccacaggccttcctgagaacccgaccccagccacagagaagctgtttgccccccaggagtcagataccctcttctaccacgcccctcccctttcagcaatcacattcaaaagacagtttatgtgcaaactctgccataggacattcaagaccgcctttagtctttggagtcacgagcagacacacaattaaatgacctacccctctcacctgtcacaaaacagcaggcccttgacttgtttcaactggcactccagagcccacagtgtttggtctctgccagcttgaaactcaggtgtcattgggataagcagtgccagcatgaggttagcagacacagcctcaccaccatcctagaccaccattccttctaggggcttcagagactggaggaagtgcctcgttgcagctttcatgcgctttccaagaacggtgtgcacaacatacacacttctgtctgtcttatgtgaggacttctgtgggggtgttgaagtggataacagtgaaaatgtcactatctgacatgcaaaggtatattaaagctctagcaaaggtccaaaattagtttttgcaacttgatttgttacttagggtttgggattctattttttttcctgtttcagagacaccacccgtctgctcaccagcattctacacccatggtagcaaaggcagtctttatgttgaagcaaagatttttttttttttataaaatactaattggctttgtaattatggaagctatatgtagaattttgacctttattctttcacttgaaaaggctattgaaaatccattaatatgtctgcatttcctattttgttccttaaattttcagagaagggaaataaaattaggctgcagctactgattcttgccatctgcttttttgaactatgcattttagagatgaactgaaagcgcccaccttttaatgaatgaagctagtgccaggctaggtagctgtccactgaactcattccctgtggtgagtatctagtctctcctc

SEQ ID NO: 718 - DNA, 2648 bp, Cricetulus griseus
gccgccgccgcccagggacactgccgaccgggtccgtgtgccgccacccactccggacacagaatatccagttatggataaaaatgagctggtgcagaaggccaaactggccgagcaggctgagcgctacgatgacatggcagcctgcatgaaatctgtaaccgagcaaggagctgagttatctaatgaggagaggaatctcctctctgttgcttacaaaaatgttgtaggagcccgtaggtcatcttggagggttgtctcaagtattgagcagaagacggaaggtgctgagaagaagcagcagatggctcgggagtacagagagaaaatcgaggcagagttgagagacatctgcaatgatgtgctgtctcttttggaaaagttcttgatccccaatgcttcgcaagcagaaagcaaagtcttctatttgaagatgaagggcgactactaccgctacctggccgaggttgctgctggggacgacaagaaaggaattgtggaccaatcacagcaagcataccaagaagcatttgaaatcagcaaaaaggaaatgcaaccaacacatcctatcagactgggtctggcccttaacttctctgtgttctattatgagattctgaattccccagagaaagcctgctctcttgcaaaaacagcttttgatgaagccattgccgaacttgataccttaagtgaagagtcgtacaaagacagcacgctaataatgcagttactgagagacaacttgacattgtggacatcggatacccaaggagacgaagcagaagcaggagaaggaggggaaaattaaccagccctccaacctttgtctgcctcattctaaaatttacacagtagacatttgtcatccatgctgtcccacaaatagtttttttgtttacgatttatgacaggtttatgttacttctatttgaatttctatatttcccatgtggtttttatgttttaatattaggggagtagagccagttaactttagggagttactcgttttcatcttgaggtggccaatatggggaagtggaatttttacacgagttatacatgtttggcatagtacttttggtacattgtggcttcagaagggccagtgttaaaactgcttccatgtctaagcaaagaaaactgcctacatactggtttgtgctggtgggaataaagggataattggttccagtcaggagtgtagctgttgtgggtactttaaggttggattggagcactggtgacgctgtggtacaaacagcaggtgtcccctggatacaccgcgggatcgcgtgtctgcatgcacaccctggccacagctccggaagtggtccctaaagaaagttgtgacccaatttactctgataagggcagaaacggttcacattccattatttgtaaagttacctgctgtttgctttcattatttttgctacacattttatttgtatttaaatgttttaggcaatctaagaacaaatgtaaaagttaaagacgcagtaaaatgagttgcttggtgttcactgctccacgtgtatcaagcgcagcggtaaacaaaaccccgtgtatttaactttgttttttatttttttttttttttttttgttttttgttttgttttttttttccttttgtgatttttttttttcctttttgatacttgcctaacatgcatgagctgtaaacacagttaacagggaaacgacttgagatgacggctagctttgtttaatgtcttatgaaattttcatgaacaatccaagcataattgttaagaacacatgtattaaattcatgtaagtggaataaaagtttatgaatggatttttcaactacttttctctacagcttttcatgtaaattaatcgtggttttgagacttacctgaaggaaattgtgtccttattccctcttggcagctaatgggcttttaccaattttgaacacaaagttaacaacaaaaacgctaatgtaactaccattctctaccatctccagtatcctcctcctccttacctccttccaaacgtggcggggaccttttcttttctgggtgtcgggggagattggttggcaaaaggtaatgtgttccctttaaaattttggtctacggcgttttctaacttaggaagccacaatgaatgttgttggcccagtgtcacaatgggcagcattaactgttaagttttgtgcttccaaatcgctgttgggccgtgtatttggggaaaggccgcatgatctctctggctccactcagtgtctgagataccccgctcctctgcttgcatcccacagctccctcgtcctctcccctgcagcccagctctcctcggttgagcctgtgtttatctccctggaaatcctgccccgaatggccgttcaccgtctccctttaaaatccttcctctaaagacggggctcagtcatacccaaagctcacaccctaccgagtatttcctcagtaccttacagaaaacaccaaacaaaaatgccattttaaaagaggtgtatttttttttcttttagaatgtaagctcctcaagagcagggacaatgttttctgtatgttctcttgtgcctggtacactgtaaatgctcaataaatattgatgatgggaaaaaaaaaaaaaaaaaaaaaaaaa

SEQ ID NO: 719 - DNA, 2647 bp, Cricetulus griseus
attgtgcatgggcgcagaagtaagccggatgaagggagctacgtttgtgttgcaaggaactatcttggcgaagcagtgagtcggaacgcatctctggaagtggcataattcagaaagaattaggagatgtcattgttcgtctccatactccagttgttctgacgcctacaacagttcaagtcacatggacagtggaccgtcaaccccagtttattcagggatatagagtgatgtatcgtcagacttctggcctacaagcttcaactgcatggcagaatctagatgccaaagtccccactgagaggagtgctgtcctagtgaatctgaaaaagggggtgacttatgaaattaaagtcagaccatattttaatgagttccaaggaatggacagtgaatcaaaaacggtccgtactactgaggaagccccaagtgcccctccccagtctgtcacggtgctgacagttggaagccacaacagcacaagcattagtgtatcctgggatcctccacccccagaccaccagaatggtattattcaggaatataagatctggtgcctgggaaatgaaacgcgattccatatcttccctggaattcagtaccgggtagaggtggcagctagtacaagtgcaggggttggagtcaaaagtgaaccacagccaataatagttgggggacggaacgaagttgttattactgaaaacaataacagcataactgagcaaattttaactgatgttgtgaagcaaccttgcatttatagctggcattggtggtgcctgctgggtaattttgatgggtttcagcatctggctgtattggagaagaaaagaagagaaaaggggctcagcaattatgctgtaacatttcaaaagaggagatggaggactaatgagcaatgggagccgtccaggtcttctaaatgccaatgatcccaattataccctggcttgctgattcctggtccagccacgagtttgccagtaaacaatagcaatagtggcccaaatgaaattgcaaattttgggcgtggagatgtgctgcctccagttccaggccaaggggataaaacagcaacgatgctttcagacggagccatttatagtagcattgacttcactaccaagaccacctacaacagttccagccaaataacacaggccacgccatatgccactacccagatcctgcattctaacagcattcatgaactggcagttgatctccccgatccacagtggaaaagttcaattcaacaaaaaacagacctgatgggatttggttattcactacctgatcagaacaaaggtaacaacttgggctaatgttcctctacctcctcctccagtccagccccttccaggtacagagctgggacactatgctgccgaacaacaagaaaatggctatgacagtgatagctggtgcccaccattaccggtacaaacatacttgcaccagggtatggaagatgaactggaagaagacgatgatagggtccccacacctcctgttcgcggtgtggcctcttcacctgctatctcctttggacagcagtccactgccactcttactccgtctccaagggaagagatgcaacccatgctgcaggctcacttggatgagttaacaagggcctatcagtttgatatagcaaaacaaacatggcacattcaaagcaatactccgcctccacagcccccagtcccacccttaggttatgtgtccggagccttgatttctgatttggaaacagatgttccagatgaggatgctgatgatgaagaggactctttcttgtcaggagtatataagaaaaagaaagaaagcaaaagccaccgtccaggaagaaaaaggattttcctctgtatataatttcttttgtgcattgctatgcaagttcactcttttttagaatctgttcatattactgtctgttcctattggtctgttgtactatatgtgaattaatgggctgtggtgccatatattaacttttaattgtgtaacttttatgtttaaattttgcactgcaattttatttggtgataagcacaaatctctactcctcatgacatgaagaaaagattgaatgtgaagggagttttctgtactgtaagttaggttgggtaatgctggtgtaacgaatcctgtgagatggttttcatttgggggtgtagaaataggaagattcaaaggaatgatggtgttggcaaagtcttcttgaaacatcagatattgagccaattttaagaagcagaaagatggcttttactattgaaaaaaagcaggggtcaaaagaaggaaagtttaagtctagacagaatatgtgttgaagtattctggtagcaaagatgtactaacttgctttaaaaatataattaaagttttatttagaatcaactttacctgccattataattcaatgagcaaaatgaaatcaaggtgtttagtgagatctgtatttatattacagcttttaaaagaatggcatttttgaattaccataattaatctttccaactcattaagtcagaatataacatgaagttccccaaggaaacaaagtaaatgaactctagaaattctagcaaatagtggaagaagcaacttattattagggcatactcgggctacttttaaatat

SEQ ID NO: 720 - DNA, 2647 bp, Cricetulus griseus
atggcggctgtggtactggcggaggctacggtgacggtctggcccggggtggatagagttggaagagggggtgttcgttctccctaggggcagcgggagctaggcggggactgagcccgggaggccgggcggagccagcacctttcagctttctggacggcagcggcattcaggttctaaatggcttctaagaagttgggttcagattttcatgggactttcagttaccttgatgatgtcccattcaaaataggagacaaattcaaaacaccagctaaagttggtctacctattggcttctccatgcctgattgcttacaggttatcagagaggtgcagtatgacttctccttggaaaagaaaaccattgagtgggctgaagatgttaagctgatccaagaagctcagcgagaagcagagcgcaaggctgaggatgcggaagctaaagtgaattctaagagtggcccagaggggtgacagctaaaatgagtttctccaagactcacaatacagccacaatgccacctccaattaaccccatccttgccagcttacagcacaacagcatcctcactccaactcgggtcagcagtagtgccacaaagcagaaggttcttagcccaccccacacaaaagcagatttcaaccctgctgactttgagtgtgaagaggacccatttgataatctggagttaaaaactattgatgagaaggaggagctaagaaacattctggtaggaaccactggacctataatggctcagttactggatagtaactcacccagaggaagcccggggtctgtgttacaggacgaggaggtcttggcatccttggagcaagcaaccttagatttcaagcctcttcataaacctaatggctttataaccctaccacagttgggcaactgtgaaaagatgtcgctgtcttccaaagtgtccctcccccctatccctacagtaagcaatatcaaatctctgtccttccccaaacttgactctgatgacagcaatcagaagacagtcaagcttgcgagcacttttcatagcacatcctgcctccgaagcggcacatcccggaatttcctaaagccttccacccaaagcagtgccagtgagctcaatggggaccatgctcttgggctttcagctttgaacttgaacagtggcacagaagtgccaaccatgacatcctcccagatgccttccctgtctgtcttgtctgtgtgtacagaagaatcatcacctccaaatacatgtcccacagtcacccctctaaatttctcagtgtcacaagtgcccatgcccagctgtccccaggcctatttggaactgcaggcactgtctccgagtgagcggcaatgtgtggagacagtagtcaacatgggctactcatacgattgtgtcctgagagccatgaagaagaaaggagagaatattgagcagattctcgactatctctttgcacatggacagctttgtgagaagggctttgaccctcttttagtggaagaggctctggaaatgcaccagtgttcagaagaaaagatgatggagtttcttcagttgatgagcaaatttaaggaaatgggctttgaactgaaagacattaaggaagttttgctattacacaacaatgaccaggacaatgctttggaagacctcatggcccgggctggagccagctgagactaggtcctgtcactgccctgccacagcaacaccatcccccaggaggccctgcacagctcacttgtggggaagaagggacatgcttccagattttctttgggggttagaaggtcaggcgtggagatgattatttgctagtctctgtgagccccggcccaagctgggggaaggtaggaagatttgagcatacaaatgccatactggctccttcaatattaaacatagctgttattttgagaagtgtccttcccgcattggcctttcagaaagaatacttggatctttctggggtctcttatttcctcagccaaaacctgacctggctcccaagaggactgggaagaggaggaggggaagactgctgctgtttgggggctagatgcttttctctttgccataccataggcagactgaactctaacctgagtcaaatacaagtgagaagttcttccaggcccaccttcccacagcattccttagtgttacactggttttggatgtctctacggtacaaaagatgcacttttcctcatggggcaaagtcttctgctaggcagttcccatgtgtccctgttgactgtttcttttggcttagaccataatcctctactgtgcagggcattggagtccctgcgctgaggctgttgtcaatttgagtaatctttggctccttctcagcacactgaatcgatgagaaaacaggccatgactagtcactcagcactaatccccagttcttgaacagtctctgccagccctgctttaggatgacacaatgagtaacacctaggcatagaaaccactctttggtttgtttgtattatgttctacaccattaaagatctaaatacaaaggatataatacagtcttgaatctaaaataatttgctaactattttgattcttcagagaactactaataaaaacctaaaaggtaaaaaaaaaaaaaaaaaaaa

SEQ ID NO: 721 - DNA, 2644 bp, Cricetulus griseus
agcacctgcatctccaatggatactgaagggtttggtgagctccttcagcaggctgaacagcttgctgctgagactgaaggtatctccgagcttccacatgtggaaaggaatttacaggagatccagcaagcgggtgagcgcctgcgttcccgtaccctcacacgcacatcccaggagacagcggatgtcaaggcatcaggttcttctcggttcacggggacttgacatatcccacatctcccagagattggagagtctgagtgctgcgaccacttttgaacctcttgagcctgtgaaggacacagacattcagggcttcctgaagaatgagaaagacaatgccctgttatctgccattgaagagtcccggaagaggacctttggtatggctgaggagtaccatcgagaatcgatgctggtcgagtgggaacaggtgaaacaaagaatcctgcacacgctgctggcctcaggagaggatgccctggactttaccaagaaagtgagccgagttacatcagtgatgtgggtccacctggtcgaagctctctggatagcattgagtatggcctatgctcggcagatttatatctacaacgagaagattgtgagtggacacctacaacccaacctggtggacctgtgttcatctgtcgcagagatggacgacaagagcatttctgatatgtgggccatggtgaaacaaatgacagatgtggtattggcaccagcaactgatgccctgaagagccgaaacagtgtagaagtgcgcatggagtttgtcaggcaggccttgggataccttgagcagagttataaaaattacacccttgtgactgtctttggaaatctgcatcaggcccagctgggcggtgtgcctgggacttatcagctggttcgaagtttcctaaacattaaactgccagctccctcaccaggacttcaggatggcgaagtagaaggccatcctgtctgggcgctaatttattactgcatgcggtgtggggacctgcttgctgcatcacaagtcgtcagtcgagcccagcaccagctgggggaatttaaaacctggttccaggagtacatgaatagcaaggatagaagattgtctccagctactgaaaacaagctccggcttcactaccgcagagccctcaggaacaacacagatccctataagcgtgccgtgtactgtatcattggcaggtgtgacatcaccgacaatcagagcgaagtagcagacaagactgaggactacctgtggttaaaattgaaccaggtgtgttttgatgatgacggcaccagctcaccacaagacaggctcacgctctcacagttccagaaacagctgctggaagactatggcgagtcccacttcacagtgaaccagcagcccttcctctacttccaagtgctgttcctgactgcgcagtttgaggctgccattgcctttctcttccgcatggagcgactgcgctgccatgctgtccacgtggccctggtgctgtttgaactgaagctgcttttaaagtcctcagggcagagtgctcagctcctcagccatgagcctggtgacccaccctgcatgcgacggctgaactttgttcgtctgctcatgctctacacccgcaagtttgagtccacggatccaagggaagcactccagtacttttacttcctcagggacgagaaagacagtcaaggagaaaacatgtttctgcgctgtgtgagcgagcttgtgatagaaagtcgagagtttgatatgatccttgggaaactagagaatgacggaagtagaaagcctggagtcattgataagtttaccaatgacacaaagccaattatcaacaaagttgcttccgtggcagaaaataaaggactgtttgaagaagcagccaagctttatgatcttgccaagaatgccgacaaggtgctggagctgatgaacaagctgctgagccctgtggtcccacagatcagtgccccacagtccaacaaggaaagactgaagaacatggccctctccattgctgagcggtacagggctcagggaataagcgcaaataagtttgtggactctacattctatctcctcttggacttgataaccttttttgacgagtatcacagcggtcatattgacagagcctttgatatcattgaccgcttgaagctggtgcctctgaaccaggaaagtgtggaagaaagggtagctgccttcagaaacttcagtgacgaaatcaggcacaacctctctgaagtgcttctcgccaccatgaacatcctgttcacccagtttaagaggctcaagggaacaagtccatcttcagcatccaggccccagcgagtcattgaagaccgtgactctcaactccgaagtcaagccagagctctgattacctttgctggaatgataccttaccgaacgtctggggacactaatgccaggctggtgcagatggaggtcctcatgaattaagtgctgtatttgatgggtctgggctcaacattatccgtatattaatcacgtgggccagctggggtgggttcccagttttgtttctgttgtattgtgttttgttttttgtattatgttatttttgtcaggtatcaaataaatttctttgatttgtaatttcttttaaa

SEQ ID NO: 722 - DNA, 2644 bp, Cricetulus griseus
agaaatagatcagttgtcaggaagggacgtctgccgttccaagaaggggaccggagtcggtgctgaggaagtagactcgagaacccgtgacccaggtaatgacagcgccagcaccgctcccaggagcacggaggagtctctctctgaggatgtcttcaccgagtcagaactctctcctatccgggaggagctcctctcctcagagctgcgacaggagaagtcttcggatgcgtccttggagtctgtgcaaactgtcagtcagatggaggtacaatcgttggctgctaagtcagagtctgctcacattcctgaccagggaatgggagatcactacaagggaagacatcaactcaaagcaggttgctccagcaaaagccgacctggagtctgaaactttccgaccaaacctaagtgaccccagtgaactcttactgcctgatcagattgaaaagcttactaagcatcttccgccaagaaccatcggctacccatggacgcttgtgtatggaacagggaagcacggcacgagcctgaagaccctttatagaacaatgacaggcttagacacgccggtgctgatggtgattaaagacagtgacggacagggtcttcggtgcactagcatccgagccatttaaagtaagcgatggcttttacggtactggagaaacctttgtttttacattctgtccagaatttgaggtctttaagtggacgggagataatatgtttttatcaaaggagacatggactcattagcatttggcggtggagggggagaatttgccctttggcttgatggggatctcaaccatggacggagccattcttgtaaaacgtttgggaatcacacactttctaagaaggaagatttctttatccaagacattgaaatctgggcttttgagtgaatgcagtgctctcggttttagcaggacgtcggcccaaacctgagcggacaaagcattgtttggaatgttccagaagcaatacaattcacatgtcatttgcgttttcacgtccgtcgtttggccatttacttacttacagctataattttggagtttatttttcaaatctatgtttctgtcccagagttcttttgttttacaccatggcctgggtccctctagtagtataacagctgggtggagtttggtcagcgtatggcagcattttgatcataaaggccaccacattttcaattcgagttatctcagtctcttaattggatggtgctctgttgtaactttttttttaattctgtattgtttctttttgtagagcagtgtacttggggtattgaggaaatgggattgagatacttttgtatttggttgagttgacaaaggtgacatttggttggacctgcttatcactttcttctgagaaactatatgccaaaagaatatctccttcatagaccttttctagttctaattcactacagcattctctttattcgtgttgtaaacattctcaatttcattttaagacaatgaaatttgaagagaagtctgattggcatagaccacagcacacatgatatgcgggtttgggcgcatgttttcatcactgaattatcagataattgacaaattgacagaggatgggaatttaatgattctattggatgtaatatattaagcaagtaatactctttacatatttgtagcttaatagggcattatcataagtacaaaacgtaaaccctgcatatttcttcagcattgtgtcagatacactgttttacagttctgttgttttagccttgttgcataccaactccccaaatacatttatatttttcctgctcaaaagaaaaacacattgttttgaaatgaaataaaaattgtttttttttcaaagtggcatatgttattagttaaccattagcgtctgctcttgtgaaagggcggaggctgtagtcgacaatactgtaactcagtagacttggtgaatgaatgtgcaagcttctgtcaagtggcctccaaaacagtgaacaggtagaataaactagcggctatatcttctgtcataggaaaccaacaataagccattatggcaacactcgtcagttcaatctcagagcttcatgtcgcgcaaagaataaatcctgctgttatacgtgtgccagtgactctgtgctgaaaatccagctgttccacacaagcgttgtagatcctgtaaattgatgtttaaagatagttttgttcttacagaaagtgttgactgccaggttgcttatagcactttaaattattctgaaaatgaaattaccagccacatatggtggcttaagtagttttagttatataacttaaaattacctagttcttttgggaagagtctagatacttccccaaagaaagcataatgctaatcaaaatctggtgttctatgacatgttgtttctgaagatgaaacagaaacacggggcatcgtttcctcgtctgtgtatagctctcattacaagctaggtgatagtatctaggttaaatgtttataatataatatagggaattgtaaataaatgtatcctttctctttggtcttccacagcagtgttattgtctttgtggaggtgactaatgatacatctttaaaacatcctgtaatggattcaactacaacaaggtcatag

SEQ ID NO: 723 - DNA, 2643 bp, Cricetulus griseus
tgttttcacagcgccaacagcaacgccgaccacgaaggatttttgctcggagaggtaagacaagaggaaacgtttagcatcagtagactcacagatcagcaatacagagtttctgcaagtaattgaaattcataaccatcagccctgttcaaaactttttagtttttatgattatgcaagcaaagtgaacgaagagagtttggacagaatccttaaagatcggaggaagaaagttatcgggtggtacagattccggcggaacacccaacaacagatgtcctacagagagcaggttatccacaagcagctcacccgtatcctcggtgtgccagaccttgtcttccttctcttcagcttcatctctaccgccaacaattctactcatgctttagaatatgttctatttaggccaaatcgaaggtataatcaaaggatatcacttggtatccccaatctaggcaatactagccaacaagagtacaaagtgtcttcagtgccaaacacttctcagagttatgccaaagttattaaagagtggagtcatgaaggacatcagggcaatttatcaggtttataatgcacttcaggagaaagtacaggcagtgtgtgcagatgtagaaaaaagtgagcgagttgtttgaatcttgtcaggcagaagtgaacaaatttaagaagacaaatcactcagaagaaaaatgaaaaggaacaagaaagaaggttgcagcaggccctgttaagcagacagatgccgtctgacaatctggagccagcattcagccctcggatgtcctattctgggtttgcagctgaagggagaagtactctagcagatacagagccctctgatcctcctcccccatattctgatttccacccaaacaatcaagaaagtactctgagccattctcacatggaaaggagtgtcttcatgcctcggcctcaggctgtgggctcttccaactatgcttccaccagtgccggactgaagttctctggaagtggagcagatcttcttccttcccaaagagcagctggagacagtggggaggagtcagacgacagtgattatgaaaatttgattgaccctgcagaatcccctcatagcgaatactcacattcgaagaattcacggcccgtgacacatcccgatgaggaccccaggaacactcagacctcccagatttaagtaaacagatgactctctctccacttggcactgcttttcttaatggcttattgagagtttgttgaggacttaatctgtggggagaactggtttctcagatgccgtggctctcgagtggagcaccccatgcacagaacccccagaatcctctgcccgctggtccttgcctctgggtgcagtgcatgggttcacagcagaatcattacgataatcaaattgtcctaattctggtgcgattcatggatgtactagtaaatttaggcagaatgaaactcctcagtgtagtttgttctttaagataaattggagatcagagactaagcacaattagtctataaacactctaagttggaaacttacctctgcactatcatgccttgaaatttgctttttcaaagggaaacaagtttagcagcagccttcaaagaactttctatgatgagccaaattatctttgccagaaaagaaattttgttaattccaagaagcctaattggaacaagtcagacattccttctcctatctgcatgactttgtaagatgggagagagggctttgtttcaacttttttctactagcctgatacatattgtcacttaaaatggttgcctttttaaaaaagtagaaatactaatccccagtgaatactcatcctgatcagtggcagatccagggctagatttgtggaggaaggacatttttaagaacatatccaggaatcttggtgaataagatatgcttcaatggtctgaataaccatactcttccccctgtttttttaagttgccatttgggggataattgcaaatgtgtggagaccattgggatgcacttatgtttttatttaattattgcttgttttctagttttgcccaaaatgtgtaaccactaaaaaacaatttagaatataatgggctactggattagatggtaagtccagcatttatgccggtcattcagcccatgatgcttgtccctgaactgcctttccttggactgtttaacacatgtaaggatgaagatgttgttaaaaggttccaaaggatttatttctgttttatagcggtgttaactcatgagctccagctcccagtctcagacagcagattcaggcttagaaatgagatgctggactgccctgctttggttgtgccccatggtcttcattgtaattgtcccggttttgctgggcttacaccactgccgtttgatttgaatgttgagggtcactttatctgcagtgcgttctagcctttatcagctacctactatcggcttcagcacggtatgaattccagttttttaaagtgccatcgccatctcctctgttcagattttgacattcaggaaaatattcttatttttatgccatactgaaatatacagtgtatatctgacaaagcagttaaatgtgacaataaaaacttatttaatcatagaaataaaaaaaaaaaaaa

SEQ ID NO: 724 - DNA, 2643 bp, Cricetulus griseus
atctttacatggatgagatggcaaccactcagatttccaaagatgaacttgatgaactcaaagaggcctttgcaaaagttgatctcaacagcaatggatacatttgtgactatgaacttcatgagcttttcaaggaagccaatatgccactgccgggatataaagtgagagaaattattcaaaagctcatgaagcttacacccttcatcattcaggaaaacttgaacttggcactgaactctgcttctgccattgggtgtcatgttgtgaacattggtgccgaagatttgcgggctgggaaaacccccatctggttttgggactgctctggcagattattaagattggcttgtttgctgatattgaattaagcaggaatgaagcactggcggctttgcttcgagatggggagactttggaggagcttatgaaattgtctccagaggagcttctgctaagatgggccaactttcatctggaaaactcgggctggcaaaagatcaacaacttcagtgctgacatcaaggattccaaagcctatttccatctgctcaatcagattgcaccaaaaggacagaaggaaggtgaaccacggatagacattaacatgtcaggcttcaatgaaacagatgatttgaagagagccgaaagtatgcttcaacaagcagataaattaggttgcagacagttcgttacccctgctgatgtcgtcagtggaaatcccaaactgaacttagcctttgtagctaacctctttaataaatatccagcactcactaaacctgaaaaccaggacattgactggactctgctagaaggagaaactcgggaagaaaggacctttcgtaactggatgaactctcttggtgtcaaccctcacgtaaaccatctctatgctgacctgcaggatgccctggtcatcttacagctatatgaacgaattaaagttccagtggactggagtaaagttaacaagcctccatacccaaagctgggagccaacatgaaaaagttagaaaaactgcaactatgcagttgaattagggaagcatccagctaaattctccctggttggcattggaggacaagacctgaatgatgggaatccaaccttgaccttggctgtagtatggcagctgatgagaagatatactcttaatgttctggaagatcttggagaaggtcagaaagcaaatgatgacatcattgtaaactgggtgaacagaacattgagtgaagctggaaagtcaacttccattcagagttttaaggacaagacgatcagctccagtctggcagttgtggatttaattgatgccatccagccaggctgcattaactatgaccttgttaagagcgggaatcttacagaagatgacaagcacaataatgccaagtatgcagtgtcaatggctagaagaattggagccagagtatatgctctccccgaagaccttgtggaagtaaaacccaagatggtcatgaccgtgtttgcatgtttgatgggcagggggatgaagagagtgtaaaataaccaatctgaatagaaccatccttactcacaggtgcatgattggcaagtcagctattcccaggtgaagtgctcatggcttaaagaattctcagtcatttaaaggacttttagttttgattaacaagactagctcatcatgacagccttcggggaaagacttttagaaacaagcaactcctttcccttccagttggatctgttcagcacacctgaacatgctcacagccggccatctgctctctcctcctagaatactgcccttgacatttcctgatgcttgtgtattacctctctgtgtatcttttcctcttaggctgtccatctcttgagacttgcttagatcggtagatagccatagtattaacttgccaatttgctttccactttccaagttcttactggagaactgtggtcagatactatgtggagatgtgagtgtccttgcttactttgtagtgctgaaaatctgctcatgtaactggctgtgcagaatatactagaagcttttctcattcttttattcttaaaagcagtatctttttacagtattctttctacatgattatttttttgtacatttaagaatattttgattacggtcaacaagtctgctgatttgttacttttttaaaggggacttcaagtaagtaaaagaaaaagcataaactatagggggaggaaaatggaccctaagtttgttgtatttccccctcacacccaggatcaaatcaaatgaaatactttgtcttcaatgaatcagttcgacacatgcttctttgttttgaacactttatcacaaaactctcatttgatctaaaatgctgttgaatatgacacctttgaggagagagtgggctcagaatttagatgggactcaataagcaaagtatgctaagtgtacaatagatttttaaattaacgcatctaacaaggagatgtggtcacgaaaaggggaaagtatgtatgtcggacttgatgttctcttcctttgtcaagctttttgctgtagttctcaagatcatatgttaatctaactctgaaaagtgatgtaatctggtagcaacatagtactccaaataaaggcatttgcataataaaaaaaaaaaaaa

SEQ ID NO: 725 - DNA, 2641 bp, Cricetulus griseus
ggtcaaccggatgcacatcagtcccaataccgaaatgccatccaccctggggaccgcatcctggagatcaatgggacccctgtccgcactctccaagtagaggaggtggaggatgcgattaaccagacaagccagacccttcagctgctgatcgaacatgaccctgtcccccagcgcctggaccagctgcggctagatacccggctttctccccacatgcagagtactggacactctcacacactcagcaccctggacaccaaggagaatcaggaggggacactgaggagacgttctctgaggcgcagtaacagcatctccaagtctcctggccctagctcccccaaggagcccctgctcctgaggtgaaagtgatgcgaagcctagaccaccctaatgtgctcaagttcattggtgttctgtacaaggacaagaagctgaatctgctgacagagtacattgagggggcacactgaaggacttcctgcgcaatgtggacccgttcccctggcaacagaaggtcaggtttgccaaaggcatctcttctggaatggcatatttacactcgatgtgcatcatccaccgagacctgaactcacacaactgtctcatcaagttggacaagacagtggtggtagcagactttgggctgtcacgtcttatagtggagagagaaaggcccagtagagaaggcaaccacaagaaacgcaagagtgaccgcaagaagcgctacactgtggtaggaaaccctactggatggcccctgagatgctgaatggcaagagctatgatgagaccgtggatgtcttctcttttgggattgttctctgtgagatcattgggcaggtgtatgctgatcctgattgcctgccccgcacactggactttggcctcaatgtcaagcttttctgggagaagtttgtccccaacagactgccccccagccttcttccccctggctgctatctgctgcaaactagagcctgagagcagaccggcgttctcaaagctggaggactcctttgaggcactgtccctgtatttgggagagctggccatcccactgccagcagagctggaagaactggaccacactgtgagcgtggagtacggcctgacccgggactcaccaccctagccctggtccatccccccgcaaggggacattccgcagccagcattgcccctgtccttgctatgagcaggactagctaggcttcctgtggattgacggcttgcttagaagcagaataagccaaccctactacctccccaggaggcatgcgggtgcaggggaacagtcctccacaggtgctggggcctggttactgtctgtaaatccaacactcgcctgaaagctgtgaagaagataaaaagagcctggattctagaccaggagtctgttactagggaccatttgggacctttgtggcagtgagattctgggaggctgtagctttacactaatcaacatagcctgggcctgctgggcaggatgacagaatgaactggcctgagggctccagaggcccagcaaggtgcaggacttcaagcggtagtgtgagtaacagaactgagagccttcaaagcatatgaaatgacagtggtgatttctcctcccactccaggccctgccctctggagcaggttttgaagagtctcttagtatgtggtgaaagccacaggatccagaaaaaggactggtttctgctcaccagcctagggaccacatcagtgtgggagtttccacttcaacatcctgtctcaacaagcggtcactcacaaaagcaccaaagaagctggggctggaaagaaaggtcctgccctttaaaaagccccatatcctggctggtgggctcagtcagaagctcaagacattgtccgatgctagaccggttctgggaggccaatgtggtctgtctcagactttgggtctgagcagggaaaggggagtcccatcaatttcttggcatccttgtggcagctacagcacatctttagtatgtctggtccaggcagcaacttgggacaggaattggtggctactgagtcccaaagctgagatacaaagagagctctctctttgagctgggccctcttgattctacctcccttgttgctggtccagctcttacttcctgagccacactccagggccatgggcattggaaaccctcggggcaccttccacccctggctaccaggtgtccaggggctctccagctcaccgaggtttgccatttcctaagtgcgagctcacaccgtatttaacaaattgggaatgggtttggtttataaatataaggtgtggtgggttgtactggtgggggaagggatcaggagtggttgctgttattagtttttatcttttgggtgatatgtgaaatattgtacatagacaagatgaaattgtggggtgggaagccatctttggccactttatttgctgtgtagactgtacttgtgtgtggagtttgcagacttgctgtaggggaaccctgaactcccagcatggctcagcatcctgtgactggttatacttgagctgtctccagcaagtgtgggagtggtgtggcctgagctgggccatgaagcagactaaataaattaagcaagttaacatagtgatgacactgagagt

SEQ ID NO: 726 - DNA, 2641 bp, Cricetulus griseus
catcgaaggccccattggattcccaggacccaagggtgtacctggcttcaagggagagaagggtgaatttggatccgatggtcggaagggagcccccggcctagctggcaagaatggaactgatggacagaagggcaaactgggccgcattgggcctcctggttgcaagggagacccaggaagtcggggccccgatggataccctggagaagccggaaccccgggcgagcaaggagaccaaggtgccaagggggactctggccgcccaggacgcaggggaccaccaggagatcctggtgacaagggaagcaagggatatcaaggcaacaacggagctcctggaagtccgggagtgaaaggaggcaagggagggcctggcccacgtggaccaaaggagagccgggacgcaggggagatcccggaaccaagggcggcccaggaactgatggtccaaagggggagaagggagaccctggtcctgagggacctcgaggcctggctggagaagttggcagcaaaggagccaagggagacagaggtttgcctggacccagaggcccccagggggctcttggggagctgggaaaacagggatctaggggagaccctggtgatgctggaccccgtggagattcaggacagccaggacccaagggagatcctggaaggcctggattcagctacccaggaccccgaggaacacctggtgaaaaaggagagcccggtccaccaggccctgagggaggccgaggagactttggtctgaaaggagcacctggaaggaagggagacaagggagaaccagctgatcctggtccccctggtgaacctggccctcggggcccaagaggaatcccaggacctgagggagaacccggccctcctggagaccctggtctcacggaatgtgacgtcatgacctatgtgagggaaacctgtgggtgctgcgactgtgagaagcgttgtggtgctctggatgtggtcttcgtcatcgatagctctgagagtatcggctacaccaacttcaccttggagaagaactttgtcatcaatgtggtcaacaggctgggtgccattgccaaggaccccaagtctgagacaggcacacgtgtaggtgtggtgcagtacagccacgaaggcacttttgaagccatccggctagacgacgaacgagtcaactccctgtccagtttcaaggaggctgtcaaaaacctcgagtggattgctggcggcacctggacaccctctgccctcaagtttgcctacaatcagctcatcaaagagagccggcgccagaagactcgggtgtttgcagtggtcatcacagatgggcgccatgacccccgagatgacgacctcaatcttcgggcgctgtgtgatcgagatgtcactgtgacggccattggcattggtgacatgttccatgagacgcatgagagtgagaacctctactccattgcctgtgacaagccacagcaggtgcgcaatatgacacttttctctgacctggtggctgagaagttcatcgatgacatggaagatgtcctttgcccagacccccagatcgtgtgtccagaacttccctgccaaacagagctatatgtggcccagtgcacacagcggcctgtggacattgtcttcctgctggatggctcggaacggttgggtgagcagaacttccacaaggcacggcgcttcgtggaggaggtgtcacggcgcctgactctggcacgaaaggatgacgacccactcaacgcccgcatggccctgttgcagtacggcagccagaatcagcagcaggtggtcttcccactgacctacaacttgaccaccatccatgaggcactggagaggaccgcctacctcaattccttttctcacgtgggtgcaggcatcgtgcatgccatcaacaacgtggttcggggcgcacggggcggggcacggcgccacgcagagctctcctttgtcttcctcaccgatggcgtcacgggcaatgacagcctggaggagtcggtgcactccatgcgcaagcagaacgtggtgcccaccgtggtcgctgtgggcagcgatgtggacatggatgtgcttaccaagatcagcctgggtgacagggcggccatcttccgggagaaagactttgacagtctggcccagcccagcttcttcgacaggttcatccgttggatctgttagcgtgtgcccaccccacccatcccttgtccatctcccctctgtggtgctaatcggaccccagccctgccagtccctgctggactgaacacttgagtcttctgcagagtgaaaacccttctcccgaggtcagaacaggaggactctggacccaaggccccttgccaccttcagctcccttggcgtttcctcctgcttctccatcctacctgaaccttgccctcaagcactggaggaccccagagtccccccactgcctgcttcccacagtctctacccctccacctccctctcctcttcgtgcatcccacattcccttctgaaggctgtctgccggcctgcaccagtcttgcccagggcgctgtccttctctgcccattatttcctatgtcagatcagacctgagagccccgtgtcacacacccaatggcccaataaaggttttgaacct

SEQ ID NO: 727 - DNA, 2641 bp, Cricetulus griseus
gcggcggtggcgcgaggggcgggagcgcgcgcaggagccagaacgccgtggtctccgcgccggccgggtccgcagtcttcgggtattcgggtggcttggggcggggggaggggggcccaggcaggtggggcggcaagcgatgagtcctcggcgcctcctccgcctcccgcgggccccgctctctgcctcccgctccaacgcccgaatgatctgagccgcgagggctccgagagccgggggcccggacccagccccggctccctcccctccttcgcccgggcccggccgccgctgtgggaccccccgtgccccggccgcagtcgccgccgcctccccggccgtccaagggaccccgcccgcccgcggctgctccggatagaggatcaagtcataatgggagcatttttagacaagccaaagatggaaaagcataatgcccaggggcaggggaatgggttgcgatatggcttaagcagcatgcaaggttggcgagttgaaatggaggatgcgcatacggctgtgattggtttgccaagtggacttgagacatggtcattctttgctgtatatgatgggcatgctggttctcaggttgccaaatactgctgtgagcatttgttagatcacatcaccaataaccaggattttaaaggctctgcaggagcaccttctgtggaaaatgtaaagaatgggatcagaacaggttttctggagattgatgaacacatgagagtcatgtcagagaagaaacatggtgcagatagaagtgggtcaacagctgtgggggtcttaatttctccccaacatacttacttcattaactgtggagactcgagaggtttgctttgtagaaacaggaaagttcacttcttcacacaagaccacaaaccaagtaacccgctggaaaaagaacgaattcagaatgcagggggctctgtgatgattcagcgtgtaaatggctctctggctgtgtcaagggcccttggggatttcgattacaaatgtgtccatggaaaaggtcccacagagcagctcgtctcaccagagccagaagtccatgatattgaaaggtctgaagaggacgatcagttcattattcttgcatgtgatggtatctgggatgtcatgggaaacgaagagctctgtgactttgtgagatccagactcgaagtcactgatgaccttgagaaagtttgcaatgaagtagtcgacacctgtttgtataagggaagtcgagacaacatgagtgtgattttgatctgttttcccaatgcacctaaagtctcagcagaagccgtgaagaaggaggcagagctggacaagtacctggaatgcagagtagaagaaatcataaagaagcagggggacggcgtcccagacttagtccacgtgatgcgtacattagccagtgagaacatccccagcctcccaccagggggtgaattggcaagcaagcggaatgtaattgaagccgtttacaatagactgaatccttacaaaaatgatgacactgattctacgtcaactgatgacatgtggtaaaagccgatcatctagccatggattcaccttcgcctccaagagtacagctcaaccttgccgcacctgctcacgtccatcatcgactttgaggaaggggtacggcataggtgagggactacaccagagagcttcagcgctggaacagctagcccagaacggatttctttttttaattgtaaatttgaaacttatgtaaacgtgatttcaaaccgtaattcatgttgtaaatcagactccagcaatttttgttgtatgattttggtttttgtaaagtgtaattgtccttgtacaaagtgctcatatttaattatgaactgctttaaaatcactatcaatgataaaggaaatgtttggcttgttgtgtgacacaacagatatagtcatgctgtgtttggacttggggttgggatagggaaagcagcagccacatagctagatgctcatgtgcacgtgattatgaagaattccaaaatctacaaagctgaacatccagggagttatggaaaactgtctttgtgttctggcaagggactggcttgtcaatgcagccatcccttcttacctgtctctaggatgtcctctccttgcagcccagagtattgcaggtgataccatatattcatgagagtatcaattttgggctaagatgccttgattctttgcacctctttatgagcccttacattcagttactaactggtaagcagcagcttcctacacagtaggagactgccatttttttttcctatcatgattggctgggcctgctgctgttcctagtaagatattctgaattccattttatcaataaagcttggtttaacaaacaagaaatttaatcatgtacgcgtagttcctcttaaccccggctttttaaaatgagtttctttcaggctgcttacttctcagtaagatgtgcatcggcttgaatttacctactgtttaattaaaataattgtcaaagtttggcaatcctaacactatgatagatgtgtgtgtgttgaatgtgtgtttgcctgtaacttttaattgacccacgtctttagaatctaagaggttaagatgtatttgtgatttgaaatatagcatgttgataata

SEQ ID NO: 728 - DNA, 2641 bp, Cricetulus griseus
tactgtctggtccgtggggaggatggagacgtatgggcaaggcttggcagaggaggcagtgatggttgcaaagtgccaatgaagattgattctctcactggccttggagtagttaaagtggaatgtggatctcagttttctgtggctcttaccaaatctggagctgtttatacatggggcaaaggtgattatcaccggctgggccatggatctgatgaccatgttcggaggcctcggcaggtccagggactgcagggaaagaaagtcattgccattgccactggctccctgcactgtgtatgctgcacagaagatggtgaagtttacacatggggtgacaatgatgaggggcaactaggagatggaacaacaaatgctattcagagacctcgattggtagaaccagcaagccagccagcgccggccaagctccctgcacaggtgcccatggagtacaaccacttgcaggagatccccatcattgccctaaggaaccgcctgctgctgctgcatcacatctcagagctcttttgtccctgtatccccatgtttgacctagagggctctcttgatgaaactggactcgggccttcagttgggtttgacactcttcgagggatcttaatatctcagggaaaggaagcagctttccgaaaagtagtgcaagcaactatggttcgagaccgccagcatggtcctgtggtggagctgaaccgcatccaggttaagcgctccagaagtaaaggtgggttagctggccctgatggcaccaagtctgtctttgggcagatgtgtgctaagatgagttccttcagtcctgacagcctactccttcctcaccgagtctggaaagtcaagtttgttggtgaatctgtggatgactgtgggggtggctacagcgagtccatagcagagatttgtgaggagctacaaaatggactcactcctcttctgattgtaactccgaatggcagggacgagtctggtgccaacagagactgttacctgttgaaccctgccacccgggcacctgtgcactgcagcatgttccgcttcctgggggtgttactgggcattgctatccgaactgggagtcctctgagcctgaatctcgctgagcctgtgtggaagcagctggctgggatgagcctgaccatcgcagacctcagtgaggttgataaagattttattcctgggctcatgtacattcgtgacaatgaagccacttcagaggagtttgaggccatgagcctgcctttcacagtgccaagtgccagcggtcaggacatccagctaagctccaagcacacacacatcaccctggacaaccgtgcagagtatgtccggctggcaataaactacagactccatgaatttgatgagcaagtggctgctgtccgggaggggatggcccgagtcgtacctgtaccccttctctctcttttcactggatacgagctggagacaatggtatgtgggagcccagacatcccactgcatcttttaaagtcagtggcaacgtataaagggattgaaccttctgcatccttggtccagtggttctgggaggtgatggagtctttctccaacacggaacgctccctcttccttcgctttgtgtggggtcggacaaggctgcccaggaccattgctgacttccggggtagagactttgtcatccaggtcctggataaatacaaccctcctgaccacttccttcctgagtcctacacatgtttctttctgctaaagttgcccaggtattcctgtaagcaggtgcttgaggaaaagctgaaatatgccatccacttctgcaagtccatagacacagatgactatgctcgcatagctctcacaggagagccagctgccgatgacagcagtgaggactcagataatgaggatgcagactcttttgcttcagactctacccaagattacttgacaggacactaagatggaaatgccatcaagaagaaacatagttgaacaattagcaagagtactgctgtgtaaattgtaaatgtcaagtgcatttgatgaggaataccctgcattgaaatgtgtggaagagagcgcctggctgtctgtgctgacatactgtgtggtaggatgactgaagatcagcctgtgcatgaggaacactatggggcgcttcttccccataatgctgcattacctataggacccagtgtttactacagtgtaaatgtttatatggacacagaacagcatcacaaaaaaaaagcctttttacttgtgggtgcaatgattccccctttttcctttgcagtatcattctgattgtatattgaaaatactgtgtaatgatgaaatcatattataaatatttcaactaattttaccctgagtttgtttattaaaagctttttgaacattaaattattatttcttggatgcatttagaagttagaacagaaaacaaaaatgccattcattccccctttccctaggtgtaccattttagcatatgcattatgtgattggaattgaggcattttggtggacagtatgataatttttatcatggaaagtgtactatatttaatgcttgtgtcatgtatatgccaaaattttaacccctataaataaaacatgtgtcacaaaaaaaaaaaaaaaa

SEQ ID NO: 729 - DNA, 2640 bp, Cricetulus griseus
  modified_base (1454)..(1454): a, c, t, g, unknown or other
ggagtaattcattgcagaataccaatatcccacattcagcatttatttctccaaaagataatcaaatgggaaagacgttgaggaagtaagttgtgtagaaacacaggacaatcgtcacacctcagaaggagaggcacggaactgtcaggaagcgtctgtccgacaggactcttcagtttcagacaaacagcggcaaaccatcatcatcgcagactctccgagtcctgccgtgagtgtgatcaccattagtagtgacaccgatgacgaagagacctcacccagacattcactcagagagtgtaaaggtagtctggattgtgaagcttgccaaagcactttgaatattgatcggatgtgttcactcagcagtcctgatagcactctgagcaccagttcctcggggcggtccagcccatccccttgcaagagacccaacagtatgtcagatgatgaacaggaaagtgggtgtgagactgtggatggctctccaacatcagactcctcgggacatgacagtccatttgcagagagcagttttgtggaggatactcaccaaaacacagagctggggacttgtgctggcacagaagccaagccagctgttggcactgctgtggagccaccaggtgggaatagaaagtggattgaatgtcgatgagcacatggcaaaacacagattctacatcagcagcatttgaacttcagccaggttcagcattttggaactgggcatcaagagtggaatggaaacttcgggcatcgaagacaacaagcatatattcctactagtgttaccagtaacccattcactctttctcatggaagtcctaaccacacagcagtacatgcccatctggctggaaatacgcaccttggaggacagcctactctacttccatacccatcatcagctaccctcagtagtgctgcaccagtggcccacctcttagcctctccgtgtacctcaagacctatgttacagcatccaacttacaatatctcccatcccagtggcatagttcaccaagtcccagtgggcataaatccccgtctgttaccatccccaaccattcatcagactcaatacaaaccaattttccctccacattcttacattgcagcatcacctgcatatactggatttccattgagtccaacaaaactcagccagtatccatatatgtgaaaactcaaaaacagtatattgaggaagctcaatgatacaaacgtttgaattaaaaaataaaaacaatggtaatttaaataaataattattactattgaagcttgaaaagatgtgagttctttgtgtgcaatttttcatttatgtgagaaggtttttggttttggttattttaagtatttttacattgtagtactcgtttttgcttgttggtggtagtttagacttatttaatacattccgtcagggacagaaattacatgctttttcncttaggaagtgtgtattgggtttttccctccccctccccttggtggtgatggtggtgatgtttaaaatgaagttgcttttacagcaccaaaagacttaaatcatccatttcttatataaaaaaggtagctactttttgcatagacctcaagtatattgtagtgtagaggtggaatttaaggaaaggtattaaaaccaaaggctgtgttttagcttccaggcaaagtaataaaattgtatcatttatcttgaatgtatcatagataagctgctatataacgattgccacttcagatagctgtgaaattaggtgattaactagttgttatttagccttctaatttctgtataagtctaattacacgagatagaagctggggttttgattttttactttgcttttctgtttggagtgtcattgtaactactgtattgtaaatgatggaaacaattgcctatgttattttggggtgtgttatttgcatcagtattttatctctattaatgtttgtgctcatcactgcatataaaaacttggatgtatcaatgtaacttaattttttattttctatactggcattgtagacacttgagaaagctgtatcttgcaggcttgacttaacttttttccttaaaagtctggaatataatcttactagcatttactggaataaacgatatttaggttttttcttcagggtattaatatgttactctattagcaaaaccttttcattttaatatctctactgctaatttttaacttggcttgtgttctgtaaaagttaaatcatacactgcaaggtgtaggaagattcattttaatgatccctttataaatccaatgacttagtttgaactgttaactgttgaacagttttactcttgtggcttttctctttggtttgtttttgcttttacttcgatgctacactagtttgccatgtagcaattgcactgtgcaatattacaataaggactgggaaaatttttatggatgtaatgtctattacagtttgcgatagtatttctctctagttctcagtgatttaaatgtgaccaagccttctgtaacttttgtcaacaaaaaagcgggttttccaggtgactatttggtgagtgtcaaaaataagaatttatggtgtattactgttgattcactttagaattaaaaatatatatattgc

SEQ ID NO: 730 - DNA, 2639 bp, Cricetulus griseus
gccctgaggagatcagtagcatccctcggaggccacaacaggaggggtaagttatgggtcctccacacccccatctggagaggggtcagctgggcctgtcgctgaacgaccactggagaggcagctgaaactggatgaagaacctcctggccaaagcagtgggtcttgttcagccatggagaaaagaggccgcaggaccccacagctggctgaggaagctgccgccaaagccatcagtgacctagctgtgcgtagggctcgtcaccggctgctctctggggactctatagagaagcgcaccactcgccccgtcaacaaagtaatcaagtctgcttcggctacagccctttcccttctcattccttcagaacaccacacctgctcaccattggccagccccatgtccccacattcccagtcatctaatccatcctccagggactcttctccaagcagagacttgccagcccttggcagcttgaggcctcccatcatcatccaccgagctggcaagaagtatggcttcaccctgagggccattcgtgtctacatgggtgactcagatgtctacactgtacaccacatggtgtggcatgtggaggatggtggtccagccagtgaggcggggcttcgtcagggtgacctcatcacccatgtcaatggtgagcctgtgcatgggctggtccatacagaagtggtggagctggtcctgaagagtggaaacaaggtatcgatatcaacaacacccttagagaatacatccatcaaagtgggcccagctcggaaaggcagctacaaagccaagatggcccgaaggagcaaacggaaccggggcaaggatgggcaagaaagcagaaaaagaagctccctgttccggaagatcaccaagcaggcctccttgctacacaccagccgaagcctttcttcccttaaccgctccttgtcatcaggagagagtggtccaggctctcccacacacagccacagcctctctcctcgatctcctcctcagggctaccgggtagcccctgatgctatgcactcagtgggagggaattcatcacagagcagctctcccagctccagtgtgcccagttcccctgcgggctctggacatacacggcccagctctctacatggtctggcacccaagctccaacgccaataccgctctccacgacgcaagtcagcaggcagcatcccactgtcaccactggcccacaccccttctccaccagcagcagcagcctctcctcagcgctccccatcacctctgtctggacacggagcccaggcctttcctaacaaacttcacctgtctcctccactaggtaggcagctctcacggcccaagagtgcagagccaccccgctctccactgcttaagagggtgcagtctgctgaaaagctagctgctgcactggcagcttctgagaagaagttaaccccttcccgcaaacatagtcttgacctgccccatggtgagctaaagaaggaactgccacccagggaagccagccctctggaggtggttggacccagaagtgtgctatctgggaaagggccacttccaggaaaaggagtgctgcagcctgctccttctcgggcccttgggaccctccggcaggatcgagctgaacgccgagagtcactgcaaaaacaagaggctatccgggaagtagactcctcagaagacgacactgatgaggagcctgagaagagccaggccacacaagagccaagattggccccccaaccagaagctggccagaatctacccactaaaggttcaggagagggaagggaagaggacactttcttgaatagggatctaaagaaccagggtcctgtactctcaggcctattgacaggggtcatactaggttccccccaaatagaagttcctggactttcccagaggagggtctggagatcacaaacctttgaggaagctaccagttccttccaagcccccagcctgagtacgtctaggcccacaagtccagccccctctgaaggctgctgggaggtccagcacctccacgcacaggcaccagctgcactttgtcccagctcttcagaactttgccctaccagttgctctgctgccacctccacctctggaaagccaggaacgtggtcctggaaattccttattgaaggtccagacagggcatccccaaacaagaagataacaaggacagttgagccagctaacacccaagatttggaaaccacagttccaattcttccaaagaacctgtctcatgagcaggagaagccacagtcacctggtgtccctgggctaacctatccacttggtgaggtctccaggcaaaactggctatgggagtctgaatgtgaacaattgaagaaagaagagccggccctgagcatcatggaagtgcctgatgtgtcaggtgacaagaggcaggacattgcatgccgagcctgccccctcagcccagaaaccgggcccagcctgccctggagaagccaagaacctgggggccaacaacagcatcaggacttggcactggcatcagatgagcttttaaagcaaacatagcagttgggtttgcactcacctgtgtaatacaccctcctagaaatacaaaaaaaaaaaaaaaaaaaaaaaa

SEQ ID NO: 731 - DNA, 2639 bp, Cricetulus griseus
gcggggcggggcgcggcgggcggcgcggcccctttaaggcttggcctacgtggcagccgctagagccgccgcggcacagcaaggccggccgccgggcacttcctgtggaggccgcagcaggcgcgagcgccgaggaccagccagctgagcccgccgccgccgccgccatgggccagaacgacctgatgggcacggccgaggacttcgccgaccagttccttcgagtcaccaagcagtacctgcctcatgtggcacgcctctgcctgattagtaccttcttggaggatggcatccgcatgtggtttcagtggagtgagcaacgtgactatattgacactacctggagctgtggctacctgttggcctcatcctttgtgttcctcaacctcctgggacagttgactggctgtgttttggtgctgagcaggaacttcgtgcaatatgcctgctttgggctgtttggaatcatcgcactgcagacaattgcctacagcattttgtgggacttgaagtttctgatgaggaacctggctttgggaggaggtttgctgctgctcttggcagagtcccgctcagaagggaagagcatgtttgctggtgttcccaccatgcgtgagagctcccctaagcagtacatgcaacttggaggaagggtcctgctggtcctgatgttcatgaccctccttcactttgatgccagcttcttttccatcgtccagaacattgtgggcacagctctgatgatcctagtagccattggttttaaaaccaagttggcagctttgactcttgtcgtctggctgtttgccatcaacgtgtatttcaacgccttctggacaatcccggtctataaacccatgcatgacttcctgaaatatgacttcttccagaccatgtcagtgattggaggcctgctcctggtggtggctcttggcccagggggtgtctccatggatgagaagaagaaagagtggtaacagacagatccctcccctccctggctgaggcacaaggactggttcagggtagagtcaacaaactgccagagtttatgtgtccgcttcccttcccttcccttggtaaaggcacagatgttttgagaactttatttgcagacacctgaaaattgaaggtaaaatctgctttggaaacagtctggagtctgactgtcccggtctggccagctgggtggtcattccttagccaaggctttgagtagacagtggtaggctatggcctcagtcctcctgtctttgagtttcttttgggggcttcaagttgtactgagctgtactttatcattcaaaccaatttcccctttagttttaagtttacatccttagcccaaactacaaacttctaaatgacttaggacggtccagccaaacaccagttaaaacctccagttcagaatcctaccagtggccccagtattgcttctgcccctgtattttataggatcagtggagatgttagagaaacctcaagcctagagaacagtacagtattggagatgtggctgctactgctggcccaagtaattgatgccagctggctgaatgctgtttactgggtgaaaggtaccctgtgaattttcatggctctaagcagggatggaatggggtcagggtggggaagttcttggaaagctgctgatcctctcaggcttggtggtgggaagggcaggagagcaagctgctcatgggatggcccaccaaccaccaaggaaccagcctggggagtagtaatgccatggggcccagaagtgaggagccccagtactgaagacacccaggctcaacccagttacctcacacttgaccttctcagagcaggcctggaccccacaggcaatgctccccccagcttaactccctgtttcaggctgagttttccccatcaacagccccgacgccaccatttccctgaggctgttgcttgctcagttttttgtcaacttgctctgctgggtgcagctaggatactttttacaatttgtgatgccttaccaatttgatctcagtcctgtatttaaagttttctaacattgccttacaccgtgtttctctttttgggggtgggggggatgtctaatgttgtggtcctgctaatcttcatggtagtgccacgagggtaattgggctcctcctggaccttccccaggtctattggagggaataggtaggcaggcttagaacccctggaggggagctggcagctcgtttcacccttgggtgcagagtcctggaggtcctcctttctggcatcagctgggtaggcaggactgtgtcctccgagtcaccttgggtcaatcctgcctcttccccttgcctctctggctctgaatccacttctcaacacccagtccatgttctgcagccttatggcctgcctattcctccccatgtgcgttccagcattggctcaggccatgactatttccttatgtgggctatgcctgggatgggaggaaaaaaaatggtctacacattggtttggcaaaatggtttctgaaaatgctttagctttatgtgggaataggtataaacctcatttttatgctgtattttatatcttagttgtgtttgaaaaatgttttgatctttgaaaacatcaaaataaataatggcatttgtggt

SEQ ID NO: 732 - DNA, 2639 bp, Cricetulus griseus
ggctttcaaagtccttttatcactgtgatcatattctgaggggaaaatgttatcattgcttgaggcaagatgttgaacatagcgaaaccaattcccagataaaaaggtcaaaataacctttagtgtttagtcaagaagagattgtgactgttgatgctgaagcagctgctttctgttaatgtcttatctcaaacctagaataaatttgaagactatttggtcttaaaccaaagtaactgtaggatgaatgacatgttacatagtcagtttcatgcatttaaaaaaacaaggggaaaagagcttacagtacagtaagtttagtattttgtaatacaaatttgagttttttctgtaattatcatgatttcatcaatgtaagtaaccataagggtttgttgttacagttgtgttgtgtcacctgcttaataagctctagtgttatgatcaggtacttttggggcctttgtttttgttctttccatttctaatcctttgagatctgctttatggaaatccaggggaccaatgcattttatcactaaaactatttttatataattttaagaacataccaaaagttgtctgagttgaagttgtaatacaatttcttactttcatacaaggaaatgggtttttctgaagaagcttctcatcacatcagaggctgaagaatcatgttgttcttgcctaagtagataaaatgtgctattgatgaatcagggaacttttgtaaagttggaattttgttctcaattgagtttacatgtttatagctgattttttgtccagggatactttgataatccccaagtggccaatatgaatatgaaaataacttaagagctgagataggtcatggttactatggctatgactacagatacatctgattagaaaaatacttttatgttattttgtaatatagtctattgtttatattgcccatcaaaaataccctccccctttccaagatgtagtttggctaatacatatcttctgacaaatgatacatcatcttgtcaataccctggctgagagagcatgaagtaagtatgtattactgaggcatagacaacatgggcccctaatattttcaactatgttgctcctagtctgcctttctgctgacctgtggcccagagacttttgtctcccacccaacctccagcctttggactgcagagctgcttttgagacctaaactgaagtggttggtggaggctatgtgacatttttccatttccttgagtcattgggtatcacagggagtggtctgcaaatatggggcctgggatgcccctactgataggtctgctttgatgttagctctgaatagagagtagggtgacagctagatggcagcaggagttgcctcagaaacagtgaccggctgtgttcctagtagaacagtaaggcctgaggagttgagcctgtaatccttctactacagtagtactcaagaagtgccttgaggcccggtgtggtgccatggccatcaagaattccagactttggttctcactacagatttaagtggtcacttgactactttgcagtccatacacatttgaccctttccccattgtcagaaacataaaaccaatgacaagcattaacatgcacatcaaaatctacccagtagacactgaaaaagtttttgttttcactccatgcactgaaagaatgattgtaaatcattctctgttctttggtcatgggagagttctggctccacatgtggagattccagatgttgttatgtttcagttcagcagaacatgtcagtgtgttgagattctgaagaatagttccagatggcagtgcagcttcatgtgttggatgttgaaatttctgtgggctctctctaggaaaactgagggctatcagtacaatatttttcaatcctgttatgcactcaaaatatggtcagtaacattcaacctctttcttgaaacttaaaatgtttttttttcaacgagatttgtgagttgaatatcatgaactgtgttttgataatccctttttcacattgtgccaatggaatggagtatttgatatttctttatatgtcaaggagatgcttcaaaatgtcatttgctttaaacttaaattacctctcaagagaccaaggtacatttacctcattgtgtatataatgcttaatatttgtcagcatcctccaggtttgcagttttatttctataaagtgtgagttttatgttgctaagttactcagatggtactgtattgtttatatttgtaccccaaataacatcatctatactttgttttctgtattttattgaatttgtgcaaaaatcttttgactctgttggcgtgagctctgcgctttcagatatgtacagatgtccatagaaattttcatttaagttgaacgattttgaaaagcctgtgaagaagagaaccataaactgcgtttccccataagtttttaaaattgtacatggtatgtgtagtaatattccagatgaactgtaaatagaaactagggagatgcttaagttacgtcctaacactacagtagaaaacagaagcaatgcaaataaactactttttcccaccaaaaaaaaaaaaaaaaaaaaaaaaaaaaaaaaaaaaaaaaaaaaaaaaaaaaaaaa

SEQ ID NO: 733 - DNA, 2639 bp, Cricetulus griseus
cgggatgctaaagcgtggcaggggccggcccgggaagcggaggaggcgggtctccatagaaacctccacctgtttccggccaggctgggtgaaattaggggctgttgcgggggccaatctcagccagctcgcttcttcccggcggcccctgcgggagcggtgggtgttgtacacaatcatcatggcggcggccggagccccggatggcatggacacggaggccgaggctgtgaccaccgaggcgcccgcacggcccctcaactgcgtggaggacgaagcagcagcggcagcggcggcggcggcggcgacggcggccgaggactcctgcgacgcgcgaggcagcctgcagccggccccggcccagccccctggggaccctgtggctcaggcctcggtcagcaacggcgaggatgcgggcggcggtgcgggcagggagctggtggatctgaagataatttggaacaagactaagcacgacgtgaaggtccctttggacagcacgggttccgagctaaagcagaagattcactccattacaggtctcccacctgccatgcagaaggtcatgtataagggacttgttcctgaagataaaacgttgagagaaataaaagtgaccagtggagccaagatcatggtggttggctctactataaatgatgttttagcagtaaacacccccaaagatgctgcccagcaggatgcaaaggctgaagaaaacaagaaggagcccctctgcaggcagaagcaacacaggaaagttttggacaaaggaaaacctgaagatgtgatgccatctgttaagggtgcccaggagcgtctgccaacggtacccttgtctggcatgtataataagtctggagggaaagtgagactcacttttaagctagagcaagaccagctgtggatcggcactaaagagcggactgagaaactccccatggggtccattaaaaacgtggtcagtgaacctatagaaggacatgaagactaccacatgatggcgtttcagttgggccccacggaagcctcttactactgggtgtactgggttccaactcaatatgtggatgcaatcaaagacactgtgctgggcaagtggcagtatttttgaaagcactttcacctctggcccaggagactgatccaaagtgaaggacattgccgggagaggtctgcagcatccctggattgcagagttctgggactttgttcacacacaaaaaaatctactattcaatctgaggtgatgtggtgactgaagccagaggtgatgtactttcaccgttagcttaatttgaacttaaaatcaccggttccctttcttgcagtcagcttaccattttaaaagtcagtatggtggaaattaataaatccaagtttcgaacatgctttttttttttttcttttcctttcgttttatttaattttttggatccctggtctggggagttccgctgttggttttggtttgttcagccttcttttgagctggactttgaagctctgtctatcaccacagcctgggacttgctgctccaaggccccctgctctgaggagctggcttgccatatggcctcagatcacattatttctttacttgggaagtttcccagaactccttaagtagtccagtggttgtttgaattatgcttctccatttggtctttctgctcatgcgttcagttcaagtgtcctttatcccaggttcggagatgctgcctttctcatagaagaccaggcagcgccagaagccctgggaataagtgttcagatctgtctgggtcacagcagtatttgctattttgtcactcagtcccttgagcagtctttatatatttcttaccatgtggagtatactgattaaatctatgtgagcaaattgaaattctcttcccattaggtagcatcacagtgttttttcctcaggattatttctgtacaattccttcactgtcaaatgagagggcatgcaggctcctaggcttgtcatcatgtagccaccgaaagggctgttctcccatctacaggtggtactggtggcccttctgtagggctgccctcacagacaccatgctttccttttcctctctgaggtgactgggcagaaaaatgtgatcacaaaactgctgctgagcctgggtccctcagctcagagtactcagactcaagagctgcaggactttggtgagtattttaattcatggtgggctttgcggatagctttggctcctcaattaggtttgactgggcaaggatgcactttctttcacaacatcatgtggacatagttggggcctggtaaagtcctaagtagctccttaattgctgctttcccttaagagggccaaagaaattaactttgctacattgccacgtctcagaaaagttgccatatctcacccagaagggaatttttcctttttaatgtgcctggaggagcattgtgagctcttggagttggcctgcccttttctttgccaggagctaagaagggaagggatagatagataaatgccaaggtcaggtttctttccacccatctgccttttttttttaattttgtgtaatcttgactagctgtcttattgtttattcctgtaagattagtctatcaattaaagtttagtataattaa

SEQ ID NO: 734 - DNA, 2638 bp, Cricetulus griseus
tgtgaggaaatgactatactgcatgggggctttttgatggctgagcagctgttccaccccaaagccctggaacagttgacaaagtctgactggggaacatgtggggcggcctattgtggacgccttgaaggagatctcctcagccacagcacattcccagcccatttgcctggaagaagaaagcactgatcatcatctgggcgaaggttcttcagccctctcctgtcagcccctcctgatactgatactcggtggcaggaagatgtgttcttctccgtgggcaacatgactccctaccatcaacccacacagtccttttgagctgctgtcaggggacaaattatgacacctaccggctgtgtgacagtctgacttccttcagccagaacttgaagctctacctggaaactgccagcatgtccaaggaggagaggcaggtggtctgtgaactggctgagtgtgttagggacttcctaagaaaaaccagcagagtgcttaatgacaggggccttgaggacatcactgcctccattgccatggccatcattgagcagaagatggaccggtatatggaaatgtgctacatttttgcttctgagaagaagtgggcctttcagatgagtgggttgcctgccttgttaacaacaggtctctcttcagagaaccagacttgatcttgagtttgctggaaacggtgatggaagtcatcaactctaaaaaggctatccccaagcctcatatcaagcaggtgatctgcttgaccctggaatgctatgcagacctctccctaccagacaaaataaagtcctttctggagtcctgcattgttgggggccaaagggcctctcggacaggttgtctgtttacttggagggttttcaggaagacctcaacacaacgtttaaccagcttgcacagagcacctctgaacagggtctggctaaagcagtgacctctgtggcccgcctggtgatcctgtacccagaagttgtggtgaagaagatgtgcagcatagctgtgaccaatcttggcactcacaggttcctggctcagattcttactgccttccctgccctgaagttcacagaaacacaagggccaaagccatataccagtttcatggtgtcctgcctcaaagaaactgtctggacaaagttctctacacccaaagaagagaagcagtttctggagctggtgagctgcctaatgaaccccgtgaaaccacaggggattccagttgctgctcttttggagcctgatgaggtactgaaggagtttgtcttgccattcttgatgctagacatggaggaggtgggcctgagtctgaagctcttcctccagacccttgaagccaatgcgggcttggaggagtattggctgcaaacctgctccccattcccgctgctcttcagcttgtgccggctcctggacagcttcagcaagttctggcagctcccccgggagaagcgctgtctcactctggacagcaaggatcttgtgacccacatcctggagctcctctgtgagatcgtgctggctaatgcagagaccttctccccagacacctgggccaagtccctgtcctggctccaccgcaagttagaccagctagactggactgtgggcctgagactgaagaacttctttgaaggacacttcaagtgtgaggtgccggctaccctttttgagatatgtaagctctctgaggcccagtggacctcacaggcccatgaagggtatgggcctggcacagggcttctcgcctggatggagtgctgctccatttcccgcagtgtctctgaagagatgctttccctcttggtggtggatgtgggcaatcctgaggaagtcagattgtttagcaagggctttctggtggccctggtacaagtcatgccttggtgtagtcctcaggaatggcagtaccttcaacagctgaccaggaagctgttggagaaacagctccttcatgtcccttatagcctagagtatattcagtttgttcccttgctcaacctgaggccctttgcccaggagctccaactctctgttctttccttgagagctttccagtttctctgcagccagagctgttgtaactggcttcctatggatggttggagccatgtggtcaaactcctctgtagcagtttgaccagtatcctggatgcagtcaggttgatacagtcggtgggcccctgggcccagggacaagaaggaaacctgactcaggaaaccttgtttgtgtatacccagatgttctgtcatgttctgcatatcatggccatgctcccccaggaggtctgcgagcccctgtatgtgctggccttggaaatccttacctactatgaaaccctaatcaagaccaacccttctgtcagctccttgctccagaaggttgatgagcagcgctttctaaagtctattgctaagaatcttagccctgaggagaggcgccaaaccctgctacagaagatcaacaacttctgacgtgtggaggactggaaaaaagctatccctccaacatggtgtttgttcttcagagcctagagctgagaacaaactacaagagcactgtaaagaaaatagtttcttaggtatttgtcacatactactacaataaaactcttttgggttt

SEQ ID NO: 735 - DNA, 2638 bp, Cricetulus griseus
cgcggcggaggcggaggcggagcgcggccatggcggggaccctaactgctagtggtggaattgtaacttgtcacccggaaccccatgcagccagaacccaggcctagcggggctccccgcagcagccagttcctgcccctgtcgtcaaagtgccccgagggggccggggacgcggtgatgtacgcctccacggagtgcaaggccgaggtgacgccctcccaggacggcaaccgcaccttcagctacacgctagaggaccacaccaagcaggcttttggcatcatgaatgagcttcggctgagccagcagctctgtgatgtgaccctgcaggtcaaatacgaggacatcccagctgcccaattcatggctcacaaggtggtgctggcctcttccagccctgtctttaaggccatgttcaccaatgggcttcgggagcagggaatggaggtggtgtccattgaaggtatccaccctaaggtcatggagaggcttattgagttcgcctacacggcctccatctccgtgggcgagaagtgtgtgctgcacgtgatgaatggtgcagtcatgtatcagattgacagtgtggtccgagcctgcagcgacttcctcgtgcagcagctggaccctagcaatgccattggcattgccaacttcgctgagcagattggctgcactgagcttcaccagcgtgcccgggagtatatctacatgcactttggggaggtggccaagcaggaggagttcttcaacctgtcgcactgccagctggccacgctcatcagccgcgatgacctgaacgtgcgctgcgagtcggaagtgttccacgcgtgcatcgactgggtcaagtatgactgccctcagcggcgcttctacgtgcaggcactactgcgggccgtgcgctgccacgcgctcacgccgcgcttcctgcaaacacaactgcagaagtgcgagatcctgcaggccgacgcgcgctgcaaagactacctggtgcagatattccaggagctcacgctgcacaagcccacgcagtccgtgccctgccgtgcgcccaaggtgggccgcctcatctacacagcgggcggctacttccgacagtcgctcagctacctggaggcttacaaccctagcgatggctcctggctgcgcctggccgacctgcaggtgccgcgcagcggactggcaggctgcgtggtgggcgggctgctctacgctgtgggtggccgcaacaattcgcccgatggcaataccgactccaacgccctggactgctacaatcccatgaccaaccagtggtctccctgtgcctctatgagcgtgccgcgcaaccgcatcggggtaggggtcatagacggccacatctacgcagtcgggggttcccatggctgcatccaccacagcagcgtggagagatacgagccagatcgggatgagtggcacctagtggcaccaatgttgactcggaggattggcgtgggcgtggctgtcctcaaccgcttgctgtatgcagtggggggcttcgatggcactaaccgactgaactcagcggagtgttactatcctgagaggaatgagtggcggatgattacagcgatgaacaccatccgcagtggggctggggtctgtgtgctgtacaactgtatctatgcagcagggggctacgatgggcaggaccagctgaacagcgtggagcgctacgatgtggagacggagacctggacttttgtagcccccatgaagcatcggcggagtgcacttgggattactgtgcaccagggcaggatctatgtcctcggaggctatgatggccacacatttctggacagtgtggaatgctatgacccagacactgacacctggagtgaggtgacccgtatgacatctggccgcagtggggtgggtgttgccgtcaccatggaaccctgtcggaagcaaattgatcaacagaagtgtacctgctgaagcacttgggttacccgaccactgacaagggaaaggcaaagcaggggacacatattttctttgatccctgcaacttggtgatcaattctaggggaagaagaggccaggtgaggccaaggggctgaggctccctcaggagctgtgattccccaggaacaagcctctccagagagcactggcatctaagccctggatagttattttgttaagcaaccctttaactttcccatggaaattaaaacagattagtgtcttgcacacaggtcctcagagagcatttggaatccctcagggagagacagctcttctattgaaacactctcagatcttgattggggctggtatttgaagcccgtctgtcttctctgcttaccattgtccattctgcttatatagggcatcttgcaccctcttgggccacacagtcgtcttgtcagttttaggtgcattagaagccaatgacctaatttctgtgccacttctccggggcctcctgtgttttgcttgatttgagacagggtctcatgtagcccaggatggccttcagttgagaccctgaactgatcctccctcgagtctcagcctcctgagtactgggattacaattgtataccaccaaacctggttcctgcttgtccttttgtacccaagcagcaaaataaagatttctgggaccttg

SEQ ID NO: 736 - DNA, 2637 bp, Cricetulus griseus
ccttaccatattccacgctgaggcttcaccatcacgcagctcgaaagcaacatcccgtcctccttccttcatcccaactgggcttcccacagggctaattggatcaaggccgttcagatgtgtagtaaacccagagagtttgcattggctcttgcaattttggagtgtgcagttaagccagttgtgatgctgccaatatggcgggagtctttaggacacaccagattacacagaatgacatcaattgaaactccaggctccccaaaagcaagcaacaaaaccctttagaaaccaactccagctgaaagagaagaaaatcaaagaatgattgtgtgtaaccaggtgatgaagtacattctggataagatagataaagaagaaaaacaggcggcaaagaaacgcaaacgcgaagagagtgtggagcagaagcggagcaagcagaatgccagcaagctctctgctctgctcttcaaacacaaggagcagctcaaagcccgagatcctggaaaaaagagggccctcctggacaaggagctgcagatccaggtgcaggaagagctgaagagagacctgaaaatgaagagagagagagacatggcacagttggtacaggtcagtgctgctgcagtgtccacaccctcagtgccagcgccagttccagccccaccagcagcagcctctccagccccacctcctccttcacctcccttggcacacagtgtgccatctgcgggccaccccacaaccccactgcctgtcgcttcccagaagaggaagcgggaggaggagaaggactccaaatccaagaaaaagaagatgatctccacgacctccaaggaggccaagaaagacacccggctgtactgtatctgcaagacgccctacgacgagtccaaattttatattggctgcgatcgatgtcagaattggtaccacgggcgctgtgttggcatcttgcaaagtgaggcagagctcattgatgagtatgtctgtccacagtgccagtcgacagaagatgccatgacggtgctcacaccactgacagagaaagactatgagggcttgaagagggtgctacgctccttacaggcccataagatggcttggcctttccttgagccggtagaccccaatgatgcaccagactattacggtgttattaaagagccaatggaccttgccaccatggaagagagaatacaaaaacggtattatgaaaagctgacagagttcgtggcagatatgaccaaaatttttgataactgccgttactacaatcccagtgactcccccttttaccaatgtgcagaagttcttgagtcattctttgtacagaaactgaaaggattcaaggctagcaggtctcataacaacaagctgcagtctacagctccttagagctcagcgtgtcacctaatcgagacacagcgagaggctggtggcctgaactatttaagttacagccacatgttttcagtcaggctatcctgacaaggcttgaccataacctcgttcctattggtcacaacagtccaattgtattcttggccaattttgtccaacggacaaaggaaaagcaaagtcaacggcaccattgtcttgtcaagagcaaatggctttactattgtggcagaagcaggaaacttttgtttattgaaaaaaaaaaaaaaaaaaagaaaaagcaagaaaaaaaaaaaaagatactatggggtcaagtgtaactccgtggaaatgccacgtctgctcttcagtgaagaagctgtttagagtctcacagaaaactttttgactgtatttatttattgttgcaaaaaaaaaagacgcttttttattgctgccctcattcgtcagctaattattttttcttataaaatccagccctggttacgtgtatccatcctataccttatcatgattcctgtaggtgaagtacaaggcgacctctagatgtcttttctttctatgaaaggagctgctatgtacacatgtgcacacacaactgggaatcaacaatgagtttattggtcatggtagacacagatgaagcttgcaggaaggctgggataagtaagtggtcctggactacagacttcgttgccttgaatacaccagtacaaattgtcatttactctgcaccaggctaaatgagcaaaatctatttgaaggtatcttgtttgtaaacatttgtcagatttcttaatttttttctttttgtatgaaaattcaactatggatgtatattgaatcgaaataaatggagattcgcagatgttcctagactttgcactagtacatattagccttgtcctgctgaatctagaatctacctagtttttgttttttcaagtcttctctgtttgtttggtgtagccctgcctatgcaaagccttccccagcccgtagtttcttaaaaggaaactgtggcaacagttggcagttctctcttctccaggctcaggtgtacaggttcctctgggctcacatgctctgctggagcccactccctctgtacataaagatgtcactttagcctatgcttacagctaaagggactaataaagtaatgtttttgacattggattctgtgcagtttctaatgaaaacaatggttggttggttcgttgtttgatatatttt

SEQ ID NO: 737 - DNA, 2637 bp, Cricetulus griseus
ggtctcgctgcgtgtcccgggcgttcagccgctcgctttctgccttccagaaggggaactgccctctagggagacgttccctgcctggggtctccttatgtcagggatcaggctaccctgacagcaggaagatggtcattaacaacagtagtgtcttcagtgttcgcttcttccaaaccacggctgtgtgcaagaatgaagtgattacagttcaaaccccagcatttgcagaatcagttacagagggagatgtcaggtgggagaaagctgttggagatacagttgcagaagatgaagtagtttgtgagattgaaactgacaagacttctgtgcaggttccatcaccagcaaatggcatcattgaagctcttttggtacctgatgggggcaaagttgaaggaggaactcctcttttcacactcaggaaaactggtgctgctcccgctaaagccaaaccggcggaagctcctgctgcagccccaaaagcagagctggaagcaccggcaatgcctcctccccccgtagcagctatacccactcagatgccaccagtgccctcaccctcacaacttccttctagcaaaccagtttctgcaataaaacccacggctgcccctccactggctgagccaggagctgctaaaggtgtgcgttcagaacatcgggagaaaatgaacaggatgcggcagcgcattgcccagcgtctgaaggaagcccagaatacatgtgcaatgctgactacttttaatgaagtcgacatgagcaatatccaagagatgagaactcggcacaaagatgctttcctgaagaaacataacctcaaactaggcttcatgtcagcgtttgtgaaggcctctgccttcgccttgcaggagcagcctgttgtaaatgcagtgattgatgatgcaaccaaagaagtggtgtacagagattatattgacatcagtgttgcggttgctaccccaaggggtctcgtggttcctgtcatcaggaatgtggaaacgatgaattatgcagatattgagcggaccatcagtgaactaggagagaaggcccgaaagaacgaacttgccattgaagatatggacggtggtactttcaccattagcaatggaggagtttttgggtcactttttggaacacccattatcaacccccctcagtctgccattctgggcatgcatggcatctttgacaggcctgtggctgtgggaggcaaggtggaagttcgacctatgatgtatgtagccctgacctatgaccaccggctgattgatggcagagaggctgtgactttcctccgaaaaatcaaggcagcggtagaagatccaagagtcctcctcctagacctttaggaggaagccacacactctacctattgatcatgcaggaactgaaaaccagtcttctccctgtcccctcaccagtcccaggttagcctgataacaggcaggcacatactgttggcctcaagcaaggaagccagagcactatgtaaccagccttcccaggtcttagtgttctttctaggctctttctctctctgtgtgtcactctcttgccttctgataccttgggcctgagagagagagtgagagccttaatggatgctcattaatattcctgtctttcttccagccctctgcaaagacaattttcttctccccagtaacagtatactaccggggtaccaccagggaccatgtgattgaatttctatctttggaaagtgttctccagagatgcccagggggtgctttgcctcctcccagctgtgcacattctcaggtgatgccacctgtgtggaggtattggatgcaggcgaagaggccctgcattgcttcttaaatgcaccaccattctgagctgtcgtgcttcatggtgcctctctacctcttccaggaagcactggccggggacttggggacaggcaagattgggagtagaaccctgacttgccctcacaggctccattgtaagctcactgggaagattcattttggcataatcacatataactgtggtcataccaacccttcccagttctagggcttgttttcacttagagcagactttagctcatcatggcagtgggtcagagcctgttaaagggactgactctgaccagatcaggttagcaagagctcttaagtccgagatggcctcagcatgtgatggggaggggctgttctctcccttcctgggtgtggcctgtggggagcgggggtcttggtgcctctggcaggacacagatacaggggaggataacctatggtgggaaccagcctcaggagttagtacatagtggtgaaatggatgatgtcatctctatggggacaggcacaatcattggaatttcttgaagcatggtaaaaggcaagtaacaaggtatgaaagctcttaggccttatatccagctgcactgaggcctgagactgctgacaattgacaaagggccattagtgctaaatacccttttttcttgtaatccaggacaagcttgggggaggggagaggccagtattgagtgcctgcggcatctgctactacatcttcaccattcggaacttgtaactaaaatatttaaagagaccgattttgaatgaaaattaaagggcaaatgttctcaaacaaggg

SEQ ID NO: 738 - DNA, 2637 bp, Cricetulus griseus
gacccggaatgtcctggagcgatcagataagaaggcttatgaagaggctcagaaacgcctcaagatggctgaggaagaccggaaagccatggtccccgagcttcgcaagaagtctcgccgcgagtacctggcaaagcgcgagcgggagaagctggaggacctggaggcagagctggcggatgaggaggtcctgtttggggacgtggagctgagccggcacgagcgcagggagctcaagtacaagcgtcgagtgcgggacctggcccgggagtaccgggcggccggcgagcaggagaagctggaggccaccaaccggtaccatatgcccaaggagactcggggacagccagctcgagctgtggacgtcgtggaggaggaatcgggcgccccaggagaggagcagcggcgctgggaggaggcccggctaggtgctgcatccctcaagttcggggccagggacgccgccgcccaggagcccaagtaccagctggtgctggaggaggacgagaccatcgagttcgtccgagccgctcagctgcagggagacgaggagccgtcgtcagttccacccccatcagcccaggcccagcagaaggagtccatccaggctgtccgccgcagcctgcccgtgttccccttccgagaggagctcctggccgccatcgccagccaccaagtcctcatcatcgaaggcgagaccggctccgggaagaccacacagatcccgcagtacctcttcgaggagggctacacaaagaagggtatgaagattgcttgtacccagccccgaagagtggcggccatgagcgtggctgccagagtggcccgggagatgggtgtgaagcttgggaatgaggttggctacagcatccgctttgaggactgcacatcagagcgaaccgttctccgctacatgacggatgggatgctgctacgggagttcctctctgaacccgaccttgcaagctacagcgtggtgatggtggatgaagctcatgaacggaccctgcacacagacattctcttcgggttaattaaggatgttgctcgattccgacccgagctcaaggtcctggtagcttcagccacgctggacactgcccggttttccaccttcttcgatgacgcccccgtcttccgaatccctggacgcaggtttccagttgacatcttctataccaaggccccagaggccgactacctggaagcctgtgtggtgtctgtgctgcagatccacgtgactcagccccctggggatatactggtgttcctgaccggacaggaggagattgaggccgcctgtgagatgctccaggaccgttgccgccgtctgggttccaaaatccgggagctcctggtgctgcccatttatgccaacctgccctcagacatgcaggcccgaatcttccagcccacaccccctggggcccgcaaggtggttgtggcaacaaacatcgcagaaacgtcgctcaccatcgaaggcatcatttacgtgctggacccagggttctgcaagcagaagagctacaatccccgcacgggcatggagtctctcaccgtcacaccctgcagcaaggcctctgccaatcagcgggctggccgtgcaggccgggtcgccgcggggaagtgcttccgcctgtacacagcctgggcctatcagcacgagctcgaggagaccacggttcccgagatccagaggacaagcctgggcaatgtggtgctgctgctgaagagcctagggatccacgacctgatgcactttgacttcctggaccctccaccctacgagaccctgctgttggctttggaacagctttatgcactgggagccctcaaccacctgggggaacttaccacgtctggtcgaaagatggcggagctgcctgtggatcccatgctgtctaagatgatcttggcctctgagaagtacagctgttcagaagagatcctgacagtggctgctatgctgtctgtcaacaactccatcttctaccggcccaaggacaaggtggtccatgccgacaacgcccgtgtcaacttcttcctccctggtggggaccacctggttctgctcaatgtgtacacacagtgggcggagagtggctactcttctcagtggtgctatgagaactttgtacagttcagatccatgcgccgagcccgggatgtgcgggaacagctggaggggctcctggagcgcgtggaagttggcttgacgtcctgccaaggagactacattcgtgtgcgcaaggccatcacttcgggttatttttaccacaccgcgaggctgactcggagtggctaccgcacagtgaagcagcagcagacagtgtttattcatcccaactcctctctctttgaacaacagccacgctggttgctttaccatgagcttgtcttgaccacaaaggagttcatgagacaggtcctggagattgagagcagctggctcttggaagtggccccccatactataaggccaaggaactagaagatccccatgctaagaaaatgacccaaaaaagtaggcaagacacgagaagagctgggctagtggatgacaaacggactggaccacacagcttcctttccttccatacttttttaatatttagtaaataaaattatttttggaat

SEQ ID NO: 739 - DNA, 2637 bp, Cricetulus griseus
  modified_base (2616)..(2616): a, c, t, g, unknown or other
ctcccctgggacggaggccggctgcggcgaatggctctcctgctggcggcttgcggaggcctggattcaggatttgttcctagtgtccaagactttgataagaaacttacagaggctgacgcttacctgcagatcttgatagaacaattaaagctttttgatgacaagcttcaaaattgtaaagatgatgaacaaagaaagaaagttgaaactctcaaagacacaacaaatagcatggtagaatcaattaaacactgcattgtgttactacagattgctaaaccttcccagactgtcttacctccagaacctgctcagttgtgtaagtcagagcagcgtccatcttccttacctgttggacctgtgttagctaccttgggacatcatcagactccaacaccaaatagcacaggcagtgggaattcaccacctagcagcagtctaactcctcccagccatgtcaacttgtctccaaatacagtcccagagttctcttactctagcagtgaagatgagttctatgatgctgatgaattccatcaaagtggttcttccccaaagcgcttaatagattcttcaggatctgcctcagtcttgacacacagcagctctggaaatagcctaaagcgcccagacaccacagaatcactgaattcctccatgtccaatggcacaagcgatgctgatctttttgattcccatgacgacagagatgacgatggggaggcagggtcggtggaggagcacaagagtgttatcatgcacctcttatcacaagttaggctcggaatggatcttacaaaggtagttcttccgacgtttattcttgagagaagatctcttttagaaatgtatgcagacttcttcgcacatccggacctgtttgtgagcattagcgaccagaaggatcccagggatcgaatggttcaggttgtgaaatggtatctctcagccttccatgcaggaaggagaggatcagtagccaaaaagccgtacaatcctattttgggtgagatctttcagtgtcactggacattgccaaatgatactgaagagaacacagaacttgtttcagaaggaccggttccgtgggtttctaagaacagtgtaacatttgtggctgagcaagtttcccatcatccacccatttcagccttttacgctgagtgttttaacaagaagatacaattcaatgctcatatctggactaaatcaaaattccttgggatgtctattggggtacacaacataggccagggctgtgtctcttgtctggagtatgatgagcattacatcctcacatttcccaatggctatggaaggtctatcctgacagtgccctgggtggaattaggaggagaatgcaatattcactgctccaaaacgggttacagtgcaaatatcgtcttccacactaagcctttctatgggggcaagaagcacagaattactgcagagattttttctccaaatgacaagaaatctttctgctcaattgaaggggaatggaatggtatcatgtatgcaaaatatgcaacaggggaaaataccatctttgtagataccaagaagttgcctataatcaagaaaaaagtgaggaaattggaagatcaaaacgagtatgagtcccgctgcctttggaaggatgtcactttcaatttaaaaatcagagacattgatgcagcaaccgaagcaaagcacagacttgaagaaagacaaagagcagaagcccgagaaaggaaggagaaagaaattcagtgggagacaaggctcttccatgaagatggagaatgctgggtgtatgatgaaccactactgaagcgtcttggtgctgtgaagcattagactggcaactcacttcgcacctggtgaccagggcagtaggcgtaactaagcaacaatcgatcttccttcaggagaagctgtcacttcctttcttattgcagtggttcctatctcagggatactggacttgatgacacagacgaacaattaaagtggaaaacacttcacttttgtcctctgtggcagttacaattctggcttcagtcctgagaaaaacttcaggttttgaaacaagatgtctcttccttttccagatcccatgcttcatttacagtcaagacagacccaggtcttagtgtcctgtcctcaattctgtggttcaggcatcacatcttttctcctagttcatataatatacacacagagtacacctgacaggttttccaccagtacaccctcctgtaaatactgtttcctcagagttgttttagaaaattagagcaatgtatggaaatcaagtattaggaaatttcatggtttcacctataatctttattttagaattgaactattattagattgtatctaaacctggattagtataattatatgcagtgcttcttaaggcttcataaaataatttcccaaccttttaaaaaatatgtttctttcattgtttatataactaaacttggaaaccaatttggcaacctctgactgaggcggaaatacagaactatgtttattaaaatacattaaaaaaacaaaacagggcagtttggtgctataacaaattagttacatgtaggcacacgagaactgggttctccncctcagaggacacaggccagg

SEQ ID NO: 740 - DNA, 2636 bp, Cricetulus griseus
tatataatgggaaaggtggactgattgatgatattgctctgatcagggatgatgatgtgttgtttgtgtgtgaaggagaaccatttattgatcctcagacagattctaaaaccaccaggaggattactaggatcccacacagactggctgacattaaatgtaggagggcgatatttcacaacaacaaggagcactttagtgaataaagagcccgacagtatgctggcgcacatgttcaaggacaaaggtgtctggggaaataagcaagatcatagaggagctttcttaattgaccgaagtcctgagtactttgaacctattttgaactacttacgtcatggacaactcattgtaaatgatggcattaacttactgggcgtgctagaagaagccagtttttggtattgactcactgatcgaacacctagaacagaggatcactcaccaatatctcgaaaggaatttgttcgatttctgctggctactccaacaaagtcagagctgcgctgccacgggccttaaacttcagtggtgctgacctctcccgtttggatcttcgatacattaacttcaaaatggccaatttaagccgctgcaacctcgcacatgcaaatctctgctgtgctaatcttgaacgagctgatctttctggatcagtgctcgactgcgcaaatctccagggagtcaagatgctctgctcaaacgcagaaggcgcatccctgaggctctgtaattttgaggatccttccggtcttaaagccaacttagagggtgctaatctgaaaggcgtagatatggaaggaagtcagatgacaggaattaaccttcgagttgccaccttaaaaaatgcaaaactgaagaactgtaatctcagaggggcaactttggcaggaactgacttggagaactgtgatttgtcggggtgtgacctccaggaagccaacctgagaggttccaacgtgaagggtgccatatttgaagagatgctgacaccattacatatgtcccagagtgtcagatgagagtggcaagagctggaggaacatgtccctgatgaaacgtgtctttattttatttctccattcatccaattgtctagaggagataacattgtacgggaattagaggcaaatgcttgttcccagaggtgcataaggggaaacaattgaatttcccccacattatgactataacagaagaacactctgtttatagatgtagggaaagtagatcgtgctgctgcattttgagtggagttggggcatttgtctggtttctgaccaggagtagtatctattatatttgcttttatataggcactgtgtagaagtaccatcttggtttacgatgcatttgagaattttaatttatgaaaagcacaatatatgcaaatatatttattgaacacctagatgcagtaaggatgtttaaattgttaaacgtcttgaaaactgaagagttgttgaggtttatgaatagctttagtgatgccttccctcttcaaatccctatcatatgtgagtgtggtgagggtaagactccctatggctcttttcagattcatttctataatgtttactttttaagaaaaaaacagtagctaaatttgaatcccattctgttctcacatcttgaggcaggatggaaggaaagaccttgtatatcattctgcaggagaaggaaggctccaccagttgctgcagctgtccagtgagcatgctcacaagcataagaagatacttcagaaccaaaacaccaacctgtatcctcagcacagttcatgtaatgccaagtagtttatacaggaccagcttagaataatctaaatccactgcagttggaactataaagtatgaataaatcctgcagaatggcctatgagaaggcaacatcagataattacaattaaaaccctacagagggggaccaaggaattctaaactgatggtttgattacagccaccaaaaaatgatgaataaaaattaagcattcggctagtataagctgcattatcagtcagtcagtaattgtggctcttctaaaaaaatattttctgttgtcttgtttttgaatgaaattgtcgtagagttttcttgagtttttcattatctgtacaacagcagcagcagttgggccttcttagtgggtgtcctagtgtccttatgtgttttctaagagcagggatataagctgtgtccaaatgggttctaaatcctacagactcgtcagcttgaggtagtgaatcatcacaggtgaccttgtctccttcaggagagtggcatgtcttcattattctgtagcttattcttatatctacatatgcaaagctttccttcacagtaaagggctcatatgcacagtgggaggagagtgctcctttacagggacaggaaagcaactttgaaaataaattattttctttgcgttattatttttaccaagacagagaagtattgtattgagagatacctattttcataatcaatatgtgcctaaattatatttaactcatttcactgcactctattttcaataattatagactgtgttcgttcactgaatggtcctctgcagacagccctgagactgcagagggagctggaagatgtaaacacacagtgtgcttgggaactgc

SEQ ID NO: 741 - DNA, 2636 bp, Cricetulus griseus
caattgctctggccatggaaagtgtacagctagtgtcctcgttgcaagccaagtgtactgtgagtgtgataaatactggaaaggggaagcctgtgatattccctactgtaaggccaactgtggcagccccgatcacggctactgtgacctgacaggagaaaaactctgtgtctgcaacgatagctggcaaggtccggattgttctctgaatgttccttctacggagtcttactggattttgccaaatgttaaacccttcagcccttctgtaggtcgggctttcacataaagcagttttacatgggaaatttatgtgggtgattggaggatattgaattgccagtgggatcagcggcagcaagaatgtcaggctttgccagctcacctttgtggagaaggctggaatcatgttggggatgcttgtcttcgaatcaattccagtagagaaagttatgacaatgcaaaactttattgctataatctcagtggaaatctggcttctctgacaacttccaaggaggtagagtttgtgttggatgaaatacagaagtacacacagcagaaagtatcgccttgggtaggcttacgcaagatcaacgtttcctactggggatgggaggacatgtcgcccttcacaaacaccacgctgcagtggcttccgggtgagcccaatgattctggcttctgtgcttacctagagagggctgcagtggcgggactaaaggcaaacccttgcacgtccatggcggatggccttgtttgtgaaaagcctgtgattgcattttcgcaacacaatacaatcatggatcttgtccagttttttgtcaccttcttcagttgttttttatccttgctgctggtggctgctgtggtttggaaaatcaaacagacttgctgggcttctcgacggagagagcaactgcttcgagagcgacagcagatggccagccgtccctttgcttctgttgatgtagaactggaagtaggagcggagcagacagactttctacgagggccattagagggtgcacctaaaccaatagccatagaaccctgtgctgggaacagagctgctgtcctgacggtgtttctctgtctaccaaggggatcgtcaggcgccccaccccccgggcagtcaggccttgctattgccagtgctctgatagacacctcacagcagaagccttctgataataaagacaagacttccggagtccgcaaccggaaacacctctccacacgtcaaggaacttgtgtctgaatggaaatcacttccgtgctatgtgctggtttacttcacaaatggcttccgttaaagctgttctgcggccttgggttttacagaggttaatgtcctatgatcccagccccgagcacagttccctgtaagtgggcaatgtcccaagtggccaaagaatgccaatgagttttttaaagtagcagtattgatgatcacaagtgataaagtcagtttttatggctcccttaggcttagagctaacataacttactatggaaaaagatgtatattgtttcttaatgtcagatggaaatatgtaattcatataaaccaactgtttatatcccaagactttaaagaaagacgttttatactgcttgaatggtgagaaatgtacagtttttgcctcttagcaaacttagattatttgagtataaataggaaatgaacaaatcatggcagctgtaattgctgttttgtctcattataaatatgaaagaaaggagtctggagtggccgtggttgacttcagggtgagcacaggagagaagagaacaatgaacaagatacccaaagctgctgtgcactctgtagtcttatttaatgttagagtcattacatctaatcaatgttaagtactgcatacacacttttcatgttctctggagttctggaaggggatgacactttacaattaatgcctccttacttgcatgccacggttgtacagtagcagaatatgaccctattccaatatcaaatatttatttcaaattccatgtatacatagcttaatttgatgaggatcgagtgtaatatgtaacagaaatgaccacagaatatgtactgcatcttataaaaacataggtcgcatctaaccatgatcgtcttattttgataactagccttttgaatatagtatatattctttatgttggcatgataacttcactatattttccatgcactcaaaatcagatgaacttgtagaatagttttagtaattttctctacagcctgtggggtttggctgggagatgaagggatggttgctggtacttcccaggagattttctctcagagtattacttgagctgaatttgtaattgtctcctaaaaacaatcaaggaattcgatcaacttcttttggatactttacatgtggatttttcccatgaaattggaggagctgtccagtctcacccaccatgaatccctacagggttcttaaaacttgaaaatttgaattttagataattatggaatttaatgcaatgtcacactctaccattaactctgtggccaattatgcaatatattctcggcatataaagctttttactggaaataaaattcttcacccccaggtgaggtgaagccaaaaaacaaaaaaaaa

SEQ ID NO: 742 - DNA, 2635 bp, Cricetulus griseus
cgggtccaggccccgctgcaacccgcccggcgccggacagcctgccgccgtcgccgcgtccctcgaaacctatagccgcccgccgccagcgccgcccgccgagcaagatgggaaatgaggcgagttaccctttggaaatgtgctcacactttgatgctgatgaaatcaaaaggctaggaaagagattcaagaagcttgatttggacaattccggttctttgagcgtggaagagttcatgtctctgcctgagttacaacagaaccctttagtacagcgggtaatagacatattcgacacagatgggaacggagaagtagacttcaaagaattcattgaaggagtctctcagttcagtgtcaaaggcgataaggaacagaagttgaggtttgctttccgtatctatgacatggataaagatggctatatttccaatggggaactcttccaggtgttgaagatgatggtggggaacaacctgaaagatacgcagttacagcagattgtagacaaaaccataataaatgcggataaggatggagatggaagaatatcctttgaggaattctgtgctgttgtaggtggcctagatatccacaaaaagatggtggtggatgtgtgactctttgaagaataccacccaacacttttgctttcttctccatctctgaagatctgctcaagacgtccagcaatgctctctgtgtatttaaatggaagtatttttctctgtgaagccacattttccaacatgagcctcatgaagccaactaagtgttattgaactcctactctctcaataactccgtgtagcactttaaggtttgaaggacagcaacaggaaaagagcatatcagtatggtggagaaagggaaggggttggctttttaatttatttttcttcatcttttataacaagaaagtatctatatatacatatgtaaatatttatatatagatatatgtagctttctatatatttagtaggttggctttaatttaatatacttgattcagaaacaaaatgttagagtacaaaagtgccaagcagaacatcaaacacccttacttttatttcacacagttttatatgtagatagaagattgtacaatttgcgccagggttaggccagctatttcctttctctgtgctttctcctttgagagattgataaagcatttgttaatgccctattatttaccttaattacatttttgtaacgagtctgtaactttatttatatctctgaatatatttccagggaccgtgtcttattgctgagcagcgtttaatccctatctgttggaggtctagttcagtgctgttgccaagaatggattctgtgtccatagaagaactgcatatgctatggctgcttcaggctgatactttatagtcgctgttatttttattaagtgtccctgagtaaatgtaattagcagttgtggttttataacaggagttttctgaggcagttatgactttttagatacattatttagtgagaaaaacccaaagaaatcatataatggcttagaatatctttgcttcattatacacaacttctgcatttcaaaagatgtatcagttcatctaaaaaactatcgatattttaatgagcacatatttatgtaaaatcctgtttgtgattaaaatgggaaaaatcttgctaatctatatgcatagaagagcagattttgtctatatttatactttacaagtttctttgccagaggcaagatagcacatgatggatttttgttgttttgcccacatgattagtgatatggataatgacttaataaatttgtgtgacataaaagtatgtcatgttctaccacttgacattatcccttcccttttctgcaaaggtactattggctggaagtaaaacattctggttagttttatatgatagtcttccctacatagtttttctattacaattggttttataatcatgaatggtaaagggcgggttgaatcaaggtaaaagaatattaaattgagcacacctgcctgccaccgctgttccttcaactgagtgctgcacaccatgggctctgtctgtgagagaaaaatcccggtgcttggtgtctttgcatgacatggagttttgcatgtagatcaatttaaaatgtacctcttgtttacataatttgcataattttaaaagatgatgttgccaaactttggaaatgttaatattcaaaatgaaaaatctccactacatgtaagtactttcttcctctgggtcagtacgtggcttacaatcccagccagtggtttgatctgttccagtgtcaactgccatgtgctctgcttcaagagggaactagtcttttgtgaatttttttgtacataattatttgttacaaatattttagcaaatgctttctatatctcttgcttgtgcatatcttggctggcgttgtggaaaaaaatagtgcaaattatttcaaattatttccttactggggtatgggggttttcttttttagtttgtgtgagggaggtggggagggcatggtttatgttgaatgtttaaattttcttctgcatgatacacgtcatgttgtgaaatctttagagaacttcatactgtatgagtaagaaaataaaatatttgaaacttg

SEQ ID NO: 743 - DNA, 2635 bp, Cricetulus griseus
  modified_base (748)..(748): a, c, t, g, unknown or other
tgggctaggacagctttggcttccatgtcaactatgaaggcatcgtggcagatgtagagccctacggctatgcctggcaaggcaggtctgaggcagggcagccgcctggtggagatctgcaaggtggcggtggccaccttgagccatggagcagatgattgatctcttggagaacatccgtcactagtgaaagttgtcatcatcccctccccatgacgactgcaccccacggaggaagttgctcagaaacctaccgaatgccagtgatggagtacaagatgaatgaaggtgtttcctatgagttcaagtttcccttcaggaataataacaaatggcagcggaatgctaacaagggtgctcactcaccccaggtcccatcccagctgcagagtcccatgacctctcggctgaatgctgggaaaagagatgggaaaatgccccctccagaaagagccggcaacatccctcgaagcatctctagtgacgggcgcccactggaaaggaggctgtctcctggttcagacatctatgtgacagtctcatccatggctttggcaagatcccagtgccgtaactcccccagtaacctgtcttcatccagtgagactggctctgggggtggcacctacagacaaaaatccatgcccgaagggtttggggtgagccgaacgatccccagcctccatcgacaggcagaacactcagtccgatattggtggcagtgggaaatccacacccagctggcagngaagtgaggacagcattgcgaccagatggagcctacgtgccatctcccagcagtatcaaaggtactgcctgctttccgagacagccccagtgggagattaatccggcaggatccagtggttcacttgtctccaaacaaacaaggccattctgacagccactactccagccactccagcagcaataccctctccagcaacgcatcaagtgcccacagtgacgagaagtggtatgatggggaccgcacagaatctgaactcaacagctataactacctgcagggcacctctgctgacagtggtatcgataccacctcctacggcctgagccatggcagcacggcctccctgggggctgccacttcatcacctcgttcggggccaggcaaagagaaagtggcgcccctgtggcatagctccagtgaagtgctctccctggcagatcggaccctagagactgagggccacggcctggacaggaaaacagagtcctctctcagcttggacctccacagcaagagccagggcggctcaagcccactgaccagggagaacagcaccttcagcataaatgatgctgggtcacacaccagtaccatgagctcccgacactctgccagcccagtggtgttctccagtgcccgaagctcacccaaagaggagcttcatcccaccacaacctcccaactcgcaccttccttctcctctgcttcctcgtcctcctctgggcctaggactttctacccccgccagggtgccactagcaagtacttgatcggatggaaaaaaccagaaggaaccattaactctgtgggatttatggatacaagaaagcggcaccagagtgatggtaatgagatggcccacactaggctccgagcctcaaccagggaccttcgggcttcccccaagcccacttccaagtccaccattgaggaggatctaaagaaactcatcgaccttgagagcccaactcccgaatcacagaagaatttcaagttccacgcactgtcctccccacagtctccattccccccaacccctacctcccggcgggccttacacaggacactgtctgacgagagcatttacagcggccagagggagcacttcttcgcctccagggcttcacttctagaccaagccctgcccaatgatgtcctcttcagcagcacctacccgtctctccccaagtcactacccctaaggaggccatcttacacattgggaatgaagtctctgcatggagaattctctgcctcggacagctccctcactgacatccaggagacccgaaggcagcccatccctgaccctggcctaatgcccctgcctgacactgccgcagacttggactggtccaacctagtggatgccgccaaagcctatgaggtccagagagcctcgtttttgctgctagtgatgaaaaccatcgccctttgagtgcggcctccaacagtgaccagctggaggagcaggccctggtccagatgaagtcctacagcagtaaggagtcctctcccactctggcttctaaagtggaccagttggaagggatgctgaagatgcttcgagaagatttgaagaaggaaaaagaggacaaggcccatctccaggcagaggtgcagcacttgcgtgaggacaacttgaggctacaggaggagtcccagaatgcctcggacaagctgaagaagttcacagagtgggtcttcaataccatagacatgagctaagggcagcttcggaagaagaggggcaggctgctccctgtgggggccctcaccatcccttcaggccttggaaagtatttgggcatccctagcttccactctgctcctgtccgacagtgcacaacacaattgcagatcaacaatcattatctgcctttt

SEQ ID NO: 744 - DNA, 2634 bp, Cricetulus griseus
ctttaaaaagatgatggaagaatttgtaccccatagcaagtctctttcagacgcgctaatttctcttcagatggtatatcctagacggaatctttcagcagagcagtggagaaccagttgttgagtctcatcagtgcacccagtacaatgctcaaccctgcccagtctgacactatgccttgtgaatatctctccttggatgcaatggagaaatggattatctttggctttattctgtgccacgggatgctaaatacagaggctacagcactgaaccctttggaagctagctcttcagagtagctcttgcctctctctctttcgggacgaagttttccacattcacaaagctgcagaagatttatttgtaaacattcgaggctataataaacgtattaacgacataagagaatgacaaggaggcagctgtatcacatgctggctcaatgcacagagaaaggcgcaagtttttaaggtctgcactgaaagaactggcaactgtcctgtctgatcagcctggcctgcttggtcccaaaggcactagaggtactacgtgcagtacctctctggctttgacgctgtggtcctcaatgagctcgtgcagaatctatctgtttgccctgaagatgaatcaatcatcatgtcatcttttgttaacactatgacttccctaagtgtaaagcaagtcgaagatggggaagtatttgatttcattggtttagattacaggcatacactagtgtctccaaagcttcacttagccttgcagatcaccgagaacttggaaagatgatgaatacaataatatttcatacgaaaatggtagattccttggtggaaatgctggtagaaacatcagatctctccatattttgtttttacagccgtgcttttgagaagatgtttcagcagtgcttggagttaccctctcagtcaagatactccatagcatttcctctcctctgcactcacttcatgagctgcacacacgagctgtgtcccgaagagcgccatcatattggagaccgcagtctttccctgtgtaatatgttcctggatgaaatggccaagcaagctcgaaacctcatcactgatatttgcacagaacaatgtactcttagtgatcagttactgcctaagcattgtgccaaaaccatcagtcaagcagtgaataagaagtcaaaaaaacagactggcaagaaaggggaaccggaaagggaaaaaccgggtgttgagagcatgaggaaaaacaggctggtagtgaccaaccttgataagttgcacactgcactttcggagttatgcttctccataaattatgttccaaacatggtggtctgggagcacaccttcacgcctcgagagtatttgacttctcacctggaaatacgcttcactaaatcaattgttggaatgactatgtataatcaagctacacaggaaattgcaaagccatcagagcttctaacaagtgtaagagcatatatgactgtactccagtccatagagaactatgtgcagatcgatatcaccagagtgtttaataatgttcttcttcaacaaacacaacacttagacagtcatggagaaccaaccattacaagtctatataccaattggtacttggaaactttactgagacaagtcagcaatggccatatagcttattttcctgccatgaaagcatttgtgaatttacccacagaaaatgaattaacattcaatgcagaggaatattctgacatatcagaaatgaggtctttatcagagctcctaggcccatatgggatgaagttcctaagtgagagtcttatgtggcatatttcatcacaagttgctgaacttaagaaacttgtggtagagaatgttgatgtgctaacacaaatgaggaccagctttgacaagccagaccagatggctgcactctttaaaagattatcctctgttgacagtgtcttgaaaaggatgaccataattggtgttattttatccttccgatcattggcacaagaagcactgagagatgttttgtcttaccacattcctttccttgtgagttccattgaagatttcaaggatcacattccaagggaaactgacatgaaggttgcaatgaatgtgtatgagttatcgtcagctgctggattaccatgtgagattgatcctgccttagttgtagctctttcctcacaaaaatcagacaacattagtccagaagaagaatataagattgcttgcctcctgatggtctttgtagcagtctccttgcctacactggccagcaatgtgatgtcgcagtacagccctgctatagaagggcactgcaacaatatacattgtttggccaaagccatcaaccagatcgctgcagctttgtttacaattcacaaaggaagtattgaagaccgacttaaagaattcctggcgcttgcgtcctccagtctactgaaaatcggccaagagacagataaaactacaacaagaaatagagaatctgtttatttgctactggatatgattgtacaggaatcaccattcctaacaatggatctcttggaatcttgctttccttatgtattgctgcgaaacgcataccatgctgtctacaaacaaagtgttacatcttctgcatag

(The sequence listing continues in the following parts.)

1. A method for producing an immunogenic agent in a large scale host cell culture, comprising:
(a) contacting a host cell in a large scale host cell culture with at least a first RNA effector molecule, a portion of which is complementary to at least one target gene of a host cell,
(b) maintaining the host cell culture for a time sufficient to modulate expression of the at least one first target gene, wherein the modulation of expression improves production of an immunogenic agent in the host cell;
(c) isolating the immunogenic agent from the host cell;
wherein the large scale host cell culture is at least 1 Liter in size, and wherein the host cell is contacted with at least a first RNA effector molecule by addition of the RNA effector molecule to a culture medium of the large scale host cell culture such that the target gene expression is transiently inhibited.

2. (canceled)

3. The method of claim 1, wherein the host cell in the large scale host cell culture is contacted with a plurality of RNA effector molecules, wherein the plurality of RNA effector molecules modulate expression of at least one target gene, at least two target genes, or a plurality of target genes.

4. A method for production of an immunogenic agent in a cell, the method comprising:
(a) contacting a host cell with a plurality of RNA effector molecules, wherein the two or more RNA effector molecules modulate expression of a plurality of target genes;
(b) maintaining the cell for a time sufficient to modulate expression of the plurality of target genes, wherein the modulation of expression improves production of the immunogenic agent in the cell; and
(c) isolating the immunogenic agent from the cell,
wherein the plurality of target genes comprises at least Bax, Bak, and LDH.

5. The method of claim 4, wherein the host cell is contacted with the plurality of RNA effector molecules by addition of the RNA effector molecule to a culture medium of the large scale host cell culture such that the target gene expression is transiently inhibited.

6. The method of claim 1, wherein the RNA effector molecule, comprises a double-stranded ribonucleic acid (dsRNA), wherein said dsRNA comprises at least two sequences that are complementary to each other and wherein a sense strand comprises a first sequence and an antisense strand comprises a second sequence comprising a region of complementarity which is substantially complementary to at least part of a target gene, and wherein said region of complementarity is 10-30 nucleotides in length.

7. The method of claim 1, wherein the contacting step is performed by continuous infusion of the RNA effector molecule into the culture medium used for maintaining the host cell culture to produce the immunogenic agent.

8. The method of claim 1 wherein the modulation of expression is inhibition of expression, and wherein the inhibition is a partial inhibition.

9. The method of claim 8, wherein the partial inhibition is no greater than a percent inhibition selected from the group consisting of: 10%, 15%, 20%, 25%, 30%, 35%, 40%, 45%, 50%, 55%, 60%, 65%, 70%, 75%, 80%, and 85%.

10. The method of claim 1 wherein the contacting step is repeated at least once.

11. The method of claim 1 wherein the contacting step is repeated multiple times at a frequency selected from the group consisting of: 6 hr, 12 hr, 24 hr, 36 hr, 48 hr, 72 hr, 84 hr, 96 hr, and 108 hr.

12. The method of claim 1 wherein the modulation of expression is inhibition of expression and wherein the contacting step is repeated multiple times, or continuously infused, to maintain an average percent inhibition of at least 50% for the target gene(s) throughout the production of the immunogenic agent.

13. The method of claim 12, wherein the average percent inhibition is selected from the group consisting of at least 50%, at least 60%, at least 70%, at least 80%, at least 90%, at least 95%, at least 99%, or 100%.

14. The method of claim 1 wherein the RNA effector molecule is contacted at a concentration of less than 100 nM.

15. The method of claim 1 wherein the RNA effector molecule is contacted at a concentration of less than 20 nM.

16. The method of claim 1 wherein said contacting a host cell in a large scale host cell culture with a RNA effector molecule is done at least 6 hr, at least 12 hr, at least 18 hr, at least 36 hr, at least 48 hr, at least 60 hr, at least 72 hr, at least 96 hr, or at least 120 hr, or at least 1 week, before isolation of the immunogenic agent or prior to harvesting the supernatant.

17. The method of claim 1 wherein the RNA effector molecule is composition formulated in a lipid formulation.

18. (canceled)

19. The method of claim 1 wherein the RNA effector molecule is not shRNA.

20. The method of claim 1 wherein the RNA effector molecule is siRNA.

21. The method of claim 1 wherein the RNA effector molecule is chemically modified.

22-143. (canceled)
